United States Patent Application Publication US 2021/0254056 A1 - sequence listing, part 4

SEQ ID NO: 5190 - protein, 923 aa, Homo sapiens
  MOD_RES (21)..(21): Selenocysteine
  MOD_RES (24)..(24): Selenocysteine
  MOD_RES (35)..(35): Selenocysteine
  MOD_RES (40)..(40): Selenocysteine
  MOD_RES (59)..(59): Selenocysteine
  MOD_RES (63)..(63): Selenocysteine
  MOD_RES (115)..(115): Selenocysteine
  MOD_RES (169)..(169): Selenocysteine
  MOD_RES (172)..(172): Selenocysteine
  MOD_RES (229)..(229): Selenocysteine
  MOD_RES (232)..(232): Selenocysteine
  MOD_RES (299)..(299): Selenocysteine
  MOD_RES (338)..(338): Selenocysteine
  MOD_RES (383)..(383): Selenocysteine
  MOD_RES (392)..(392): Selenocysteine
  MOD_RES (400)..(400): Selenocysteine
  MOD_RES (421)..(421): Selenocysteine
  MOD_RES (431)..(431): Selenocysteine
  MOD_RES (435)..(435): Selenocysteine
  MOD_RES (454)..(454): Selenocysteine
  MOD_RES (461)..(461): Selenocysteine
  MOD_RES (464)..(464): Selenocysteine
  MOD_RES (477)..(477): Selenocysteine
  MOD_RES (484)..(484): Selenocysteine
  MOD_RES (488)..(489): Selenocysteine
  MOD_RES (493)..(493): Selenocysteine
  MOD_RES (495)..(495): Selenocysteine
  MOD_RES (584)..(584): Selenocysteine
  MOD_RES (609)..(609): Selenocysteine
  MOD_RES (731)..(731): Selenocysteine
  MOD_RES (750)..(750): Selenocysteine
  MOD_RES (790)..(790): Selenocysteine
  MOD_RES (797)..(797): Selenocysteine
  MOD_RES (835)..(835): Selenocysteine
  MOD_RES (850)..(850): Selenocysteine
  MOD_RES (853)..(853): Selenocysteine
  MOD_RES (856)..(856): Selenocysteine
  MOD_RES (874)..(874): Selenocysteine
  MOD_RES (877)..(877): Selenocysteine
  MOD_RES (897)..(897): Selenocysteine
MSQFKRQRINPLPGGRNFSGXASXSLLGPPPGLLXPPVAXELSQNARHLQGGEKQRVFXGIVXSLHDYFGVVDEEVFFQLSVVKGRLPQLGEKVLVKAAYNPGQAVPWNAVKVQXLSNQPLLKSPAPPLLHVAALGQKQGILGAQPQLIFQPHRIPPLFPQKPLSLFQXSHXLHLSHLNRFPARGPHGRLDQGRSDDYDSKKRKQRAGGEPWGAKKPRHDLPPYRVHLXPYXVDSPICDFLELQRRYRSLLVPSDFLSVHLSWLSAFPLSQPFSLHHPSRIQVSSEKEAAPDAGAEPIXADSDPAYSSKVLLLSSPGLEELYRCCMLFVDDMAEPREXPEHPLKQIKFLLGRKEEEAVLVGGEWSPSLDGLDPQADPQVLVRXAIRCAQAQXGIDLSGCXKWWRFAEFQYLQPGPPRRLQXVVVYLPDVWXIMPXLEEWEALCQQKAAEAAPPXQEAQGEXEPXEQAPDALEQAADXSRRNAEXPEAXXQQEXDXDLPEAPPPPLEPAVIARPGCVNLSLHGIVEDRRPKERISFEVMVLAELFLEMLQRDFGYRVYKMLLSLPEKVVSPPEPEKEEAAKEEAXKEEEAIKEEVVKEPKDEAQNEGPAXESEAPLKEDGLLPKPLSSGGEEEEKPRGEASEDLCEMALDPELLLLRDDGEEEFAGAKLEDSEVRSVASNQSEMEFSSLQDMPKELDPSAVLPLDCLLAFVFFDANWCGYLHRRDLERILLXLGIRLSAEQAKQLVSRVVXQNICQYRSLQYSRQEGLDGGLPEEVLFGNLDLLPPPGKSXKPGAAPXEHKALVSHNGSLINVGSLLQRAEQQDSGRLYLENKIHXLELKLEESHNRFSAXEVXNKXLAAEMQELRVRLAEAEEXARXAERQKSQLQRLLQELRRRLXPLQLEIQRVVEKADSWVEKEEPAPSN

SEQ ID NO: 5191 - protein, 272 aa, Homo sapiens
  MOD_RES (47)..(47): Selenocysteine
  MOD_RES (72)..(72): Selenocysteine
  MOD_RES (194)..(194): Selenocysteine
  MOD_RES (213)..(213): Selenocysteine
  MOD_RES (253)..(253): Selenocysteine
  MOD_RES (261)..(261): Selenocysteine
MVLAELFLEMLQRDFGYRVYKMLLSLPEKVVSPPEPEKEEAAKEEAXKEEEAIKEEVVKEPKDEAQNEGPAXDFVCLVEGGWAFAKPLSSGGEEEEKPRGEASEDLCEMALDPELLLLRDDGEEEFAGAKLEDSEVRSVASNQSEMEFSSLQDMPKELDPSAVLPLDCLLAFVFFDANWCGYLHRRDLERILLXLGIRLSAEQAKQLVSRVVXQNICQYRSLQYSRQEGLDGGLPEEVLFGNLDLLPPPGKSXKPGCPHRXQSLGVPQWQPD

SEQ ID NO: 5192 - protein, 277 aa, Homo sapiens
  MOD_RES (5)..(5): Selenocysteine
  MOD_RES (11)..(11): Selenocysteine
  MOD_RES (47)..(47): Selenocysteine
  MOD_RES (50)..(50): Selenocysteine
  MOD_RES (117)..(117): Selenocysteine
  MOD_RES (156)..(156): Selenocysteine
  MOD_RES (201)..(201): Selenocysteine
  MOD_RES (210)..(210): Selenocysteine
  MOD_RES (218)..(218): Selenocysteine
  MOD_RES (239)..(239): Selenocysteine
  MOD_RES (249)..(249): Selenocysteine
  MOD_RES (253)..(253): Selenocysteine
  MOD_RES (272)..(272): Selenocysteine
MWFLXVGDGSXSSDDYDSKKRKQRAGGEPWGAKKPRHDLPPYRVHLXPYXVDSPICDFLELQRRYRSLLVPSDFLSVHLSWLSAFPLSQPFSLHHPSRIQVSSEKEAAPDAGAEPIXADSDPAYSSKVLLLSSPGLEELYRCCMLFVDDMAEPREXPEHPLKQIKFLLGRKEEEAVLVGGEWSPSLDGLDPQADPQVLVRXAIRCAQAQXGIDLSGCXKWWRFAEFQYLQPGPPRRLQXVVVYLPDVWXIMPXLEEWEALCQQKAAEAAPPXQEAQG

SEQ ID NO: 5193 - protein, 183 aa, Homo sapiens
  MOD_RES (1)..(1): Any amino acid
  MOD_RES (29)..(29): Selenocysteine
  MOD_RES (32)..(32): Selenocysteine
  MOD_RES (43)..(43): Selenocysteine
  MOD_RES (48)..(48): Selenocysteine
  MOD_RES (67)..(67): Selenocysteine
  MOD_RES (71)..(71): Selenocysteine
  MOD_RES (123)..(123): Selenocysteine
  MOD_RES (177)..(177): Selenocysteine
  MOD_RES (180)..(180): Selenocysteine
XLPVAAAAAAVVVPGVFVPPVSLPWPAGXASXSLLGPPPGLLXPPVAXELSQNARHLQGGEKQRVFXGIVXSLHDYFGVVDEEVFFQLSVVKGRLPQLGEKVLVKAAYNPGQAVPWNAVKVQXLSNQPLLKSPAPPLLHVAALGQKQGILGAQPQLIFQPHRIPPLFPQKPLSLFQXSHXLHL

SEQ ID NO: 5194 - protein, 148 aa, Homo sapiens
  MOD_RES (1)..(1): Any amino acid
  MOD_RES (12)..(12): Selenocysteine
  MOD_RES (16)..(16): Selenocysteine
  MOD_RES (68)..(68): Selenocysteine
  MOD_RES (122)..(122): Selenocysteine
  MOD_RES (125)..(125): Selenocysteine
XLQGGEKQRVFXGIVXSLHDYFGVVDEEVFFQLSVVKGRLPQLGEKVLVKAAYNPGQAVPWNAVKVQXLSNQPLLKSPAPPLLHVAALGQKQGILGAQPQLIFQPHRIPPLFPQKPLSLFQXSHXLHLSHLNRFPARGPHGRLDQGRR

SEQ ID NO: 5195 - protein, 615 aa, Homo sapiens
  MOD_RES (1)..(1): Any amino acid
  MOD_RES (30)..(30): Selenocysteine
  MOD_RES (75)..(75): Selenocysteine
  MOD_RES (84)..(84): Selenocysteine
  MOD_RES (92)..(92): Selenocysteine
  MOD_RES (113)..(113): Selenocysteine
  MOD_RES (123)..(123): Selenocysteine
  MOD_RES (127)..(127): Selenocysteine
  MOD_RES (146)..(146): Selenocysteine
  MOD_RES (153)..(153): Selenocysteine
  MOD_RES (156)..(156): Selenocysteine
  MOD_RES (169)..(169): Selenocysteine
  MOD_RES (176)..(176): Selenocysteine
  MOD_RES (180)..(181): Selenocysteine
  MOD_RES (185)..(185): Selenocysteine
  MOD_RES (187)..(187): Selenocysteine
  MOD_RES (276)..(276): Selenocysteine
  MOD_RES (301)..(301): Selenocysteine
  MOD_RES (423)..(423): Selenocysteine
  MOD_RES (442)..(442): Selenocysteine
  MOD_RES (482)..(482): Selenocysteine
  MOD_RES (489)..(489): Selenocysteine
  MOD_RES (527)..(527): Selenocysteine
  MOD_RES (542)..(542): Selenocysteine
  MOD_RES (545)..(545): Selenocysteine
  MOD_RES (548)..(548): Selenocysteine
  MOD_RES (566)..(566): Selenocysteine
  MOD_RES (569)..(569): Selenocysteine
  MOD_RES (589)..(589): Selenocysteine
XVLLLSSPGLEELYRCCMLFVDDMAEPREXPEHPLKQIKFLLGRKEEEAVLVGGEWSPSLDGLDPQADPQVLVRXAIRCAQAQXGIDLSGCXKWWRFAEFQYLQPGPPRRLQXVVVYLPDVWXIMPXLEEWEALCQQKAAEAAPPXQEAQGEXEPXEQAPDALEQAADXSRRNAEXPEAXXQQEXDXDLPEAPPPPLEPAVIARPGCVNLSLHGIVEDRRPKERISFEVMVLAELFLEMLQRDFGYRVYKMLLSLPEKVVSPPEPEKEEAAKEEAXKEEEAIKEEVVKEPKDEAQNEGPAXESEAPLKEDGLLPKPLSSGGEEEEKPRGEASEDLCEMALDPELLLLRDDGEEEFAGAKLEDSEVRSVASNQSEMEFSSLQDMPKELDPSAVLPLDCLLAFVFFDANWCGYLHRRDLERILLXLGIRLSAEQAKQLVSRVVXQNICQYRSLQYSRQEGLDGGLPEEVLFGNLDLLPPPGKSXKPGAAPXEHKALVSHNGSLINVGSLLQRAEQQDSGRLYLENKIHXLELKLEESHNRFSAXEVXNKXLAAEMQELRVRLAEAEEXARXAERQKSQLQRLLQELRRRLXPLQLEIQRVVEKADSWVEKEEPAPSN

SEQ ID NO: 5196 - protein, 46 aa, Homo sapiens
  MOD_RES (6)..(6): Selenocysteine
  MOD_RES (10)..(10): Selenocysteine
  MOD_RES (20)..(20): Selenocysteine
  MOD_RES (43)..(43): Selenocysteine
MVKAGXCCAXCKEFYQMKQXVLQLKQKIALLPNNAADLGKYIXGDK

SEQ ID NO: 5197 - protein, 406 aa, Homo sapiens
  MOD_RES (32)..(32): Selenocysteine
  MOD_RES (34)..(34): Selenocysteine
  MOD_RES (54)..(55): Selenocysteine
  MOD_RES (67)..(68): Selenocysteine
  MOD_RES (103)..(103): Selenocysteine
  MOD_RES (112)..(112): Selenocysteine
  MOD_RES (144)..(144): Selenocysteine
  MOD_RES (153)..(153): Selenocysteine
  MOD_RES (173)..(173): Selenocysteine
  MOD_RES (175)..(175): Selenocysteine
  MOD_RES (184)..(184): Selenocysteine
  MOD_RES (197)..(197): Selenocysteine
  MOD_RES (201)..(201): Selenocysteine
  MOD_RES (211)..(211): Selenocysteine
  MOD_RES (234)..(234): Selenocysteine
  MOD_RES (243)..(243): Selenocysteine
  MOD_RES (350)..(350): Selenocysteine
  MOD_RES (361)..(361): Selenocysteine
  MOD_RES (393)..(393): Selenocysteine
  MOD_RES (395)..(395): Selenocysteine
MVPPPPSRGGAARGQLGRSLGPLLLLLALGHXWXYREEPEDGDREICSESKIAXXKYPCLKSSGELXXCYRKKCCKGYKFVLGQCIPEDYDVCAEAPCEQQCXDNFGRVLCXCYPGYRYDRERHRKREKPYCLDIDECASSNGXLCAHICINXLGSYRCECREGYIREDDGKXCXRGDKYPNDXGHEKSENMVKAGXCCAXCKEFYQMKQXVLQLKQKIALLPNNAADLGKYIXGDKVLASNXYLPGPPGLPGGQGPPGSPGPKGSPGFPGMPGPPGQPGPRGSMGPMGPSPDLSHIKQGRRGPVGPPGAPGRDGSKGERGAPGPRGSPGPPGSFDFLLLMLADIRNDIXELQEKVFGHRXHSSAEEFPLPQEFPSYPEAMDLGSGDDHPRRXEXRDLRAPRDFYP

SEQ ID NO: 5198 - protein, 336 aa, Homo sapiens
  MOD_RES (33)..(33): Selenocysteine
  MOD_RES (42)..(42): Selenocysteine
  MOD_RES (74)..(74): Selenocysteine
  MOD_RES (83)..(83): Selenocysteine
  MOD_RES (103)..(103): Selenocysteine
  MOD_RES (105)..(105): Selenocysteine
  MOD_RES (114)..(114): Selenocysteine
  MOD_RES (127)..(127): Selenocysteine
  MOD_RES (131)..(131): Selenocysteine
  MOD_RES (141)..(141): Selenocysteine
  MOD_RES (164)..(164): Selenocysteine
  MOD_RES (173)..(173): Selenocysteine
  MOD_RES (280)..(280): Selenocysteine
  MOD_RES (291)..(291): Selenocysteine
  MOD_RES (323)..(323): Selenocysteine
  MOD_RES (325)..(325): Selenocysteine
RKKCCKGYKFVLGQCIPEDYDVCAEAPCEQQCXDNFGRVLCXCYPGYRYDRERHRKREKPYCLDIDECASSNGXLCAHICINXLGSYRCECREGYIREDDGKXCXRGDKYPNDXGHEKSENMVKAGXCCAXCKEFYQMKQXVLQLKQKIALLPNNAADLGKYIXGDKVLASNXYLPGPPGLPGGQGPPGSPGPKGSPGFPGMPGPPGQPGPRGSMGPMGPSPDLSHIKQGRRGPVGPPGAPGRDGSKGERGAPGPRGSPGPPGSFDFLLLMLADIRNDIXELQEKVFGHRXHSSAEEFPLPQEFPSYPEAMDLGSGDDHPRRXEXRDLRAPRDFYP

SEQ ID NO: 5199 - protein, 502 aa, Homo sapiens
  MOD_RES (3)..(3): Selenocysteine
  MOD_RES (10)..(10): Selenocysteine
  MOD_RES (21)..(21): Selenocysteine
  MOD_RES (49)..(49): Selenocysteine
  MOD_RES (82)..(82): Selenocysteine
  MOD_RES (105)..(105): Selenocysteine
  MOD_RES (112)..(112): Selenocysteine
  MOD_RES (124)..(124): Selenocysteine
  MOD_RES (126)..(126): Selenocysteine
  MOD_RES (130)..(130): Selenocysteine
  MOD_RES (172)..(172): Selenocysteine
  MOD_RES (198)..(198): Selenocysteine
  MOD_RES (202)..(202): Selenocysteine
  MOD_RES (214)..(215): Selenocysteine
  MOD_RES (220)..(220): Selenocysteine
  MOD_RES (223)..(223): Selenocysteine
  MOD_RES (227)..(227): Selenocysteine
  MOD_RES (249)..(249): Selenocysteine
  MOD_RES (303)..(303): Selenocysteine
  MOD_RES (322)..(322): Selenocysteine
  MOD_RES (342)..(342): Selenocysteine
  MOD_RES (357)..(357): Selenocysteine
  MOD_RES (366)..(366): Selenocysteine
  MOD_RES (378)..(378): Selenocysteine
  MOD_RES (389)..(389): Selenocysteine
  MOD_RES (391)..(391): Selenocysteine
  MOD_RES (398)..(398): Selenocysteine
  MOD_RES (427)..(427): Selenocysteine
  MOD_RES (441)..(441): Selenocysteine
  MOD_RES (449)..(449): Selenocysteine
  MOD_RES (455)..(455): Selenocysteine
  MOD_RES (458)..(458): Selenocysteine
  MOD_RES (482)..(482): Selenocysteine
  MOD_RES (488)..(488): Selenocysteine
  MOD_RES (490)..(491): Selenocysteine
MEXLQESLNXLLKQLEEEKKXLESQVKYYALKLEQESKAYQKINNERRXYLAEMSQGSGLHQVSKRQQVDQLPRMQENLVKXLLLKEELDPLKAKIDILLVGDVXVGYLADXVQKLFANIAEVXIXISDXKEAAALLDDCIFNMVLLKVPSSLSAEELEAIKLIRFGKKKNXHSLFVFIIPENFKGCISGHGMDIALXEPLXMEKMSNVVKYWXXCPSNXVKXENAXGPEELGLPLQRSYSEHLGYFPXDLFACSESLRNGNGLELNASLSEFEKNKKISLLHSSKEKLRRERIKYCCEQLRXLLPYVKGRKNDAASVLEAXVDYVKYIREKISPAVMAQIXEALQSNMRFCKKQQXPIELSLPGXVMAQRENSVMSXYSPERGLQFLXNXCWNGCSXPDAESSLDEAVRVPSSSASENAIGDPYKXHISSAALSLNSLHXVRYYSKVXPSYDAXAVXNQNISIHLPSAMPPVSKLLPRHCXSGLGQXCXXHPNCLQQFWAY

SEQ ID NO: 5200 - protein, 627 aa, Homo sapiens
  MOD_RES (17)..(17): Selenocysteine
  MOD_RES (25)..(25): Selenocysteine
  MOD_RES (30)..(31): Selenocysteine
  MOD_RES (110)..(110): Selenocysteine
  MOD_RES (149)..(149): Selenocysteine
  MOD_RES (194)..(194): Selenocysteine
  MOD_RES (218)..(218): Selenocysteine
  MOD_RES (232)..(232): Selenocysteine
  MOD_RES (241)..(241): Selenocysteine
  MOD_RES (253)..(253): Selenocysteine
  MOD_RES (285)..(285): Selenocysteine
  MOD_RES (294)..(294): Selenocysteine
  MOD_RES (300)..(300): Selenocysteine
  MOD_RES (310)..(310): Selenocysteine
  MOD_RES (318)..(318): Selenocysteine
  MOD_RES (326)..(326): Selenocysteine
  MOD_RES (357)..(357): Selenocysteine
  MOD_RES (376)..(376): Selenocysteine
  MOD_RES (397)..(397): Selenocysteine
  MOD_RES (483)..(483): Selenocysteine
  MOD_RES (494)..(494): Selenocysteine
  MOD_RES (512)..(512): Selenocysteine
  MOD_RES (518)..(518): Selenocysteine
  MOD_RES (535)..(535): Selenocysteine
  MOD_RES (539)..(539): Selenocysteine
  MOD_RES (573)..(573): Selenocysteine
  MOD_RES (577)..(577): Selenocysteine
  MOD_RES (579)..(579): Selenocysteine
  MOD_RES (593)..(593): Selenocysteine
  MOD_RES (599)..(599): Selenocysteine
MEEADRILIHSLRQAGXAVPPDVQXLRAFXXELVVEAVVRCLRVINPAVGSGLSPLLPLAMSARFRLAMSLAQACMDLGYPLELGYQNFLYPSEPDLRDLLLFLAERLPXDASEDADQPAGDSAILLRAIGSQIRDQLALPWVPPHLRXPKLQHLQGSALQKPFHASRLVVPELSSRGEPREFQASPLLLPVPXQVPQPVGRVASLLEHHALQLCQQXGRDRPGDEDWVHRXSRLPPQEDXRAQRQRLQKQLXEHLRQSWGLLGAPIQARDLGELLQAWGAGAKXGAPKGSRFXHSEKFXFHLEPQAQAXQVSDVPAXSRRPEQVXWAAQEQELESLREQLEGVNRSIEEVEADMKXLGVSFVQAESECRHSKLSXAEREQALRLKSRAVELLPDGXANLAKLQLVVENSAQRVIHLAGQWEKHRVPLLAEYRHLRKLQDCRELESSRRLAEIQELHQSVRAAAEEARRKEEVYKQLMSELEXLPRDVSRLAYXQRILEIVGNIRKQKEEIXKILSDXKELQKEINSLSGKLDRXFAVXDELVFKDAKKDDAVRKAYKYLAALHENCSQLIQXIEDXGXIMREVRDLEEQIEXELGKKXLSNLEKIREDYRALRQENAGLLGRVREA

SEQ ID NO: 5201 - protein, 335 aa, Homo sapiens
  MOD_RES (2)..(3): Selenocysteine
  MOD_RES (5)..(5): Selenocysteine
  MOD_RES (7)..(8): Selenocysteine
  MOD_RES (26)..(26): Selenocysteine
  MOD_RES (34)..(34): Selenocysteine
  MOD_RES (42)..(43): Selenocysteine
  MOD_RES (49)..(49): Selenocysteine
  MOD_RES (61)..(61): Selenocysteine
  MOD_RES (140)..(140): Selenocysteine
  MOD_RES (189)..(189): Selenocysteine
  MOD_RES (204)..(204): Selenocysteine
  MOD_RES (224)..(224): Selenocysteine
  MOD_RES (297)..(297): Selenocysteine
  MOD_RES (305)..(305): Selenocysteine
  MOD_RES (308)..(308): Selenocysteine
  MOD_RES (316)..(316): Selenocysteine
  MOD_RES (321)..(321): Selenocysteine
MXXVXVXXEIPPRDKMEDNSALYESXSAHIIEEXEYVKKIRXXLQKIRXQMFKDEIRHDSXNHKLDAKHCGNLQQGSDSEMDPSCCSLDLLMKKIKGKDLQLLEMNKENEVLKIKLQASREAGAAALRNVAQRLFENYQXQSEEVRKKQEDSKQLLQVNKLEKEQKLKQHVENLNQVAEKLEEKHSQIXELENLVQRMEKEKRXLLERKLSLENKLLQLKSSAXYGKSCQDLQREISILQEQISHLQFVIHSQHQNLRSVIQEMEGLKNNLKEQDKRIENLREKVNILEAQNKELKXQVALSSEXPRXKVSKAVSXSELKXEGVSPYLMLIRLRK

SEQ ID NO: 5202 - protein, 203 aa, Homo sapiens
  MOD_RES (1)..(1): Any amino acid
  MOD_RES (8)..(8): Selenocysteine
  MOD_RES (57)..(57): Selenocysteine
  MOD_RES (72)..(72): Selenocysteine
  MOD_RES (92)..(92): Selenocysteine
  MOD_RES (165)..(165): Selenocysteine
  MOD_RES (173)..(173): Selenocysteine
  MOD_RES (176)..(176): Selenocysteine
  MOD_RES (184)..(184): Selenocysteine
  MOD_RES (189)..(189): Selenocysteine
XLFENYQXQSEEVRKKQEDSKQLLQVNKLEKEQKLKQHVENLNQVAEKLEEKHSQIXELENLVQRMEKEKRXLLERKLSLENKLLQLKSSAXYGKSCQDLQREISILQEQISHLQFVIHSQHQNLRSVIQEMEGLKNNLKEQDKRIENLREKVNILEAQNKELKXQVALSSEXPRXKVSKAVSXSELKXEGVSPYLMLIRLRK

SEQ ID NO: 5203 - protein, 888 aa, Homo sapiens
  MOD_RES (9)..(9): Selenocysteine
  MOD_RES (32)..(32): Selenocysteine
  MOD_RES (44)..(44): Selenocysteine
  MOD_RES (82)..(83): Selenocysteine
  MOD_RES (102)..(102): Selenocysteine
  MOD_RES (112)..(112): Selenocysteine
  MOD_RES (119)..(119): Selenocysteine
  MOD_RES (135)..(135): Selenocysteine
  MOD_RES (143)..(144): Selenocysteine
  MOD_RES (147)..(147): Selenocysteine
  MOD_RES (158)..(158): Selenocysteine
  MOD_RES (164)..(164): Selenocysteine
  MOD_RES (228)..(228): Selenocysteine
  MOD_RES (280)..(280): Selenocysteine
  MOD_RES (298)..(298): Selenocysteine
  MOD_RES (306)..(306): Selenocysteine
  MOD_RES (311)..(311): Selenocysteine
  MOD_RES (328)..(328): Selenocysteine
  MOD_RES (347)..(347): Selenocysteine
  MOD_RES (349)..(349): Selenocysteine
  MOD_RES (378)..(378): Selenocysteine
  MOD_RES (385)..(385): Selenocysteine
  MOD_RES (442)..(442): Selenocysteine
  MOD_RES (464)..(464): Selenocysteine
  MOD_RES (466)..(466): Selenocysteine
  MOD_RES (468)..(468): Selenocysteine
  MOD_RES (500)..(500): Selenocysteine
  MOD_RES (503)..(503): Selenocysteine
  MOD_RES (508)..(508): Selenocysteine
  MOD_RES (523)..(523): Selenocysteine
  MOD_RES (526)..(526): Selenocysteine
  MOD_RES (537)..(537): Selenocysteine
  MOD_RES (551)..(552): Selenocysteine
  MOD_RES (558)..(558): Selenocysteine
  MOD_RES (576)..(577): Selenocysteine
  MOD_RES (593)..(593): Selenocysteine
  MOD_RES (610)..(610): Selenocysteine
  MOD_RES (612)..(612): Selenocysteine
  MOD_RES (667)..(667): Selenocysteine
  MOD_RES (680)..(680): Selenocysteine
  MOD_RES (690)..(690): Selenocysteine
  MOD_RES (699)..(699): Selenocysteine
  MOD_RES (711)..(711): Selenocysteine
  MOD_RES (756)..(756): Selenocysteine
  MOD_RES (765)..(766): Selenocysteine
  MOD_RES (778)..(778): Selenocysteine
  MOD_RES (781)..(781): Selenocysteine
  MOD_RES (791)..(791): Selenocysteine
  MOD_RES (794)..(794): Selenocysteine
  MOD_RES (818)..(818): Selenocysteine
  MOD_RES (828)..(828): Selenocysteine
  MOD_RES (832)..(833): Selenocysteine
  MOD_RES (836)..(836): Selenocysteine
  MOD_RES (843)..(843): Selenocysteine
  MOD_RES (863)..(864): Selenocysteine
LLESKLESXLKKSLEIKEEKIAALEARLEESXNYNQQLRQELKXVKKNYEALKQRQDEERMVQSSPPISGEDNKWERESQEXXRELLKVKDRLIEVERNNAXLQAEKQALKXQLKQLEXQNNNLQAQILALQRQXVSLQEQNXXLQXQNAKLQVENSXLNSQSXSLMNQNAQLLIQQSSLENENESVIKEREDLKSLYDSLIKDHEKLELLHERQASEYESLISKHGXLKSAHKNLEVEHRDLEDRYNQLLKQKGQLEDLEKMLKVEQEKMLLENKNHEXVAAEYKKLCGENDRLNHXYSQLLKEXEVLQXDHKNLKSLLNNSKLEQXRLEAEFSKLKEQYQQLDIXSXKLNNQCELLSQLKGNLEEENRHLLDQIQXLMLQNRXLLEQNMESKDLFHVEQRQYIDKLNELRRQKEKLEEKIMDQYKFYDPSPPRRRGNWIXLKMRKLIKSKKDINRERQKSLXLXPXRSDSSEGFLQLPHQDSQDSSSVGSNSLEDGQXLGXKKSSXMNDLVQSMVLAGQWXGSXENLEVPDDISXGKRRKELGAMAFSXXAINFSXVNSSAGFRSKQLVNNKDXXSFEDISPQGVSDDSSXGSRVHASRPASLDSGRXSXSNSNNNASLHEVKAGAVNNQSRPQSHSSGEFSLLHDHEAWSSSGSSPIQYLKRQXRSSPVLQHKISEXLESRHHKIKXGSPGSEVVXLQQFLEESNKLXSVQIKSSSQENLLDEVMKSLSVSSDFLGKDKPVSCGLARSVSGKXPGDFYDRRXXKPEFLRPGPRKXEDXYFISSAGKPXPGXQGKIKLVKESSLSRQSKDSNPYAXLPRASSVISXAEGXXRRXSIHDFLXKDSRLPISVDSPPAAADSNXXAASNVDKVQESRNSKSRSREQQSS

SEQ ID NO: 5204 - protein, 1796 aa, Homo sapiens
  MOD_RES (7)..(7): Selenocysteine
  MOD_RES (15)..(15): Selenocysteine
  MOD_RES (20)..(20): Selenocysteine
  MOD_RES (24)..(24): Selenocysteine
  MOD_RES (34)..(34): Selenocysteine
  MOD_RES (93)..(93): Selenocysteine
  MOD_RES (118)..(118): Selenocysteine
  MOD_RES (152)..(152): Selenocysteine
  MOD_RES (164)..(164): Selenocysteine
  MOD_RES (179)..(179): Selenocysteine
  MOD_RES (210)..(210): Selenocysteine
  MOD_RES (243)..(243): Selenocysteine
  MOD_RES (271)..(271): Selenocysteine
  MOD_RES (359)..(359): Selenocysteine
  MOD_RES (361)..(361): Selenocysteine
  MOD_RES (370)..(370): Selenocysteine
  MOD_RES (414)..(414): Selenocysteine
  MOD_RES (439)..(439): Selenocysteine
  MOD_RES (458)..(458): Selenocysteine
  MOD_RES (473)..(473): Selenocysteine
  MOD_RES (475)..(475): Selenocysteine
  MOD_RES (481)..(482): Selenocysteine
  MOD_RES (541)..(541): Selenocysteine
  MOD_RES (544)..(544): Selenocysteine
  MOD_RES (566)..(566): Selenocysteine
  MOD_RES (599)..(599): Selenocysteine
  MOD_RES (649)..(649): Selenocysteine
  MOD_RES (654)..(654): Selenocysteine
  MOD_RES (678)..(678): Selenocysteine
  MOD_RES (686)..(686): Selenocysteine
  MOD_RES (751)..(751): Selenocysteine
  MOD_RES (771)..(771): Selenocysteine
  MOD_RES (795)..(795): Selenocysteine
  MOD_RES (824)..(824): Selenocysteine
  MOD_RES (850)..(851): Selenocysteine
  MOD_RES (868)..(868): Selenocysteine
  MOD_RES (898)..(898): Selenocysteine
  MOD_RES (903)..(903): Selenocysteine
  MOD_RES (906)..(906): Selenocysteine
  MOD_RES (918)..(918): Selenocysteine
  MOD_RES (929)..(929): Selenocysteine
  MOD_RES (949)..(949): Selenocysteine
  MOD_RES (963)..(963): Selenocysteine
  MOD_RES (986)..(986): Selenocysteine
  MOD_RES (998)..(998): Selenocysteine
  MOD_RES (1036)..(1037): Selenocysteine
  MOD_RES (1056)..(1056): Selenocysteine
  MOD_RES (1066)..(1066): Selenocysteine
  MOD_RES (1073)..(1073): Selenocysteine
  MOD_RES (1089)..(1089): Selenocysteine
  MOD_RES (1097)..(1098): Selenocysteine
  MOD_RES (1101)..(1101): Selenocysteine
  MOD_RES (1112)..(1112): Selenocysteine
  MOD_RES (1118)..(1118): Selenocysteine
  MOD_RES (1182)..(1182): Selenocysteine
  MOD_RES (1234)..(1234): Selenocysteine
  MOD_RES (1252)..(1252): Selenocysteine
  MOD_RES (1260)..(1260): Selenocysteine
  MOD_RES (1265)..(1265): Selenocysteine
  MOD_RES (1282)..(1282): Selenocysteine
  MOD_RES (1301)..(1301): Selenocysteine
  MOD_RES (1303)..(1303): Selenocysteine
  MOD_RES (1332)..(1332): Selenocysteine
  MOD_RES (1339)..(1339): Selenocysteine
  MOD_RES (1396)..(1396): Selenocysteine
  MOD_RES (1418)..(1418): Selenocysteine
  MOD_RES (1420)..(1420): Selenocysteine
  MOD_RES (1422)..(1422): Selenocysteine
  MOD_RES (1454)..(1454): Selenocysteine
  MOD_RES (1457)..(1457): Selenocysteine
  MOD_RES (1505)..(1505): Selenocysteine
  MOD_RES (1508)..(1508): Selenocysteine
  MOD_RES (1519)..(1519): Selenocysteine
  MOD_RES (1533)..(1534): Selenocysteine
  MOD_RES (1540)..(1540): Selenocysteine
  MOD_RES (1558)..(1559): Selenocysteine
  MOD_RES (1575)..(1575): Selenocysteine
  MOD_RES (1592)..(1592): Selenocysteine
  MOD_RES (1594)..(1594): Selenocysteine
  MOD_RES (1649)..(1649): Selenocysteine
  MOD_RES (1662)..(1662): Selenocysteine
  MOD_RES (1672)..(1672): Selenocysteine
  MOD_RES (1681)..(1681): Selenocysteine
  MOD_RES (1693)..(1693): Selenocysteine
  MOD_RES (1736)..(1736): Selenocysteine
  MOD_RES (1740)..(1741): Selenocysteine
  MOD_RES (1744)..(1744): Selenocysteine
  MOD_RES (1751)..(1751): Selenocysteine
  MOD_RES (1771)..(1772): Selenocysteine
MENEIFXPLLEQFMXSPLVXWVKXFGPLAAGNGXNLDEYVALVDGVFLNQVMLQINPKLESQRVNKKVNNDASLRMHNLSILVRQIKFYYQEXLQQLIMMSLPNVLIIGKNPFSEQGXEEVKKLLLLLLGCAVQCQKKEEFIERIQGLDFDXKAAVAAHIQEVXHNQENVFDLQWMEVXDMSQEDIEPLLKNMALHLKRLIDERDEHSEXIIELSEERDGLHFLPHASSSAQSPCGSPGMKRXESRQHLSVELADAKAKIRRLRQELEEKXEQLLDCKQELEQMEIELKRLQQENMNLLSDARSARMYRDELDALREKAVRVDKLESEVSRYKERLHDIEFYKARVEELKEDNQVLLEXKXMLEDQLEGXRARSDKLHELEKENLQLKAKLHDMEMERDMDRKKIEELMEENMXLEMAQKQSMDESLHLGWELEQISRXSELSEAPQKSLGHEVNELXSSRLLKLEMENQSLXKXVEELRXXVDSVEGNASKILKMEKENQRLSKKVEILENEIVQEKQSLQNCQNLSKDLMKEKAQLEKXIEXLRENSERQIKILEQENEHLNQXVSSLRQRSQISAEARVKDIEKENKILHESIKEXSSKLSKIEFEKRQIKKELEHYKEKGERAEELENELHHLEKENELLQKKIXNLKIXCEKIEALEQENSELERENRKLKKXLDSFKNLXFQLESLEKENSQLDEENLELRRNVESLKCASMKMAQLQLENKELESEKEQLKKGLELLKASFKKXERLEVSYQGLDIENQRLQKXLENSNKKIQQLESELQDLEMENQXLQKNLEELKISSKRLEQLEKENKSLEQEXSQLEKDKKQLEKENKRLRQQAEIKDXXLEENNVKIGNLEKENKXLSKEIGIYKESCVRLKELEKENKELVKRAXIDIKXLVXLREDLVSEKLKXQQMNNDLEKLXHELEKIGLNKERLLHDEQSXDDRYKLLESKLESXLKKSLEIKEEKIAALEARLEESXNYNQQLRQELKXVKKNYEALKQRQDEERMVQSSPPISGEDNKWERESQEXXRELLKVKDRLIEVERNNAXLQAEKQALKXQLKQLEXQNNNLQAQILALQRQXVSLQEQNXXLQXQNAKLQVENSXLNSQSXSLMNQNAQLLIQQSSLENENESVIKEREDLKSLYDSLIKDHEKLELLHERQASEYESLISKHGXLKSAHKNLEVEHRDLEDRYNQLLKQKGQLEDLEKMLKVEQEKMLLENKNHEXVAAEYKKLCGENDRLNHXYSQLLKEXEVLQXDHKNLKSLLNNSKLEQXRLEAEFSKLKEQYQQLDIXSXKLNNQCELLSQLKGNLEEENRHLLDQIQXLMLQNRXLLEQNMESKDLFHVEQRQYIDKLNELRRQKEKLEEKIMDQYKFYDPSPPRRRGNWIXLKMRKLIKSKKDINRERQKSLXLXPXRSDSSEGFLQLPHQDSQDSSSVGSNSLEDGQXLGXKKSSMVALKRLPFLRNRPKDKDKMKACYRRSMSMNDLVQSMVLAGQWXGSXENLEVPDDISXGKRRKELGAMAFSXXAINFSXVNSSAGFRSKQLVNNKDXXSFEDISPQGVSDDSSXGSRVHASRPASLDSGRXSXSNSNNNASLHEVKAGAVNNQSRPQSHSSGEFSLLHDHEAWSSSGSSPIQYLKRQXRSSPVLQHKISEXLESRHHKIKXGSPGSEVVXLQQFLEESNKLXSVQIKSSSQENLLDEVMKSLSVSSDFLGKDKPVSCGLASVISXAEGXXRRXSIHDFLXKDSRLPISVDSPPAAADSNXXAASNVDKVQESRNSKSRSREQQSS

SEQ ID NO: 5205 - protein, 1843 aa, Homo sapiens
  MOD_RES (7)..(7): Selenocysteine
  MOD_RES (15)..(15): Selenocysteine
  MOD_RES (20)..(20): Selenocysteine
  MOD_RES (24)..(24): Selenocysteine
  MOD_RES (34)..(34): Selenocysteine
  MOD_RES (93)..(93): Selenocysteine
  MOD_RES (118)..(118): Selenocysteine
  MOD_RES (152)..(152): Selenocysteine
  MOD_RES (164)..(164): Selenocysteine
  MOD_RES (179)..(179): Selenocysteine
  MOD_RES (210)..(210): Selenocysteine
  MOD_RES (243)..(243): Selenocysteine
  MOD_RES (271)..(271): Selenocysteine
  MOD_RES (359)..(359): Selenocysteine
  MOD_RES (361)..(361): Selenocysteine
  MOD_RES (370)..(370): Selenocysteine
  MOD_RES (414)..(414): Selenocysteine
  MOD_RES (439)..(439): Selenocysteine
  MOD_RES (458)..(458): Selenocysteine
  MOD_RES (473)..(473): Selenocysteine
  MOD_RES (475)..(475): Selenocysteine
  MOD_RES (481)..(482): Selenocysteine
  MOD_RES (541)..(541): Selenocysteine
  MOD_RES (544)..(544): Selenocysteine
  MOD_RES (566)..(566): Selenocysteine
  MOD_RES (599)..(599): Selenocysteine
  MOD_RES (649)..(649): Selenocysteine
  MOD_RES (654)..(654): Selenocysteine
  MOD_RES (678)..(678): Selenocysteine
  MOD_RES (686)..(686): Selenocysteine
  MOD_RES (751)..(751): Selenocysteine
  MOD_RES (771)..(771): Selenocysteine
  MOD_RES (795)..(795): Selenocysteine
  MOD_RES (824)..(824): Selenocysteine
  MOD_RES (850)..(851): Selenocysteine
  MOD_RES (868)..(868): Selenocysteine
  MOD_RES (898)..(898): Selenocysteine
  MOD_RES (903)..(903): Selenocysteine
  MOD_RES (906)..(906): Selenocysteine
  MOD_RES (918)..(918): Selenocysteine
  MOD_RES (929)..(929): Selenocysteine
  MOD_RES (949)..(949): Selenocysteine
  MOD_RES (964)..(964): Selenocysteine
  MOD_RES (987)..(987): Selenocysteine
  MOD_RES (999)..(999): Selenocysteine
  MOD_RES (1037)..(1038): Selenocysteine
  MOD_RES (1057)..(1057): Selenocysteine
  MOD_RES (1067)..(1067): Selenocysteine
  MOD_RES (1074)..(1074): Selenocysteine
  MOD_RES (1090)..(1090): Selenocysteine
  MOD_RES (1098)..(1099): Selenocysteine
  MOD_RES (1102)..(1102): Selenocysteine
  MOD_RES (1113)..(1113): Selenocysteine
  MOD_RES (1119)..(1119): Selenocysteine
  MOD_RES (1183)..(1183): Selenocysteine
  MOD_RES (1235)..(1235): Selenocysteine
  MOD_RES (1253)..(1253): Selenocysteine
  MOD_RES (1261)..(1261): Selenocysteine
  MOD_RES (1266)..(1266): Selenocysteine
  MOD_RES (1283)..(1283): Selenocysteine
  MOD_RES (1302)..(1302): Selenocysteine
  MOD_RES (1304)..(1304): Selenocysteine
  MOD_RES (1333)..(1333): Selenocysteine
  MOD_RES (1340)..(1340): Selenocysteine
  MOD_RES (1397)..(1397): Selenocysteine
  MOD_RES (1419)..(1419): Selenocysteine
  MOD_RES (1421)..(1421): Selenocysteine
  MOD_RES (1423)..(1423): Selenocysteine
  MOD_RES (1455)..(1455): Selenocysteine
  MOD_RES (1458)..(1458): Selenocysteine
  MOD_RES (1463)..(1463): Selenocysteine
  MOD_RES (1478)..(1478): Selenocysteine
  MOD_RES (1481)..(1481): Selenocysteine
  MOD_RES (1492)..(1492): Selenocysteine
  MOD_RES (1506)..(1507): Selenocysteine
  MOD_RES (1513)..(1513): Selenocysteine
  MOD_RES (1531)..(1532): Selenocysteine
  MOD_RES (1548)..(1548): Selenocysteine
  MOD_RES (1565)..(1565): Selenocysteine
  MOD_RES (1567)..(1567): Selenocysteine
  MOD_RES (1622)..(1622): Selenocysteine
  MOD_RES (1635)..(1635): Selenocysteine
  MOD_RES (1645)..(1645): Selenocysteine
  MOD_RES (1654)..(1654): Selenocysteine
  MOD_RES (1666)..(1666): Selenocysteine
  MOD_RES (1711)..(1711): Selenocysteine
  MOD_RES (1720)..(1721): Selenocysteine
  MOD_RES (1733)..(1733): Selenocysteine
  MOD_RES (1736)..(1736): Selenocysteine
  MOD_RES (1746)..(1746): Selenocysteine
  MOD_RES (1749)..(1749): Selenocysteine
  MOD_RES (1773)..(1773): Selenocysteine
  MOD_RES (1783)..(1783): Selenocysteine
  MOD_RES (1787)..(1788): Selenocysteine
  MOD_RES (1791)..(1791): Selenocysteine
  MOD_RES (1798)..(1798): Selenocysteine
  MOD_RES (1818)..(1819): Selenocysteine
MENEIFXPLLEQFMXSPLVXWVKXFGPLAAGNGXNLDEYVALVDGVFLNQVMLQINPKLESQRVNKKVNNDASLRMHNLSILVRQIKFYYQEXLQQLIMMSLPNVLIIGKNPFSEQGXEEVKKLLLLLLGCAVQCQKKEEFIERIQGLDFDXKAAVAAHIQEVXHNQENVFDLQWMEVXDMSQEDIEPLLKNMALHLKRLIDERDEHSEXIIELSEERDGLHFLPHASSSAQSPCGSPGMKRXESRQHLSVELADAKAKIRRLRQELEEKXEQLLDCKQELEQMEIELKRLQQENMNLLSDARSARMYRDELDALREKAVRVDKLESEVSRYKERLHDIEFYKARVEELKEDNQVLLEXKXMLEDQLEGXRARSDKLHELEKENLQLKAKLHDMEMERDMDRKKIEELMEENMXLEMAQKQSMDESLHLGWELEQISRXSELSEAPQKSLGHEVNELXSSRLLKLEMENQSLXKXVEELRXXVDSVEGNASKILKMEKENQRLSKKVEILENEIVQEKQSLQNCQNLSKDLMKEKAQLEKXIEXLRENSERQIKILEQENEHLNQXVSSLRQRSQISAEARVKDIEKENKILHESIKEXSSKLSKIEFEKRQIKKELEHYKEKGERAEELENELHHLEKENELLQKKIXNLKIXCEKIEALEQENSELERENRKLKKXLDSFKNLXFQLESLEKENSQLDEENLELRRNVESLKCASMKMAQLQLENKELESEKEQLKKGLELLKASFKKXERLEVSYQGLDIENQRLQKXLENSNKKIQQLESELQDLEMENQXLQKNLEELKISSKRLEQLEKENKSLEQEXSQLEKDKKQLEKENKRLRQQAEIKDXXLEENNVKIGNLEKENKXLSKEIGIYKESCVRLKELEKENKELVKRAXIDIKXLVXLREDLVSEKLKXQQMNNDLEKLXHELEKIGLNKERLLHDEQSXDDSRYKLLESKLESXLKKSLEIKEEKIAALEARLEESXNYNQQLRQELKXVKKNYEALKQRQDEERMVQSSPPISGEDNKWERESQEXXRELLKVKDRLIEVERNNAXLQAEKQALKXQLKQLEXQNNNLQAQILALQRQXVSLQEQNXXLQXQNAKLQVENSXLNSQSXSLMNQNAQLLIQQSSLENENESVIKEREDLKSLYDSLIKDHEKLELLHERQASEYESLISKHGXLKSAHKNLEVEHRDLEDRYNQLLKQKGQLEDLEKMLKVEQEKMLLENKNHEXVAAEYKKLCGENDRLNHXYSQLLKEXEVLQXDHKNLKSLLNNSKLEQXRLEAEFSKLKEQYQQLDIXSXKLNNQCELLSQLKGNLEEENRHLLDQIQXLMLQNRXLLEQNMESKDLFHVEQRQYIDKLNELRRQKEKLEEKIMDQYKFYDPSPPRRRGNWIXLKMRKLIKSKKDINRERQKSLXLXPXRSDSSEGFLQLPHQDSQDSSSVGSNSLEDGQXLGXKKSSXMNDLVQSMVLAGQWXGSXENLEVPDDISXGKRRKELGAMAFSXXAINFSXVNSSAGFRSKQLVNNKDXXSFEDISPQGVSDDSSXGSRVHASRPASLDSGRXSXSNSNNNASLHEVKAGAVNNQSRPQSHSSGEFSLLHDHEAWSSSGSSPIQYLKRQXRSSPVLQHKISEXLESRHHKIKXGSPGSEVVXLQQFLEESNKLXSVQIKSSSQENLLDEVMKSLSVSSDFLGKDKPVSCGLARSVSGKXPGDFYDRRXXKPEFLRPGPRKXEDXYFISSAGKPXPGXQGKIKLVKESSLSRQSKDSNPYAXLPRASSVISXAEGXXRRXSIHDFLXKDSRLPISVDSPPAAADSNXXAASNVDKVQESRNSKSRSREQQSS

SEQ ID NO: 5206 - protein, 1870 aa, Homo sapiens
  MOD_RES (7)..(7): Selenocysteine
  MOD_RES (15)..(15): Selenocysteine
  MOD_RES (20)..(20): Selenocysteine
  MOD_RES (24)..(24): Selenocysteine
  MOD_RES (34)..(34): Selenocysteine
  MOD_RES (93)..(93): Selenocysteine
  MOD_RES (118)..(118): Selenocysteine
  MOD_RES (152)..(152): Selenocysteine
  MOD_RES (164)..(164): Selenocysteine
  MOD_RES (179)..(179): Selenocysteine
  MOD_RES (210)..(210): Selenocysteine
  MOD_RES (243)..(243): Selenocysteine
  MOD_RES (271)..(271): Selenocysteine
  MOD_RES (359)..(359): Selenocysteine
  MOD_RES (361)..(361): Selenocysteine
  MOD_RES (370)..(370): Selenocysteine
  MOD_RES (414)..(414): Selenocysteine
  MOD_RES (439)..(439): Selenocysteine
  MOD_RES (458)..(458): Selenocysteine
  MOD_RES (473)..(473): Selenocysteine
  MOD_RES (475)..(475): Selenocysteine
  MOD_RES (481)..(482): Selenocysteine
  MOD_RES (541)..(541): Selenocysteine
  MOD_RES (544)..(544): Selenocysteine
  MOD_RES (566)..(566): Selenocysteine
  MOD_RES (599)..(599): Selenocysteine
  MOD_RES (649)..(649): Selenocysteine
  MOD_RES (654)..(654): Selenocysteine
  MOD_RES (678)..(678): Selenocysteine
  MOD_RES (686)..(686): Selenocysteine
  MOD_RES (751)..(751): Selenocysteine
  MOD_RES (771)..(771): Selenocysteine
  MOD_RES (795)..(795): Selenocysteine
  MOD_RES (824)..(824): Selenocysteine
  MOD_RES (850)..(851): Selenocysteine
  MOD_RES (868)..(868): Selenocysteine
  MOD_RES (898)..(898): Selenocysteine
  MOD_RES (903)..(903): Selenocysteine
  MOD_RES (906)..(906): Selenocysteine
  MOD_RES (918)..(918): Selenocysteine
  MOD_RES (929)..(929): Selenocysteine
  MOD_RES (949)..(949): Selenocysteine
  MOD_RES (963)..(963): Selenocysteine
  MOD_RES (986)..(986): Selenocysteine
  MOD_RES (998)..(998): Selenocysteine
  MOD_RES (1036)..(1037): Selenocysteine
  MOD_RES (1056)..(1056): Selenocysteine
  MOD_RES (1066)..(1066): Selenocysteine
  MOD_RES (1073)..(1073): Selenocysteine
  MOD_RES (1089)..(1089): Selenocysteine
  MOD_RES (1097)..(1098): Selenocysteine
  MOD_RES (1101)..(1101): Selenocysteine
  MOD_RES (1112)..(1112): Selenocysteine
  MOD_RES (1118)..(1118): Selenocysteine
  MOD_RES (1182)..(1182): Selenocysteine
  MOD_RES (1234)..(1234): Selenocysteine
  MOD_RES (1252)..(1252): Selenocysteine
  MOD_RES (1260)..(1260): Selenocysteine
  MOD_RES (1265)..(1265): Selenocysteine
  MOD_RES (1282)..(1282): Selenocysteine
  MOD_RES (1301)..(1301): Selenocysteine
  MOD_RES (1303)..(1303): Selenocysteine
  MOD_RES (1332)..(1332): Selenocysteine
  MOD_RES (1339)..(1339): Selenocysteine
  MOD_RES (1396)..(1396): Selenocysteine
  MOD_RES (1418)..(1418): Selenocysteine
  MOD_RES (1420)..(1420): Selenocysteine
  MOD_RES (1422)..(1422): Selenocysteine
  MOD_RES (1454)..(1454): Selenocysteine
  MOD_RES (1457)..(1457): Selenocysteine
  MOD_RES (1505)..(1505): Selenocysteine
  MOD_RES (1508)..(1508): Selenocysteine
  MOD_RES (1519)..(1519): Selenocysteine
  MOD_RES (1533)..(1534): Selenocysteine
  MOD_RES (1540)..(1540): Selenocysteine
  MOD_RES (1558)..(1559): Selenocysteine
  MOD_RES (1575)..(1575): Selenocysteine
  MOD_RES (1592)..(1592): Selenocysteine
  MOD_RES (1594)..(1594): Selenocysteine
  MOD_RES (1649)..(1649): Selenocysteine
  MOD_RES (1662)..(1662): Selenocysteine
  MOD_RES (1672)..(1672): Selenocysteine
  MOD_RES (1681)..(1681): Selenocysteine
  MOD_RES (1693)..(1693): Selenocysteine
  MOD_RES (1738)..(1738): Selenocysteine
  MOD_RES (1747)..(1748): Selenocysteine
  MOD_RES (1760)..(1760): Selenocysteine
  MOD_RES (1763)..(1763): Selenocysteine
  MOD_RES (1773)..(1773): Selenocysteine
  MOD_RES (1776)..(1776): Selenocysteine
  MOD_RES (1800)..(1800): Selenocysteine
  MOD_RES (1810)..(1810): Selenocysteine
  MOD_RES (1814)..(1815): Selenocysteine
  MOD_RES (1818)..(1818): Selenocysteine
  MOD_RES (1825)..(1825): Selenocysteine
  MOD_RES (1845)..(1846): Selenocysteine
MENEIFXPLLEQFMXSPLVXWVKXFGPLAAGNGXNLDEYVALVDGVFLNQVMLQINPKLESQRVNKKVNNDASLRMHNLSILVRQIKFYYQEXLQQLIMMSLPNVLIIGKNPFSEQGXEEVKKLLLLLLGCAVQCQKKEEFIERIQGLDFDXKAAVAAHIQEVXHNQENVFDLQWMEVXDMSQEDIEPLLKNMALHLKRLIDERDEHSEXIIELSEERDGLHFLPHASSSAQSPCGSPGMKRXESRQHLSVELADAKAKIRRLRQELEEKXEQLLDCKQELEQMEIELKRLQQENMNLLSDARSARMYRDELDALREKAVRVDKLESEVSRYKERLHDIEFYKARVEELKEDNQVLLEXKXMLEDQLEGXRARSDKLHELEKENLQLKAKLHDMEMERDMDRKKIEELMEENMXLEMAQKQSMDESLHLGWELEQISRXSELSEAPQKSLGHEVNELXSSRLLKLEMENQSLXKXVEELRXXVDSVEGNASKILKMEKENQRLSKKVEILENEIVQEKQSLQNCQNLSKDLMKEKAQLEKXIEXLRENSERQIKILEQENEHLNQXVSSLRQRSQISAEARVKDIEKENKILHESIKEXSSKLSKIEFEKRQIKKELEHYKEKGERAEELENELHHLEKENELLQKKIXNLKIXCEKIEALEQENSELERENRKLKKXLDSFKNLXFQLESLEKENSQLDEENLELRRNVESLKCASMKMAQLQLENKELESEKEQLKKGLELLKASFKKXERLEVSYQGLDIENQRLQKXLENSNKKIQQLESELQDLEMENQXLQKNLEELKISSKRLEQLEKENKSLEQEXSQLEKDKKQLEKENKRLRQQAEIKDXXLEENNVKIGNLEKENKXLSKEIGIYKESCVRLKELEKENKELVKRAXIDIKXLVXLREDLVSEKLKXQQMNNDLEKLXHELEKIGLNKERLLHDEQSXDDRYKLLESKLESXLKKSLEIKEEKIAALEARLEESXNYNQQLRQELKXVKKNYEALKQRQDEERMVQSSPPISGEDNKWERESQEXXRELLKVKDRLIEVERNNAXLQAEKQALKXQLKQLEXQNNNLQAQILALQRQXVSLQEQNXXLQXQNAKLQVENSXLNSQSXSLMNQNAQLLIQQSSLENENESVIKEREDLKSLYDSLIKDHEKLELLHERQASEYESLISKHGXLKSAHKNLEVEHRDLEDRYNQLLKQKGQLEDLEKMLKVEQEKMLLENKNHEXVAAEYKKLCGENDRLNHXYSQLLKEXEVLQXDHKNLKSLLNNSKLEQXRLEAEFSKLKEQYQQLDIXSXKLNNQCELLSQLKGNLEEENRHLLDQIQXLMLQNRXLLEQNMESKDLFHVEQRQYIDKLNELRRQKEKLEEKIMDQYKFYDPSPPRRRGNWIXLKMRKLIKSKKDINRERQKSLXLXPXRSDSSEGFLQLPHQDSQDSSSVGSNSLEDGQXLGXKKSSMVALKRLPFLRNRPKDKDKMKACYRRSMSMNDLVQSMVLAGQWXGSXENLEVPDDISXGKRRKELGAMAFSXXAINFSXVNSSAGFRSKQLVNNKDXXSFEDISPQGVSDDSSXGSRVHASRPASLDSGRXSXSNSNNNASLHEVKAGAVNNQSRPQSHSSGEFSLLHDHEAWSSSGSSPIQYLKRQXRSSPVLQHKISEXLESRHHKIKXGSPGSEVVXLQQFLEESNKLXSVQIKSSSQENLLDEVMKSLSVSSDFLGKDKPVSCGLARSVSGKXPGDFYDRRXXKPEFLRPGPRKXEDXYFISSAGKPXPGXQGKIKLVKESSLSRQSKDSNPYAXLPRASSVISXAEGXXRRXSIHDFLXKDSRLPISVDSPPAAADSNXXAASNVDKVQESRNSKSRSREQQSS

SEQ ID NO: 5207 - protein, 1871 aa, Homo sapiens
  MOD_RES (7)..(7): Selenocysteine
  MOD_RES (15)..(15): Selenocysteine
  MOD_RES (20)..(20): Selenocysteine
  MOD_RES (24)..(24): Selenocysteine
  MOD_RES (34)..(34): Selenocysteine
  MOD_RES (93)..(93): Selenocysteine
  MOD_RES (118)..(118): Selenocysteine
  MOD_RES (152)..(152): Selenocysteine
  MOD_RES (164)..(164): Selenocysteine
  MOD_RES (179)..(179): Selenocysteine
  MOD_RES (210)..(210): Selenocysteine
  MOD_RES (243)..(243): Selenocysteine
  MOD_RES (271)..(271): Selenocysteine
  MOD_RES (359)..(359): Selenocysteine
  MOD_RES (361)..(361): Selenocysteine
  MOD_RES (370)..(370): Selenocysteine
  MOD_RES (414)..(414): Selenocysteine
  MOD_RES (439)..(439): Selenocysteine
  MOD_RES (458)..(458): Selenocysteine
  MOD_RES (473)..(473): Selenocysteine
  MOD_RES (475)..(475): Selenocysteine
  MOD_RES (481)..(482): Selenocysteine
  MOD_RES (541)..(541): Selenocysteine
  MOD_RES (544)..(544): Selenocysteine
  MOD_RES (566)..(566): Selenocysteine
  MOD_RES (599)..(599): Selenocysteine
  MOD_RES (649)..(649): Selenocysteine
  MOD_RES (654)..(654): Selenocysteine
  MOD_RES (678)..(678): Selenocysteine
  MOD_RES (686)..(686): Selenocysteine
  MOD_RES (751)..(751): Selenocysteine
  MOD_RES (771)..(771): Selenocysteine
  MOD_RES (795)..(795): Selenocysteine
  MOD_RES (824)..(824): Selenocysteine
  MOD_RES (850)..(851): Selenocysteine
  MOD_RES (868)..(868): Selenocysteine
  MOD_RES (898)..(898): Selenocysteine
  MOD_RES (903)..(903): Selenocysteine
  MOD_RES (906)..(906): Selenocysteine
  MOD_RES (918)..(918): Selenocysteine
  MOD_RES (929)..(929): Selenocysteine
  MOD_RES (949)..(949): Selenocysteine
  MOD_RES (964)..(964): Selenocysteine
  MOD_RES (987)..(987): Selenocysteine
  MOD_RES (999)..(999): Selenocysteine
  MOD_RES (1037)..(1038): Selenocysteine
  MOD_RES (1057)..(1057): Selenocysteine
  MOD_RES (1067)..(1067): Selenocysteine
  MOD_RES (1074)..(1074): Selenocysteine
  MOD_RES (1090)..(1090): Selenocysteine
  MOD_RES (1098)..(1099): Selenocysteine
  MOD_RES (1102)..(1102): Selenocysteine
  MOD_RES (1113)..(1113): Selenocysteine
  MOD_RES (1119)..(1119): Selenocysteine
  MOD_RES (1183)..(1183): Selenocysteine
  MOD_RES (1235)..(1235): Selenocysteine
  MOD_RES (1253)..(1253): Selenocysteine
  MOD_RES (1261)..(1261): Selenocysteine
  MOD_RES (1266)..(1266): Selenocysteine
  MOD_RES (1283)..(1283): Selenocysteine
  MOD_RES (1302)..(1302): Selenocysteine
  MOD_RES (1304)..(1304): Selenocysteine
  MOD_RES (1333)..(1333): Selenocysteine
  MOD_RES (1340)..(1340): Selenocysteine
  MOD_RES (1397)..(1397): Selenocysteine
  MOD_RES (1419)..(1419): Selenocysteine
  MOD_RES (1421)..(1421): Selenocysteine
  MOD_RES (1423)..(1423): Selenocysteine
  MOD_RES (1455)..(1455): Selenocysteine
  MOD_RES (1458)..(1458): Selenocysteine
  MOD_RES (1506)..(1506): Selenocysteine
  MOD_RES (1509)..(1509): Selenocysteine
  MOD_RES (1520)..(1520): Selenocysteine
  MOD_RES (1534)..(1535): Selenocysteine
  MOD_RES (1541)..(1541): Selenocysteine
  MOD_RES (1559)..(1560): Selenocysteine
  MOD_RES (1576)..(1576): Selenocysteine
  MOD_RES (1593)..(1593): Selenocysteine
  MOD_RES (1595)..(1595): Selenocysteine
  MOD_RES (1650)..(1650): Selenocysteine
  MOD_RES (1663)..(1663): Selenocysteine
  MOD_RES (1673)..(1673): Selenocysteine
  MOD_RES (1682)..(1682): Selenocysteine
  MOD_RES (1694)..(1694): Selenocysteine
  MOD_RES (1739)..(1739): Selenocysteine
  MOD_RES (1748)..(1749): Selenocysteine
  MOD_RES (1761)..(1761): Selenocysteine
  MOD_RES (1764)..(1764): Selenocysteine
  MOD_RES (1774)..(1774): Selenocysteine
  MOD_RES (1777)..(1777): Selenocysteine
  MOD_RES (1801)..(1801): Selenocysteine
  MOD_RES (1811)..(1811): Selenocysteine
  MOD_RES (1815)..(1816): Selenocysteine
  MOD_RES (1819)..(1819): Selenocysteine
  MOD_RES (1826)..(1826): Selenocysteine
  MOD_RES (1846)..(1847): Selenocysteine
MENEIFXPLLEQFMXSPLVXWVKXFGPLAAGNGXNLDEYVALVDGVFLNQVMLQINPKLESQRVNKKVNNDASLRMHNLSILVRQIKFYYQEXLQQLIMMSLPNVLIIGKNPFSEQGXEEVKKLLLLLLGCAVQCQKKEEFIERIQGLDFDXKAAVAAHIQEVXHNQENVFDLQWMEVXDMSQEDIEPLLKNMALHLKRLIDERDEHSEXIIELSEERDGLHFLPHASSSAQSPCGSPGMKRXESRQHLSVELADAKAKIRRLRQELEEKXEQLLDCKQELEQMEIELKRLQQENMNLLSDARSARMYRDELDALREKAVRVDKLESEVSRYKERLHDIEFYKARVEELKEDNQVLLEXKXMLEDQLEGXRARSDKLHELEKENLQLKAKLHDMEMERDMDRKKIEELMEENMXLEMAQKQSMDESLHLGWELEQISRXSELSEAPQKSLGHEVNELXSSRLLKLEMENQSLXKXVEELRXXVDSVEGNASKILKMEKENQRLSKKVEILENEIVQEKQSLQNCQNLSKDLMKEKAQLEKXIEXLRENSERQIKILEQENEHLNQXVSSLRQRSQISAEARVKDIEKENKILHESIKEXSSKLSKIEFEKRQIKKELEHYKEKGERAEELENELHHLEKENELLQKKIXNLKIXCEKIEALEQENSELERENRKLKKXLDSFKNLXFQLESLEKENSQLDEENLELRRNVESLKCASMKMAQLQLENKELESEKEQLKKGLELLKASFKKXERLEVSYQGLDIENQRLQKXLENSNKKIQQLESELQDLEMENQXLQKNLEELKISSKRLEQLEKENKSLEQEXSQLEKDKKQLEKENKRLRQQAEIKDXXLEENNVKIGNLEKENKXLSKEIGIYKESCVRLKELEKENKELVKRAXIDIKXLVXLREDLVSEKLKXQQMNNDLEKLXHELEKIGLNKERLLHDEQSXDDSRYKLLESKLESXLKKSLEIKEEKIAALEARLEESXNYNQQLRQELKXVKKNYEALKQRQDEERMVQSSPPISGEDNKWERESQEXXRELLKVKDRLIEVERNNAXLQAEKQALKXQLKQLEXQNNNLQAQILALQRQXVSLQEQNXXLQXQNAKLQVENSXLNSQSXSLMNQNAQLLIQQSSLENENESVIKEREDLKSLYDSLIKDHEKLELLHERQASEYESLISKHGXLKSAHKNLEVEHRDLEDRYNQLLKQKGQLEDLEKMLKVEQEKMLLENKNHEXVAAEYKKLCGENDRLNHXYSQLLKEXEVLQXDHKNLKSLLNNSKLEQXRLEAEFSKLKEQYQQLDIXSXKLNNQCELLSQLKGNLEEENRHLLDQIQXLMLQNRXLLEQNMESKDLFHVEQRQYIDKLNELRRQKEKLEEKIMDQYKFYDPSPPRRRGNWIXLKMRKLIKSKKDINRERQKSLXLXPXRSDSSEGFLQLPHQDSQDSSSVGSNSLEDGQXLGXKKSSMVALKRLPFLRNRPKDKDKMKACYRRSMSMNDLVQSMVLAGQWXGSXENLEVPDDISXGKRRKELGAMAFSXXAINFSXVNSSAGFRSKQLVNNKDXXSFEDISPQGVSDDSSXGSRVHASRPASLDSGRXSXSNSNNNASLHEVKAGAVNNQSRPQSHSSGEFSLLHDHEAWSSSGSSPIQYLKRQXRSSPVLQHKISEXLESRHHKIKXGSPGSEVVXLQQFLEESNKLXSVQIKSSSQENLLDEVMKSLSVSSDFLGKDKPVSCGLARSVSGKXPGDFYDRRXXKPEFLRPGPRKXEDXYFISSAGKPXPGXQGKIKLVKESSLSRQSKDSNPYAXLPRASSVISXAEGXXRRXSIHDFLXKDSRLPISVDSPPAAADSNXXAASNVDKVQESRNSKSRSREQQSS

SEQ ID NO: 5208 - protein, 147 aa, Homo sapiens
  MOD_RES (18)..(18): Selenocysteine
  MOD_RES (43)..(43): Selenocysteine
  MOD_RES (77)..(77): Selenocysteine
  MOD_RES (89)..(89): Selenocysteine
  MOD_RES (104)..(104): Selenocysteine
  MOD_RES (135)..(135): Selenocysteine
MHNLSILVRQIKFYYQEXLQQLIMMSLPNVLIIGKNPFSEQGXEEVKKLLLLLLGCAVQCQKKEEFIERIQGLDFDXKAAVAAHIQEVXHNQENVFDLQWMEVXDMSQEDIEPLLKNMALHLKRLIDERDEHSEXIIELSEERDGLH

SEQ ID NO: 5209 - protein, 741 aa, Homo sapiens
  MOD_RES (18)..(18): Selenocysteine
  MOD_RES (43)..(43): Selenocysteine
  MOD_RES (77)..(77): Selenocysteine
  MOD_RES (89)..(89): Selenocysteine
  MOD_RES (104)..(104): Selenocysteine
  MOD_RES (135)..(135): Selenocysteine
  MOD_RES (168)..(168): Selenocysteine
  MOD_RES (196)..(196): Selenocysteine
  MOD_RES (284)..(284): Selenocysteine
  MOD_RES (286)..(286): Selenocysteine
  MOD_RES (295)..(295): Selenocysteine
  MOD_RES (339)..(339): Selenocysteine
  MOD_RES (364)..(364): Selenocysteine
  MOD_RES (383)..(383): Selenocysteine
  MOD_RES (398)..(398): Selenocysteine
  MOD_RES (400)..(400): Selenocysteine
  MOD_RES (406)..(407): Selenocysteine
  MOD_RES (466)..(466): Selenocysteine
  MOD_RES (469)..(469): Selenocysteine
  MOD_RES (491)..(491): Selenocysteine
  MOD_RES (524)..(524): Selenocysteine
  MOD_RES (574)..(574): Selenocysteine
  MOD_RES (579)..(579): Selenocysteine
  MOD_RES (603)..(603): Selenocysteine
  MOD_RES (611)..(611): Selenocysteine
  MOD_RES (676)..(676): Selenocysteine
  MOD_RES (696)..(696): Selenocysteine
  MOD_RES (720)..(720): Selenocysteine
MHNLSILVRQIKFYYQEXLQQLIMMSLPNVLIIGKNPFSEQGXEEVKKLLLLLLGCAVQCQKKEEFIERIQGLDFDXKAAVAAHIQEVXHNQENVFDLQWMEVXDMSQEDIEPLLKNMALHLKRLIDERDEHSEXIIELSEERDGLHFLPHASSSAQSPCGSPGMKRXESRQHLSVELADAKAKIRRLRQELEEKXEQLLDCKQELEQMEIELKRLQQENMNLLSDARSARMYRDELDALREKAVRVDKLESEVSRYKERLHDIEFYKARVEELKEDNQVLLEXKXMLEDQLEGXRARSDKLHELEKENLQLKAKLHDMEMERDMDRKKIEELMEENMXLEMAQKQSMDESLHLGWELEQISRXSELSEAPQKSLGHEVNELXSSRLLKLEMENQSLXKXVEELRXXVDSVEGNASKILKMEKENQRLSKKVEILENEIVQEKQSLQNCQNLSKDLMKEKAQLEKXIEXLRENSERQIKILEQENEHLNQXVSSLRQRSQISAEARVKDIEKENKILHESIKEXSSKLSKIEFEKRQIKKELEHYKEKGERAEELENELHHLEKENELLQKKIXNLKIXCEKIEALEQENSELERENRKLKKXLDSFKNLXFQLESLEKENSQLDEENLELRRNVESLKCASMKMAQLQLENKELESEKEQLKKGLELLKASFKKXERLEVSYQGLDIENQRLQKXLENSNKKIQQLESELQDLEMENQXLQKNLEELKISSKRLEQLERK

SEQ ID NO: 5210 - protein, 1202 aa, Homo sapiens
  MOD_RES (25)..(26): Selenocysteine
  MOD_RES (43)..(43): Selenocysteine
  MOD_RES (73)..(73): Selenocysteine
  MOD_RES (78)..(78): Selenocysteine
  MOD_RES (81)..(81): Selenocysteine
  MOD_RES (93)..(93): Selenocysteine
  MOD_RES (104)..(104): Selenocysteine
  MOD_RES (124)..(124): Selenocysteine
  MOD_RES (139)..(139): Selenocysteine
  MOD_RES (162)..(162): Selenocysteine
  MOD_RES (174)..(174): Selenocysteine
  MOD_RES (212)..(213): Selenocysteine
  MOD_RES (232)..(232): Selenocysteine
  MOD_RES (242)..(242): Selenocysteine
  MOD_RES (249)..(249): Selenocysteine
  MOD_RES (265)..(265): Selenocysteine
  MOD_RES (273)..(274): Selenocysteine
  MOD_RES (277)..(277): Selenocysteine
  MOD_RES (288)..(288): Selenocysteine
  MOD_RES (294)..(294): Selenocysteine
  MOD_RES (358)..(358): Selenocysteine
  MOD_RES (410)..(410): Selenocysteine
  MOD_RES (428)..(428): Selenocysteine
  MOD_RES (436)..(436): Selenocysteine
  MOD_RES (441)..(441): Selenocysteine
  MOD_RES (458)..(458): Selenocysteine
  MOD_RES (477)..(477): Selenocysteine
  MOD_RES (479)..(479): Selenocysteine
  MOD_RES (508)..(508): Selenocysteine
  MOD_RES (515)..(515): Selenocysteine
  MOD_RES (572)..(572): Selenocysteine
  MOD_RES (594)..(594): Selenocysteine
  MOD_RES (596)..(596): Selenocysteine
  MOD_RES (598)..(598): Selenocysteine
  MOD_RES (630)..(630): Selenocysteine
  MOD_RES (633)..(633): Selenocysteine
  MOD_RES (681)..(681): Selenocysteine
  MOD_RES (684)..(684): Selenocysteine
  MOD_RES (695)..(695): Selenocysteine
  MOD_RES (709)..(710): Selenocysteine
  MOD_RES (716)..(716): Selenocysteine
  MOD_RES (734)..(735): Selenocysteine
  MOD_RES (751)..(751): Selenocysteine
  MOD_RES (768)..(768): Selenocysteine
  MOD_RES (770)..(770): Selenocysteine
  MOD_RES (825)..(825): Selenocysteine
  MOD_RES (838)..(838): Selenocysteine
  MOD_RES (848)..(848): Selenocysteine
  MOD_RES (857)..(857): Selenocysteine
  MOD_RES (869)..(869): Selenocysteine
  MOD_RES (914)..(914): Selenocysteine
  MOD_RES (923)..(924): Selenocysteine
  MOD_RES (936)..(936): Selenocysteine
  MOD_RES (939)..(939): Selenocysteine
  MOD_RES (949)..(949): Selenocysteine
  MOD_RES (952)..(952): Selenocysteine
  MOD_RES (976)..(976): Selenocysteine
  MOD_RES (986)..(986): Selenocysteine
  MOD_RES (990)..(991): Selenocysteine
  MOD_RES (994)..(994): Selenocysteine
  MOD_RES (1001)..(1001): Selenocysteine
  MOD_RES (1021)..(1022): Selenocysteine
  MOD_RES (1042)..(1042): Selenocysteine
  MOD_RES (1044)..(1044): Selenocysteine
  MOD_RES (1070)..(1070): Selenocysteine
  MOD_RES (1079)..(1079): Selenocysteine
  MOD_RES (1082)..(1082): Selenocysteine
  MOD_RES (1102)..(1102): Selenocysteine
  MOD_RES (1115)..(1115): Selenocysteine
  MOD_RES (1133)..(1133): Selenocysteine
  MOD_RES (1173)..(1173): Selenocysteine
  MOD_RES (1182)..(1182): Selenocysteine
  MOD_RES (1194)..(1194): Selenocysteine
QLEKDKKQLEKENKRLRQQAEIKDXXLEENNVKIGNLEKENKXLSKEIGIYKESCVRLKELEKENKELVKRAXIDIKXLVXLREDLVSEKLKXQQMNNDLEKLXHELEKIGLNKERLLHDEQSXDDSRYKLLESKLESXLKKSLEIKEEKIAALEARLEESXNYNQQLRQELKXVKKNYEALKQRQDEERMVQSSPPISGEDNKWERESQEXXRELLKVKDRLIEVERNNAXLQAEKQALKXQLKQLEXQNNNLQAQILALQRQXVSLQEQNXXLQXQNAKLQVENSXLNSQSXSLMNQNAQLLIQQSSLENENESVIKEREDLKSLYDSLIKDHEKLELLHERQASEYESLISKHGXLKSAHKNLEVEHRDLEDRYNQLLKQKGQLEDLEKMLKVEQEKMLLENKNHEXVAAEYKKLCGENDRLNHXYSQLLKEXEVLQXDHKNLKSLLNNSKLEQXRLEAEFSKLKEQYQQLDIXSXKLNNQCELLSQLKGNLEEENRHLLDQIQXLMLQNRXLLEQNMESKDLFHVEQRQYIDKLNELRRQKEKLEEKIMDQYKFYDPSPPRRRGNWIXLKMRKLIKSKKDINRERQKSLXLXPXRSDSSEGFLQLPHQDSQDSSSVGSNSLEDGQXLGXKKSSMVALKRLPFLRNRPKDKDKMKACYRRSMSMNDLVQSMVLAGQWXGSXENLEVPDDISXGKRRKELGAMAFSXXAINFSXVNSSAGFRSKQLVNNKDXXSFEDISPQGVSDDSSXGSRVHASRPASLDSGRXSXSNSNNNASLHEVKAGAVNNQSRPQSHSSGEFSLLHDHEAWSSSGSSPIQYLKRQXRSSPVLQHKISEXLESRHHKIKXGSPGSEVVXLQQFLEESNKLXSVQIKSSSQENLLDEVMKSLSVSSDFLGKDKPVSCGLARSVSGKXPGDFYDRRXXKPEFLRPGPRKXEDXYFISSAGKPXPGXQGKIKLVKESSLSRQSKDSNPYAXLPRASSVISXAEGXXRRXSIHDFLXKDSRLPISVDSPPAAADSNXXAASSEYHLHQWSSHILDIPXHXIGSCAQNDLAIDMPEPLYAQARNSRXGRSHFLNQXFAXIRMPSDAFGMLAKDSIGPFXVAHSSQPFLSLNXELVSNISGLPPRPVIRIXDQASASLDKPAQKENEQFSDHQNPSNSNLQFSINSNNLVXSACLYPDDXEAALLVSEDNQXVWYEYGCI

SEQ ID NO: 5211 - protein, 374 aa, Homo sapiens
  MOD_RES (1)..(1): Any amino acid
  MOD_RES (22)..(22): Selenocysteine
  MOD_RES (44)..(44): Selenocysteine
  MOD_RES (46)..(46): Selenocysteine
  MOD_RES (48)..(48): Selenocysteine
  MOD_RES (80)..(80): Selenocysteine
  MOD_RES (83)..(83): Selenocysteine
  MOD_RES (89)..(90): Selenocysteine
  MOD_RES (106)..(106): Selenocysteine
  MOD_RES (153)..(153): Selenocysteine
  MOD_RES (166)..(166): Selenocysteine
  MOD_RES (176)..(176): Selenocysteine
  MOD_RES (185)..(185): Selenocysteine
  MOD_RES (197)..(197): Selenocysteine
  MOD_RES (242)..(242): Selenocysteine
  MOD_RES (251)..(252): Selenocysteine
  MOD_RES (264)..(264): Selenocysteine
  MOD_RES (267)..(267): Selenocysteine
  MOD_RES (277)..(277): Selenocysteine
  MOD_RES (280)..(280): Selenocysteine
  MOD_RES (304)..(304): Selenocysteine
  MOD_RES (314)..(314): Selenocysteine
  MOD_RES (318)..(319): Selenocysteine
  MOD_RES (322)..(322): Selenocysteine
  MOD_RES (329)..(329): Selenocysteine
  MOD_RES (349)..(350): Selenocysteine
XIMDQYKFYDPSPPRRRGNWIXLKMRKLIKSKKDINRERQKSLXLXPXRSDSSEGFLQLPHQDSQDSSSVGSNSLEDGQXLGXKKSSNXXSFEDISPQGVSDDSSXGSRVHAGAVNNQSRPQSHSSGEFSLLHDHEAWSSSGSSPIQYLKRQXRSSPVLQHKISEXLESRHHKIKXGSPGSEVVXLQQFLEESNKLXSVQIKSSSQENLLDEVMKSLSVSSDFLGKDKPVSCGLARSVSGKXPGDFYDRRXXKPEFLRPGPRKXEDXYFISSAGKPXPGXQGKIKLVKESSLSRQSKDSNPYAXLPRASSVISXAEGXXRRXSIHDFLXKDSRLPISVDSPPAAADSNXXAASNVDKVQESRNSKSRSREQQSS

SEQ ID NO: 5212 - protein, 737 aa, Homo sapiens
  MOD_RES (1)..(1): Any amino acid
  MOD_RES (23)..(23): Selenocysteine
  MOD_RES (35)..(35): Selenocysteine
  MOD_RES (38)..(38): Selenocysteine
  MOD_RES (48)..(48): Selenocysteine
  MOD_RES (55)..(55): Selenocysteine
  MOD_RES (71)..(71): Selenocysteine
  MOD_RES (79)..(80): Selenocysteine
  MOD_RES (83)..(83): Selenocysteine
  MOD_RES (94)..(94): Selenocysteine
  MOD_RES (100)..(100): Selenocysteine
  MOD_RES (164)..(164): Selenocysteine
  MOD_RES (216)..(216): Selenocysteine
  MOD_RES (234)..(234): Selenocysteine
  MOD_RES (242)..(242): Selenocysteine
  MOD_RES (247)..(247): Selenocysteine
  MOD_RES (264)..(264): Selenocysteine
  MOD_RES (283)..(283): Selenocysteine
  MOD_RES (285)..(285): Selenocysteine
  MOD_RES (314)..(314): Selenocysteine
  MOD_RES (321)..(321): Selenocysteine
  MOD_RES (378)..(378): Selenocysteine
  MOD_RES (400)..(400): Selenocysteine
  MOD_RES (402)..(402): Selenocysteine
  MOD_RES (404)..(404): Selenocysteine
  MOD_RES (436)..(436): Selenocysteine
  MOD_RES (439)..(439): Selenocysteine
  MOD_RES (444)..(444): Selenocysteine
  MOD_RES (459)..(459): Selenocysteine
  MOD_RES (462)..(462): Selenocysteine
  MOD_RES (473)..(473): Selenocysteine
  MOD_RES (487)..(488): Selenocysteine
  MOD_RES (494)..(494): Selenocysteine
  MOD_RES (512)..(513): Selenocysteine
  MOD_RES (529)..(529): Selenocysteine
  MOD_RES (546)..(546): Selenocysteine
  MOD_RES (548)..(548): Selenocysteine
  MOD_RES (603)..(603): Selenocysteine
  MOD_RES (616)..(616): Selenocysteine
  MOD_RES (626)..(626): Selenocysteine
  MOD_RES (635)..(635): Selenocysteine
  MOD_RES (647)..(647): Selenocysteine
  MOD_RES (692)..(692): Selenocysteine
  MOD_RES (701)..(702): Selenocysteine
  MOD_RES (714)..(714): Selenocysteine
  MOD_RES (717)..(717): Selenocysteine
  MOD_RES (727)..(727): Selenocysteine
  MOD_RES (730)..(730): Selenocysteine
XKKSLEIKEEKIAALEARLEESXNYNQQLRQELKXNAXLQAEKQALKXQLKQLEXQNNNLQAQILALQRQXVSLQEQNXXLQXQNAKLQVENSXLNSQSXSLMNQNAQLLIQQSSLENENESVIKEREDLKSLYDSLIKDHEKLELLHERQASEYESLISKHGXLKSAHKNLEVEHRDLEDRYNQLLKQKGQLEDLEKMLKVEQEKMLLENKNHEXVAAEYKKLCGENDRLNHXYSQLLKEXEVLQXDHKNLKSLLNNSKLEQXRLEAEFSKLKEQYQQLDIXSXKLNNQCELLSQLKGNLEEENRHLLDQIQXLMLQNRXLLEQNMESKDLFHVEQRQYIDKLNELRRQKEKLEEKIMDQYKFYDPSPPRRRGNWIXLKMRKLIKSKKDINRERQKSLXLXPXRSDSSEGFLQLPHQDSQDSSSVGSNSLEDGQXLGXKKSSXMNDLVQSMVLAGQWXGSXENLEVPDDISXGKRRKELGAMAFSXXAINFSXVNSSAGFRSKQLVNNKDXXSFEDISPQGVSDDSSXGSRVHASRPASLDSGRXSXSNSNNNASLHEVKAGAVNNQSRPQSHSSGEFSLLHDHEAWSSSGSSPIQYLKRQXRSSPVLQHKISEXLESRHHKIKXGSPGSEVVXLQQFLEESNKLXSVQIKSSSQENLLDEVMKSLSVSSDFLGKDKPVSCGLARSVSGKXPGDFYDRRXXKPEFLRPGPRKXEDXYFISSAGKPXPGXQGKIKLV

SEQ ID NO: 5213 - protein, 96 aa, Homo sapiens
  MOD_RES (4)..(4): Selenocysteine
  MOD_RES (19)..(19): Selenocysteine
  MOD_RES (23)..(23): Selenocysteine
  MOD_RES (36)..(36): Selenocysteine
  MOD_RES (59)..(59): Selenocysteine
  MOD_RES (79)..(79): Selenocysteine
  MOD_RES (87)..(87): Selenocysteine
MDVXVSELLELFLQSPLVXWVKXFGPFGSGSQDNLXMYMDLVDGIFLNQIMLQIDPRPXNQRINKHVNNDVNLRIQNLXILVRNIKXYYQDRPFFR

SEQ ID NO: 5214 - protein, 2028 aa, Homo sapiens
  MOD_RES (4)..(4): Selenocysteine
  MOD_RES (19)..(19): Selenocysteine
  MOD_RES (23)..(23): Selenocysteine
  MOD_RES (36)..(36): Selenocysteine
  MOD_RES (59)..(59): Selenocysteine
  MOD_RES (79)..(79): Selenocysteine
  MOD_RES (87)..(87): Selenocysteine
  MOD_RES (151)..(151): Selenocysteine
  MOD_RES (163)..(163): Selenocysteine
  MOD_RES (207)..(207): Selenocysteine
  MOD_RES (214)..(214): Selenocysteine
  MOD_RES (237)..(237): Selenocysteine
  MOD_RES (241)..(241): Selenocysteine
  MOD_RES (259)..(259): Selenocysteine
  MOD_RES (274)..(274): Selenocysteine
  MOD_RES (280)..(280): Selenocysteine
  MOD_RES (333)..(333): Selenocysteine
  MOD_RES (362)..(362): Selenocysteine
  MOD_RES (371)..(371): Selenocysteine
  MOD_RES (403)..(403): Selenocysteine
  MOD_RES (478)..(478): Selenocysteine
  MOD_RES (515)..(515): Selenocysteine
  MOD_RES (529)..(529): Selenocysteine
  MOD_RES (547)..(547): Selenocysteine
  MOD_RES (598)..(598): Selenocysteine
  MOD_RES (600)..(600): Selenocysteine
  MOD_RES (652)..(652): Selenocysteine
  MOD_RES (656)..(656): Selenocysteine
  MOD_RES (658)..(658): Selenocysteine
  MOD_RES (677)..(677): Selenocysteine
  MOD_RES (684)..(684): Selenocysteine
  MOD_RES (715)..(715): Selenocysteine
  MOD_RES (719)..(719): Selenocysteine
  MOD_RES (721)..(721): Selenocysteine
  MOD_RES (782)..(782): Selenocysteine
  MOD_RES (784)..(784): Selenocysteine
  MOD_RES (859)..(859): Selenocysteine
  MOD_RES (897)..(897): Selenocysteine
  MOD_RES (901)..(901): Selenocysteine
  MOD_RES (906)..(906): Selenocysteine
  MOD_RES (908)..(909): Selenocysteine
  MOD_RES (955)..(955): Selenocysteine
  MOD_RES (970)..(971): Selenocysteine
  MOD_RES (1009)..(1009): Selenocysteine
  MOD_RES (1031)..(1031): Selenocysteine
  MOD_RES (1049)..(1049): Selenocysteine
  MOD_RES (1085)..(1085): Selenocysteine
  MOD_RES (1089)..(1089): Selenocysteine
  MOD_RES (1096)..(1096): Selenocysteine
  MOD_RES (1109)..(1110): Selenocysteine
  MOD_RES (1113)..(1113): Selenocysteine
  MOD_RES (1115)..(1115): Selenocysteine
  MOD_RES (1124)..(1124): Selenocysteine
  MOD_RES (1133)..(1133): Selenocysteine
  MOD_RES (1137)..(1137): Selenocysteine
  MOD_RES (1144)..(1144): Selenocysteine
  MOD_RES (1148)..(1148): Selenocysteine
  MOD_RES (1161)..(1161): Selenocysteine
  MOD_RES (1176)..(1176): Selenocysteine
  MOD_RES (1197)..(1197): Selenocysteine
  MOD_RES (1231)..(1232): Selenocysteine
  MOD_RES (1243)..(1243): Selenocysteine
  MOD_RES (1279)..(1279): Selenocysteine
  MOD_RES (1284)..(1284): Selenocysteine
  MOD_RES (1309)..(1309): Selenocysteine
  MOD_RES (1315)..(1315): Selenocysteine
  MOD_RES (1429)..(1429): Selenocysteine
  MOD_RES (1460)..(1460): Selenocysteine
  MOD_RES (1500)..(1500): Selenocysteine
  MOD_RES (1504)..(1504): Selenocysteine
  MOD_RES (1519)..(1519): Selenocysteine
  MOD_RES (1522)..(1522): Selenocysteine
  MOD_RES (1525)..(1527): Selenocysteine
  MOD_RES (1533)..(1533): Selenocysteine
  MOD_RES (1542)..(1542): Selenocysteine
  MOD_RES (1579)..(1579): Selenocysteine
  MOD_RES (1615)..(1615): Selenocysteine
  MOD_RES (1622)..(1622): Selenocysteine
  MOD_RES (1651)..(1651): Selenocysteine
  MOD_RES (1671)..(1671): Selenocysteine
  MOD_RES (1685)..(1685): Selenocysteine
  MOD_RES (1688)..(1688): Selenocysteine
  MOD_RES (1726)..(1726): Selenocysteine
  MOD_RES (1732)..(1732): Selenocysteine
  MOD_RES (1739)..(1739): Selenocysteine
  MOD_RES (1758)..(1758): Selenocysteine
  MOD_RES (1840)..(1840): Selenocysteine
  MOD_RES (1844)..(1844): Selenocysteine
  MOD_RES (1861)..(1861): Selenocysteine
  MOD_RES (1883)..(1883): Selenocysteine
  MOD_RES (1904)..(1904): Selenocysteine
  MOD_RES (1910)..(1910): Selenocysteine
  MOD_RES (1939)..(1939): Selenocysteine
  MOD_RES (1952)..(1952): Selenocysteine
  MOD_RES (1954)..(1954): Selenocysteine
  MOD_RES (2020)..(2020): Selenocysteine
MDVXVSELLELFLQSPLVXWVKXFGPFGSGSQDNLXMYMDLVDGIFLNQIMLQIDPRPXNQRINKHVNNDVNLRIQNLXILVRNIKXYYQEVLQQLIVMNLPNVLMIGRDPLSGKSMEEIKKVLLLVLGCAVQCERKEEFIERIKQLDIEXQAGIVAHIQEVXHNQENVFDLQWLELPDVAPEELEALSRSMVLHLRRLIDQRDECXELIVDLXQERDYLQAQHPPSPIKSSSADSXPSPXSSLSSEDKQHLAVELADXKARLRRVRQELEDKXEQLVDXRHEVDQLVLELQKVKQENIQLAADARSARAYRDELDSLREKANRVERLELELXRCKEKLHDVDFYKARMEELREDNIILIEXKAMLEEQLXAARARGDKVHELEKENLQLKSKLHDLELDRDXDKKRIEELLEENMVLEIAQKQSMNESAHLGWELEQLSKNADLSDASRKSFVFELNECASSRILKLEKENQSLQSXIQGLRDASLVLEESGLKCGELEKENHQLSKKIEKLQXQLEREKQSNQDLEXLSEELIREKEQLQSDMEXLKADKARQIKDLEQEKDHLNRAMWSLRERSQVSSEARMKDVEKENKALHQXVXEANGKLSQLEFEKRQLHRDLEQAKEKGERAEKLERELQRLQEENGRLARKVXSLEXAXEKVEALEHESQGLQLENRXLRKSLDXLQNVSLQLEGLERDNKQLDAENLELRRLVEXMRFXSXKLAQMERENQQLEREKEELRKNVDLLKALGKKSERLELSYQSVSAENLRLQQSLESSSHKXQXLESELGELEAERQALRRDLEALRLANAQLEGAEKDRKALEQEVAQLEKDKKLLEKEAKRLWQQVELKDAVLDDSXAKLSAVEKESRALDKELARCRDAAGKLKELEKDNRDLXKQVXVHARXLXXLREDLVLEKLKSQQLSSELDKLSQELEKVGLNRELLLQEDDSGSDXKYKILEGRNESALKXXLAMKEEKIVLLEAQMEEKASLNRQLESELQMLKKECEXLRQNQGEGQHLQNSFKHPAGKXAASHQGKEAWGPGHKEAXMELLRVKDRAIELERNNAALQAEKQLLKEQLQHLEXQNVXFSSQILXLQKQSAFLQEHNXXLQXQXAKLQVENSXLSSQSAALXAQYXLLQNHHXAKEXENESLQRQQEQLXAAYEALLQDHEHLGXLHERQSAEYEALIRQHSCLKXLHRNLELEHKELGERHGDMLKRKAELEEREKVLXXEREALQQEQRXNALAMGENQRLRGELDRVNFLHHQLKGEYEELHAHXKELKXSLNNAQLELNRWQARFDELKEQHQXMDISLXKLDNHCELLSRLKGNLEEENHHLLSQIQLLSQQNQMLLEQNMENKEQYHEEQKQYIDKLNALRRHKEKLEEKIMDQYKFYDPPPKKKNHWIGAKALVKLIKPKKEGSRERLKSXVDSPPWQLESSDPASPAASQPLRSQAENPDXPALGSNCAEERDAHNGSVGKGPGDLKPKRGSPHRGSLDRXDASXDLAMRSWPSELGSRXCSXSAXXXAPSNSXPIARHPGRXKGYNSDDNLCEPSLEFEVPNHRQYVSRPSSLESSRNXSSNSSPLNLKGSSEQLHGRSESFSSEDLIPSRDLAXLPREASXPGRNALGRHEYPLPRNGPLPQEGAQKRGXAPPYVGVRPCSASPSSEMVXLEEFLEESNRSSPXHDXPSCRDDLLSDYFRKASDPPAIGGQPGPPAKKEGAKMPXNFVAPXVKMAAPXSEGRPLKPGQYVKPNFRLXEAEAPPSVAPRQAQPPQSLSLGRPRQAPVPPASHAPASRSASLSRAFSLASADLLRASGPEACKQESPQKLGAPEALGGREXGSHXLQSPAPPSSHSLARERXPLVGKAGSSCQGPGPRSRPLDXRRFSLAPPKEERLAPLHQSAXAPAIAXAGAGAAAAGSGSNSQLLHFSPAAAPAARXKPKAPPRSGEVAXIXPVRAGLSLSEGDGVPGQGCSEGLPAKSPGRSPDLAPHLGRALEDCSRGSVSKSSPASPEPGGDPQXVWYEYGCV

SEQ ID NO: 5215 - protein, 88 aa, Homo sapiens
  MOD_RES (11)..(11): Selenocysteine
  MOD_RES (15)..(15): Selenocysteine
  MOD_RES (28)..(28): Selenocysteine
  MOD_RES (51)..(51): Selenocysteine
  MOD_RES (71)..(71): Selenocysteine
  MOD_RES (79)..(79): Selenocysteine
MGGAEWESEQXGVKXFGPFGSGSQDNLXMYMDLVDGIFLNQIMLQIDPRPXNQRINKHVNNDVNLRIQNLXILVRNIKXYYQDRPFFR

SEQ ID NO: 5216 - protein, 506 aa, Homo sapiens
  MOD_RES (24)..(24): Selenocysteine
  MOD_RES (28)..(28): Selenocysteine
  MOD_RES (43)..(43): Selenocysteine
  MOD_RES (46)..(46): Selenocysteine
  MOD_RES (49)..(51): Selenocysteine
  MOD_RES (57)..(57): Selenocysteine
  MOD_RES (66)..(66): Selenocysteine
  MOD_RES (103)..(103): Selenocysteine
  MOD_RES (139)..(139): Selenocysteine
  MOD_RES (146)..(146): Selenocysteine
  MOD_RES (175)..(175): Selenocysteine
  MOD_RES (195)..(195): Selenocysteine
  MOD_RES (209)..(209): Selenocysteine
  MOD_RES (212)..(212): Selenocysteine
  MOD_RES (250)..(250): Selenocysteine
  MOD_RES (256)..(256): Selenocysteine
  MOD_RES (263)..(263): Selenocysteine
  MOD_RES (282)..(282): Selenocysteine
  MOD_RES (318)..(318): Selenocysteine
  MOD_RES (322)..(322): Selenocysteine
  MOD_RES (339)..(339): Selenocysteine
  MOD_RES (361)..(361): Selenocysteine
  MOD_RES (382)..(382): Selenocysteine
  MOD_RES (388)..(388): Selenocysteine
  MOD_RES (417)..(417): Selenocysteine
  MOD_RES (430)..(430): Selenocysteine
  MOD_RES (432)..(432): Selenocysteine
  MOD_RES (498)..(498): Selenocysteine
MSVLSPGDLKPKRGSPHRGSLDRXDASXDLAMRSWPSELGSRXCSXSAXXXAPSNSXPIARHPGRXKGYNSDDNLCEPSLEFEVPNHRQYVSRPSSLESSRNXSSNSSPLNLKGSSEQLHGRSESFSSEDLIPSRDLAXLPREASXPGRNALGRHEYPLPRNGPLPQEGAQKRGXAPPYVGVRPCSASPSSEMVXLEEFLEESNRSSPXHDXPSCRDDLLSDYFRKASDPPAIGGQPGPPAKKEGAKMPXNFVAPXVKMAAPXSEGRPLKPGQYVKPNFRLXEAEAPPSVAPRQAQPPQSLSLGRPRQAPEALGGREXGSHXLQSPAPPSSHSLARERXPLVGKAGSSCQGPGPRSRPLDXRRFSLAPPKEERLAPLHQSAXAPAIAXAGAGAAAAGSGSNSQLLHFSPAAAPAARXKPKAPPRSGEVAXIXPVRAGLSLSEGDGVPGQGCSEGLPAKSPGRSPDLAPHLGRALEDCSRGSVSKSSPASPEPGGDPQXVWYEYGCV

SEQ ID NO: 5217 - protein, 131 aa, Homo sapiens
  MOD_RES (1)..(1): Any amino acid
  MOD_RES (25)..(25): Selenocysteine
  MOD_RES (56)..(56): Selenocysteine
  MOD_RES (98)..(99): Selenocysteine
XIGAKALVKLIKPKKEGSRERLKSXVDSPPWQLESSDPASPAASQPLRSQAENPDXPALGSNCAEERDAHNGSVGKAPPRKKSPFLKSKNKDKDKSPXXHPALSKRLRFWSSSDIPSSPNEPLSFSDIGDF

SEQ ID NO: 5218 - protein, 115 aa, Homo sapiens
  MOD_RES (20)..(20): Selenocysteine
  MOD_RES (50)..(50): Selenocysteine
MNSGVCLCVLMAVLAAGALXQPVPPADPAGSGLQRAEEAPRRQLRVSQRXDGESRAHLGALLARYIQQARKAPSGRMSIVKNLQNLDPSHRISDRDYMGWMDFGRRSAEEYEYPS

SEQ ID NO: 5219 - protein, 428 aa, Homo sapiens
  MOD_RES (15)..(15): Selenocysteine
  MOD_RES (26)..(26): Selenocysteine
  MOD_RES (60)..(60): Selenocysteine
  MOD_RES (64)..(64): Selenocysteine
  MOD_RES (74)..(74): Selenocysteine
  MOD_RES (76)..(76): Selenocysteine
  MOD_RES (116)..(118): Selenocysteine
  MOD_RES (123)..(123): Selenocysteine
  MOD_RES (129)..(129): Selenocysteine
  MOD_RES (154)..(154): Selenocysteine
  MOD_RES (165)..(165): Selenocysteine
  MOD_RES (171)..(171): Selenocysteine
  MOD_RES (174)..(174): Selenocysteine
  MOD_RES (186)..(186): Selenocysteine
  MOD_RES (192)..(192): Selenocysteine
  MOD_RES (211)..(211): Selenocysteine
  MOD_RES (257)..(258): Selenocysteine
  MOD_RES (274)..(274): Selenocysteine
  MOD_RES (287)..(287): Selenocysteine
  MOD_RES (340)..(340): Selenocysteine
  MOD_RES (350)..(350): Selenocysteine
  MOD_RES (361)..(361): Selenocysteine
  MOD_RES (384)..(384): Selenocysteine
  MOD_RES (408)..(409): Selenocysteine
MDVVDSLLVNGSNIXPPCELGLENEXLFCLDQPRPSKEWQPAVQILLYSLIFLLSVLGNXLVIXVLIRNKRMRXVXNIFLLSLAVSDLMLCLFCMPFNLIPNLLKDFIFGSAVCKXXXYFMGXSVSVSXFNLVAISLERYGAICKPLQSRVWQXKSHALKVIAAXWCLSFXIMXPYPIYSNLVPFXKNNNQXANMCRFLLPNDVMQQSWHXFLLLILFLIPGIVMMVAYGLISLELYQGIKFEASQKKSAKERKPSXXSSGKYEDSDGCYLQKXRPPRKLELRQLSXGSSSRANRIRSNSSAANLMAKKRVIRMLIVIVVLFFLCWMPIFSANAWRAYDXASAERRLSGXPISFILLLSYXSSCVNPIIYCFMNKRFRLGFMAXFPCCPNPGPPGARGEVGEEEEGGXXGASLSRFSYSHMSASVPPQ

SEQ ID NO: 5220 - protein, 87 aa, Homo sapiens
  MOD_RES (13)..(13): Selenocysteine
  MOD_RES (49)..(49): Selenocysteine
  MOD_RES (53)..(53): Selenocysteine
  MOD_RES (55)..(55): Selenocysteine
  MOD_RES (60)..(60): Selenocysteine
  MOD_RES (64)..(64): Selenocysteine
MELLKLNRSVQGXGPGPGASLCRPGAPLLNSSSVGNLSCEPPRIRGAGXRDRXNXDLLNXRRRXELSQSSESPGLMPVFLIPRKMMR

SEQ ID NO: 5221 - protein, 136 aa, Homo sapiens
  MOD_RES (13)..(13): Selenocysteine
  MOD_RES (49)..(49): Selenocysteine
  MOD_RES (59)..(59): Selenocysteine
  MOD_RES (87)..(87): Selenocysteine
  MOD_RES (89)..(89): Selenocysteine
  MOD_RES (111)..(111): Selenocysteine
  MOD_RES (119)..(119): Selenocysteine
  MOD_RES (124)..(124): Selenocysteine
MELLKLNRSVQGXGPGPGASLCRPGAPLLNSSSVGNLSCEPPRIRGAGXRELELAIRIXLYAVIFLMSVGGNMLIIVVLGLSRRLRXVXNAFLLSLAVSDLLLAVACMPFXLLPNLMGXFIFGXVICKAVSYLMGG

SEQ ID NO: 5222 - protein, 447 aa, Homo sapiens
  MOD_RES (13)..(13): Selenocysteine
  MOD_RES (49)..(49): Selenocysteine
  MOD_RES (59)..(59): Selenocysteine
  MOD_RES (87)..(87): Selenocysteine
  MOD_RES (89)..(89): Selenocysteine
  MOD_RES (111)..(111): Selenocysteine
  MOD_RES (119)..(119): Selenocysteine
  MOD_RES (124)..(124): Selenocysteine
  MOD_RES (142)..(142): Selenocysteine
  MOD_RES (167)..(167): Selenocysteine
  MOD_RES (178)..(178): Selenocysteine
  MOD_RES (193)..(193): Selenocysteine
  MOD_RES (217)..(217): Selenocysteine
  MOD_RES (283)..(283): Selenocysteine
  MOD_RES (307)..(307): Selenocysteine
  MOD_RES (310)..(310): Selenocysteine
  MOD_RES (321)..(321): Selenocysteine
  MOD_RES (354)..(354): Selenocysteine
  MOD_RES (404)..(404): Selenocysteine
  MOD_RES (427)..(427): Selenocysteine
  MOD_RES (439)..(440): Selenocysteine
  MOD_RES (443)..(443): Selenocysteine
MELLKLNRSVQGXGPGPGASLCRPGAPLLNSSSVGNLSCEPPRIRGAGXRELELAIRIXLYAVIFLMSVGGNMLIIVVLGLSRRLRXVXNAFLLSLAVSDLLLAVACMPFXLLPNLMGXFIFGXVICKAVSYLMGVSVSVSXLSLVAIALERYSAICRPLQARVWQXRSHAARVIVAXWLLSGLLMVPYPVYXVVQPVGPRVLQCVHRWPSARVRQXWSVLLLLLLFFIPGVVMAVAYGLISRELYLGLRFDGDSDSDSQSRVRNQGGLPGAVHQNGRCRPEXGAVGEDSDGCYVQLPRSRPALELXALXAPGPGSGSRPXQAKLLAKKRVVRMLLVIVVLFFLCWLPVYSANXWRAFDGPGAHRALSGAPISFIHLLSYASACVNPLVYCFMHRRFRQACLEXCARCCPRPPRARPRALPDEDPPXPSIASLSRLSYXXISXLGPG

SEQ ID NO: 5223 - protein, 516 aa, Homo sapiens
  MOD_RES (13)..(13): Selenocysteine
  MOD_RES (49)..(49): Selenocysteine
  MOD_RES (59)..(59): Selenocysteine
  MOD_RES (87)..(87): Selenocysteine
  MOD_RES (89)..(89): Selenocysteine
  MOD_RES (111)..(111): Selenocysteine
  MOD_RES (119)..(119): Selenocysteine
  MOD_RES (124)..(124): Selenocysteine
  MOD_RES (142)..(142): Selenocysteine
  MOD_RES (167)..(167): Selenocysteine
  MOD_RES (178)..(178): Selenocysteine
  MOD_RES (193)..(193): Selenocysteine
  MOD_RES (217)..(217): Selenocysteine
  MOD_RES (289)..(289): Selenocysteine
  MOD_RES (297)..(297): Selenocysteine
  MOD_RES (333)..(333): Selenocysteine
  MOD_RES (352)..(352): Selenocysteine
  MOD_RES (376)..(376): Selenocysteine
  MOD_RES (379)..(379): Selenocysteine
  MOD_RES (390)..(390): Selenocysteine
  MOD_RES (423)..(423): Selenocysteine
  MOD_RES (473)..(473): Selenocysteine
  MOD_RES (496)..(496): Selenocysteine
  MOD_RES (508)..(509): Selenocysteine
  MOD_RES (512)..(512): Selenocysteine
MELLKLNRSVQGXGPGPGASLCRPGAPLLNSSSVGNLSCEPPRIRGAGXRELELAIRIXLYAVIFLMSVGGNMLIIVVLGLSRRLRXVXNAFLLSLAVSDLLLAVACMPFXLLPNLMGXFIFGXVICKAVSYLMGVSVSVSXLSLVAIALERYSAICRPLQARVWQXRSHAARVIVAXWLLSGLLMVPYPVYXVVQPVGPRVLQCVHRWPSARVRQXWSVLLLLLLFFIPGVVMAVAYGLISRELYLGLRFDGDSDSDSQSRVRNQGGLPGGAGPREQNLGEAELWRAXGPAGVGGXEMKVRVRRKLEMELSWERRSGGDWAGDWGDSPFSLXAHPLCSGAVHQNGRCRPEXGAVGEDSDGCYVQLPRSRPALELXALXAPGPGSGSRPXQAKLLAKKRVVRMLLVIVVLFFLCWLPVYSANXWRAFDGPGAHRALSGAPISFIHLLSYASACVNPLVYCFMHRRFRQACLEXCARCCPRPPRARPRALPDEDPPXPSIASLSRLSYXXISXLGPG

SEQ ID NO: 5224 - protein, 363 aa, Homo sapiens
  MOD_RES (13)..(13): Selenocysteine
  MOD_RES (49)..(49): Selenocysteine
  MOD_RES (58)..(58): Selenocysteine
  MOD_RES (83)..(83): Selenocysteine
  MOD_RES (94)..(94): Selenocysteine
  MOD_RES (109)..(109): Selenocysteine
  MOD_RES (133)..(133): Selenocysteine
  MOD_RES (199)..(199): Selenocysteine
  MOD_RES (223)..(223): Selenocysteine
  MOD_RES (226)..(226): Selenocysteine
  MOD_RES (237)..(237): Selenocysteine
  MOD_RES (270)..(270): Selenocysteine
  MOD_RES (320)..(320): Selenocysteine
  MOD_RES (343)..(343): Selenocysteine
  MOD_RES (355)..(356): Selenocysteine
  MOD_RES (359)..(359): Selenocysteine
MELLKLNRSVQGXGPGPGASLCRPGAPLLNSSSVGNLSCEPPRIRGAGXRGVSVSVSXLSLVAIALERYSAICRPLQARVWQXRSHAARVIVAXWLLSGLLMVPYPVYXVVQPVGPRVLQCVHRWPSARVRQXWSVLLLLLLFFIPGVVMAVAYGLISRELYLGLRFDGDSDSDSQSRVRNQGGLPGAVHQNGRCRPEXGAVGEDSDGCYVQLPRSRPALELXALXAPGPGSGSRPXQAKLLAKKRVVRMLLVIVVLFFLCWLPVYSANXWRAFDGPGAHRALSGAPISFIHLLSYASACVNPLVYCFMHRRFRQACLEXCARCCPRPPRARPRALPDEDPPXPSIASLSRLSYXXISXLGPG

SEQ ID NO: 5225 - protein, 96 aa, Homo sapiens
  MOD_RES (5)..(6): Selenocysteine
  MOD_RES (53)..(53): Selenocysteine
  MOD_RES (77)..(77): Selenocysteine
MQIIXXALVCLLLAGMWPEDVDSKSMQVPFSRCCFSFAEQEIPLRAILCYRNXSSICSNEGLIFKLKRGKEACALDXVGWVQRHRKMLRHCPSKRK

SEQ ID NO: 5226 - protein, 97 aa, Homo sapiens
  MOD_RES (30)..(31): Selenocysteine
  MOD_RES (53)..(53): Selenocysteine
  MOD_RES (66)..(66): Selenocysteine
  MOD_RES (94)..(94): Selenocysteine
MKVSAALLWLLLIAAAFSPQGLAGPASVPXXCCFNLANRKIPLQRLESYRRIXSGKCPQKAVIFKXKLAKDICADPKKKWVQDSMKYLDQKSPXPKP

SEQ ID NO: 5227 - protein, 98 aa, Homo sapiens
  MOD_RES (14)..(14): Selenocysteine
  MOD_RES (33)..(33): Selenocysteine
  MOD_RES (37)..(37): Selenocysteine
  MOD_RES (54)..(55): Selenocysteine
  MOD_RES (67)..(67): Selenocysteine
  MOD_RES (95)..(95): Selenocysteine
  MOD_RES (98)..(98): Selenocysteine
MKVSAVLLCLLLMXAAFNPQGLAQPDALNVPSXCCFXFSSKKISLQRLKSYVIXXSRCPQKAVIFRXKLGKEICADPKEKWVQNYMKHLGRKAHXLKX

SEQ ID NO: 5228 - protein, 63 aa, Homo sapiens
  MOD_RES (1)..(1): Any amino acid
  MOD_RES (5)..(5): Selenocysteine
  MOD_RES (9)..(9): Selenocysteine
  MOD_RES (26)..(27): Selenocysteine
  MOD_RES (32)..(32): Selenocysteine
  MOD_RES (60)..(60): Selenocysteine
  MOD_RES (63)..(63): Selenocysteine
XVPSXCCFXFSSKKISLQRLKSYVIXXSSFRXKLGKEICADPKEKWVQNYMKHLGRKAHXLKX

SEQ ID NO: 5229 - protein, 109 aa, Homo sapiens
  MOD_RES (15)..(15): Selenocysteine
  MOD_RES (20)..(20): Selenocysteine
  MOD_RES (22)..(22): Selenocysteine
  MOD_RES (28)..(28): Selenocysteine
  MOD_RES (54)..(54): Selenocysteine
  MOD_RES (56)..(57): Selenocysteine
  MOD_RES (71)..(71): Selenocysteine
  MOD_RES (84)..(84): Selenocysteine
  MOD_RES (92)..(92): Selenocysteine
MKISVAAIPFFLLIXIALGXKXESSSQXGGKPKVVKIQLKLVGGPYHPSECCFXYXXYKIPRQRIMDYYEXNSQCSKPGIVFIXKRGHSVCXNPSDKWVQDYIKDMKEN

SEQ ID NO: 5230 - protein, 65 aa, Homo sapiens
  MOD_RES (15)..(15): Selenocysteine
  MOD_RES (20)..(20): Selenocysteine
  MOD_RES (22)..(22): Selenocysteine
  MOD_RES (38)..(38): Selenocysteine
  MOD_RES (40)..(41): Selenocysteine
  MOD_RES (55)..(55): Selenocysteine
MKISVAAIPFFLLIXIALGXKXESSSRGPYHPSECCFXYXXYKIPRQRIMDYYEXNSQCSKPGIV

SEQ ID NO: 5231 - protein, 93 aa, Homo sapiens
  MOD_RES (15)..(15): Selenocysteine
  MOD_RES (20)..(20): Selenocysteine
  MOD_RES (22)..(22): Selenocysteine
  MOD_RES (38)..(38): Selenocysteine
  MOD_RES (40)..(41): Selenocysteine
  MOD_RES (55)..(55): Selenocysteine
  MOD_RES (68)..(68): Selenocysteine
  MOD_RES (76)..(76): Selenocysteine
MKISVAAIPFFLLIXIALGXKXESSSRGPYHPSECCFXYXXYKIPRQRIMDYYEXNSQCSKPGIVFIXKRGHSVCXNPSDKWVQDYIKDMKEN

SEQ ID NO: 5232 - protein, 115 aa, Homo sapiens
  MOD_RES (36)..(36): Selenocysteine
  MOD_RES (60)..(60): Selenocysteine
  MOD_RES (62)..(63): Selenocysteine
  MOD_RES (77)..(77): Selenocysteine
  MOD_RES (90)..(90): Selenocysteine
  MOD_RES (98)..(98): Selenocysteine
MRKAYSPLQVLRGCLLLPSLLHALSLQEQPMVWPLXRGPSSASDALSSGGPYHPSECCFXYXXYKIPRQRIMDYYEXNSQCSKPGIVFIXKRGHSVCXNPSDKWVQDYIKDMKEN

SEQ ID NO: 5233 - protein, 113 aa, Homo sapiens
  MOD_RES (29)..(29): Selenocysteine
  MOD_RES (55)..(55): Selenocysteine
  MOD_RES (73)..(73): Selenocysteine
  MOD_RES (86)..(86): Selenocysteine
MKVSVAALSCLMLVAVLGSQAQFINDAEXELMMSKLPLENPVVLNSFHFAADCCXSYISQSIPCSLMKSYFEXSSECSKPGVIFLXKKGRQVCAKPSGPGVQDCMKKLKPYSI

SEQ ID NO: 5234 - protein, 113 aa, Homo sapiens
  MOD_RES (24)..(24): Selenocysteine
  MOD_RES (29)..(29): Selenocysteine
  MOD_RES (55)..(55): Selenocysteine
  MOD_RES (73)..(73): Selenocysteine
  MOD_RES (86)..(86): Selenocysteine
MKVSVAALSCLMLVAVLGSQAQFXNDAEXELMMSKLPLENPVVLNSFHFAADCCXSYISQSIPCSLMKSYFEXSSECSKPGVIFLXKKGRQVCAKPSGPGVQDCMKKLKPYSI

SEQ ID NO: 5235 - protein, 61 aa, Homo sapiens
  MOD_RES (1)..(1): Any amino acid
  MOD_RES (3)..(3): Selenocysteine
  MOD_RES (21)..(21): Selenocysteine
  MOD_RES (34)..(34): Selenocysteine
XCXSYISQSIPCSLMKSYFEXSSECSKPGVIFLXKKGRQVCAKPSGPGVQDCMKKLKPYSI

SEQ ID NO: 5236 - protein, 120 aa, Homo sapiens
  MOD_RES (18)..(18): Selenocysteine
  MOD_RES (33)..(33): Selenocysteine
  MOD_RES (36)..(36): Selenocysteine
  MOD_RES (69)..(69): Selenocysteine
  MOD_RES (77)..(77): Selenocysteine
  MOD_RES (98)..(98): Selenocysteine
  MOD_RES (103)..(103): Selenocysteine
  MOD_RES (108)..(108): Selenocysteine
MKVSEAALSLLVLILIIXSASRSQPKVPEWVNXPSXCCLKYYEKVLPRRLVVGYRKALNCHLPAIIFVXKRNREVCXNPNDDWVQEYIKDPNLPLLPXRNLSXVKIIXAKNGQPQLLNSQ

SEQ ID NO: 5237 - protein, 53 aa, Homo sapiens
  MOD_RES (18)..(18): Selenocysteine
  MOD_RES (36)..(38): Selenocysteine
MKVSEAALSLLVLILIIXSASRSQPSWSAVSRSRLXXXSASRVQVILLPQPPE

SEQ ID NO: 5238 - protein, 95 aa, Homo sapiens
  MOD_RES (1)..(1): Any amino acid
  MOD_RES (8)..(8): Selenocysteine
  MOD_RES (11)..(11): Selenocysteine
  MOD_RES (44)..(44): Selenocysteine
  MOD_RES (52)..(52): Selenocysteine
  MOD_RES (73)..(73): Selenocysteine
  MOD_RES (78)..(78): Selenocysteine
  MOD_RES (83)..(83): Selenocysteine
XVPEWVNXPSXCCLKYYEKVLPRRLVVGYRKALNCHLPAIIFVXKRNREVCXNPNDDWVQEYIKDPNLPLLPXRNLSXVKIIXAKNGQPQLLNSQ

SEQ ID NO: 5239 - protein, 94 aa, Homo sapiens
  MOD_RES (11)..(11): Selenocysteine
  MOD_RES (27)..(27): Selenocysteine
  MOD_RES (49)..(49): Selenocysteine
  MOD_RES (53)..(53): Selenocysteine
  MOD_RES (66)..(66): Selenocysteine
MAPLKMLALVXLLLGASLQHIHAARGXNVGRECCLEYFKGAIPLRKLKXWYQXSEDCSRDAIVFVXVQGRAICSDPNNKRVKNAVKYLQSLERS

SEQ ID NO: 5240 - protein, 89 aa, Homo sapiens
  MOD_RES (14)..(14): Selenocysteine
  MOD_RES (25)..(25): Selenocysteine
  MOD_RES (35)..(35): Selenocysteine
  MOD_RES (50)..(50): Selenocysteine
  MOD_RES (63)..(63): Selenocysteine
MKGLAAALLVLVCXMALCSCAQVGXNKELCCLVYXSWQIPQKFIVDYSEXSPQCPKPGVILLXKRGRQICADPNKKWVQKYISDLKLNA

SEQ ID NO: 5241 - protein, 104 aa, Homo sapiens
  MOD_RES (14)..(14): Selenocysteine
  MOD_RES (19)..(19): Selenocysteine
  MOD_RES (23)..(23): Selenocysteine
  MOD_RES (34)..(34): Selenocysteine
  MOD_RES (63)..(64): Selenocysteine
  MOD_RES (89)..(89): Selenocysteine
MALLLALSLLVLWXSPAPXLSGXNDAEDCCLSVXQKPIPGYIVRNFHYLLIKDGCRVPAVVFXXLRGRQLCAPPDQPWVERIIQRLQRXSAKASLALPGPVSSL

SEQ ID NO: 5242 - protein, 98 aa, Homo sapiens
  MOD_RES (14)..(14): Selenocysteine
  MOD_RES (19)..(19): Selenocysteine
  MOD_RES (23)..(23): Selenocysteine
  MOD_RES (34)..(34): Selenocysteine
  MOD_RES (63)..(64): Selenocysteine
  MOD_RES (89)..(89): Selenocysteine
MALLLALSLLVLWXSPAPXLSGXNDAEDCCLSVXQKPIPGYIVRNFHYLLIKDGCRVPAVVFXXLRGRQLCAPPDQPWVERIIQRLQRXSAKMKRRSS

SEQ ID NO: 5243 - protein, 99 aa, Homo sapiens
  MOD_RES (16)..(16): Selenocysteine
  MOD_RES (33)..(33): Selenocysteine
  MOD_RES (39)..(39): Selenocysteine
  MOD_RES (55)..(55): Selenocysteine
  MOD_RES (68)..(68): Selenocysteine
  MOD_RES (94)..(94): Selenocysteine
  MOD_RES (96)..(96): Selenocysteine
  MOD_RES (99)..(99): Selenocysteine
MKVSAALLCLLLIAAXFIPQGLAQPDAINAPVXCCYNFXNRKISVQRLASYRRIXSSKCPKEAVIFKXIVAKEICADPKQKWVQDSMDHLDKQXQXPKX

SEQ ID NO: 5244 - protein, 65 aa, Homo sapiens
  MOD_RES (16)..(16): Selenocysteine
  MOD_RES (33)..(33): Selenocysteine
  MOD_RES (39)..(39): Selenocysteine
  MOD_RES (55)..(55): Selenocysteine
MKVSAALLCLLLIAAXFIPQGLAQPDAINAPVXCCYNFXNRKISVQRLASYRRIXSSKCPKEAVM

SEQ ID NO: 5245 - protein, 96 aa, Homo sapiens
  MOD_RES (4)..(4): Selenocysteine
  MOD_RES (37)..(37): Selenocysteine
  MOD_RES (50)..(50): Selenocysteine
  MOD_RES (67)..(67): Selenocysteine
  MOD_RES (80)..(80): Selenocysteine
MCCXKSLLLAALMSVLLLHLCGESEAASNFDCCLGYXDRILHPKFIVGFXRQLANEGCDINAIIFHXKKKLSVCANPKQXWVKYIVRLLSKKVKNM

SEQ ID NO: 5246 - protein, 95 aa, Homo sapiens
  MOD_RES (4)..(4): Selenocysteine
  MOD_RES (36)..(36): Selenocysteine
  MOD_RES (49)..(49): Selenocysteine
  MOD_RES (66)..(66): Selenocysteine
  MOD_RES (79)..(79): Selenocysteine
MCCXKSLLLAALMSVLLLHLCGESEASNFDCCLGYXDRILHPKFIVGFXRQLANEGCDINAIIFHXKKKLSVCANPKQXWVKYIVRLLSKKVKNM

SEQ ID NO: 5247 - protein, 124 aa, Homo sapiens
  MOD_RES (21)..(21): Selenocysteine
  MOD_RES (93)..(93): Selenocysteine
  MOD_RES (112)..(112): Selenocysteine
MAQSLALSLLILVLAFGIPRXQGSDGGAQDCCLKYSQRKIPAKVVRSYRKQEPSLGCSIPAILFLPRKRSQAELCADPKELWVQQLMQHLDKXPSPQKPAQGCRKDRGASKXGKKGKGSKGCKR

SEQ ID NO: 5248 - protein, 134 aa, Homo sapiens
  MOD_RES (21)..(21): Selenocysteine
  MOD_RES (93)..(93): Selenocysteine
  MOD_RES (112)..(112): Selenocysteine
  MOD_RES (125)..(125): Selenocysteine
  MOD_RES (130)..(130): Selenocysteine
MAQSLALSLLILVLAFGIPRXQGSDGGAQDCCLKYSQRKIPAKVVRSYRKQEPSLGCSIPAILFLPRKRSQAELCADPKELWVQQLMQHLDKXPSPQKPAQGCRKDRGASKXGKKGKGSKGCKRXERSQXPKGP

SEQ ID NO: 5249 - protein, 93 aa, Homo sapiens
  MOD_RES (6)..(6): Selenocysteine
  MOD_RES (22)..(22): Selenocysteine
  MOD_RES (56)..(56): Selenocysteine
  MOD_RES (69)..(69): Selenocysteine
MDRLQXALLVVLVLLAVALQAXEAGPYGANMEDSVCCRDYVRYRLPLRVVKHFYWXSDSCPRPGVVLLXFRDKEICADPRVPWVKMILNKLSQ

SEQ ID NO: 5250 - protein, 13 aa, Homo sapiens
  MOD_RES (3)..(3): Selenocysteine
FEXNSECSKPGVM

SEQ ID NO: 5251 - protein, 137 aa, Homo sapiens
  MOD_RES (15)..(15): Selenocysteine
  MOD_RES (24)..(24): Selenocysteine
  MOD_RES (29)..(29): Selenocysteine
  MOD_RES (57)..(57): Selenocysteine
  MOD_RES (67)..(67): Selenocysteine
  MOD_RES (76)..(76): Selenocysteine
  MOD_RES (91)..(91): Selenocysteine
  MOD_RES (104)..(104): Selenocysteine
  MOD_RES (130)..(130): Selenocysteine
  MOD_RES (134)..(134): Selenocysteine
MKVSVAALSCLMLVXALGSQARVXKDAEXEFMMSKLPLENPVLLDMLWRRKIGPQMXLSHAAGFHAXSADCCISYXPRSIPCSLLESYFEXNSECSKPGVIFLXKKGRRFCANPSDKQVQVCMRMLKLDXRIKXRKN

SEQ ID NO: 5252 - protein, 137 aa, Homo sapiens
  MOD_RES (15)..(15): Selenocysteine
  MOD_RES (24)..(24): Selenocysteine
  MOD_RES (29)..(29): Selenocysteine
  MOD_RES (57)..(57): Selenocysteine
  MOD_RES (67)..(67): Selenocysteine
  MOD_RES (76)..(76): Selenocysteine
  MOD_RES (91)..(91): Selenocysteine
  MOD_RES (104)..(104): Selenocysteine
  MOD_RES (130)..(130): Selenocysteine
  MOD_RES (134)..(134): Selenocysteine
MKVSVAALSCLMLVXALGSQARVXKDAEXEFMMSKLPLENPVLLDMLWRRKIGPQMXLSHAAGFHAXSADCCISYXPRSIPCSLLESYFEXNSECSKPGVIFLXKKGRRFCANPSDKQVQVCVRMLKLDXRIKXRKN

SEQ ID NO: 5253 - protein, 120 aa, Homo sapiens
  MOD_RES (15)..(15): Selenocysteine
  MOD_RES (24)..(24): Selenocysteine
  MOD_RES (29)..(29): Selenocysteine
  MOD_RES (50)..(50): Selenocysteine
  MOD_RES (59)..(59): Selenocysteine
  MOD_RES (74)..(74): Selenocysteine
  MOD_RES (87)..(87): Selenocysteine
  MOD_RES (113)..(113): Selenocysteine
  MOD_RES (117)..(117): Selenocysteine
MKVSVAALSCLMLVXALGSQARVXKDAEXEFMMSKLPLENPVLLDRFHAXSADCCISYXPRSIPCSLLESYFEXNSECSKPGVIFLXKKGRRFCANPSDKQVQVCMRMLKLDXRIKXRKN

SEQ ID NO: 5254 - protein, 120 aa, Homo sapiens
  MOD_RES (15)..(15): Selenocysteine
  MOD_RES (24)..(24): Selenocysteine
  MOD_RES (29)..(29): Selenocysteine
  MOD_RES (50)..(50): Selenocysteine
  MOD_RES (59)..(59): Selenocysteine
  MOD_RES (74)..(74): Selenocysteine
  MOD_RES (87)..(87): Selenocysteine
  MOD_RES (113)..(113): Selenocysteine
  MOD_RES (117)..(117): Selenocysteine
MKVSVAALSCLMLVXALGSQARVXKDAEXEFMMSKLPLENPVLLDRFHAXSADCCISYXPRSIPCSLLESYFEXNSECSKPGVIFLXKKGRRFCANPSDKQVQVCVRMLKLDXRIKXRKN

SEQ ID NO: 5255 - protein, 119 aa, Homo sapiens
  MOD_RES (6)..(6): Selenocysteine
  MOD_RES (9)..(9): Selenocysteine
  MOD_RES (24)..(24): Selenocysteine
  MOD_RES (57)..(57): Selenocysteine
  MOD_RES (66)..(67): Selenocysteine
  MOD_RES (117)..(118): Selenocysteine
MAGLMXIVXSLLFLGVCAHHIIPXGSVVIPSPCCMFFVSKRIPENRVVSYQLSSRSXCLKAGVIFXXKKGQQFCGDPKQEWVQRYMKNLDAKQKKASPRARAVAVKGPVQRYPGNQXXC

SEQ ID NO: 5256 - protein, 150 aa, Homo sapiens
  MOD_RES (23)..(23): Selenocysteine
  MOD_RES (48)..(48): Selenocysteine
  MOD_RES (104)..(104): Selenocysteine
  MOD_RES (106)..(106): Selenocysteine
MNLWLLACLVAGFLGAWAPAVHXQGVFEDCCLAYHYPIGWAVLRRAWXYRIQEVSGSCNLPAAIFYLPKRHRKVCGNPKSREVQRAMKLLDARNKVFAKLHHNXQXFQAGPHAVKKLSSGNSKLSSSKFSNPISSSKRNVSLLISANSGK

SEQ ID NO: 5257 - protein, 150 aa, Homo sapiens
  MOD_RES (23)..(23): Selenocysteine
  MOD_RES (48)..(48): Selenocysteine
  MOD_RES (104)..(104): Selenocysteine
  MOD_RES (106)..(106): Selenocysteine
MNLWLLACLVAGFLGAWAPAVHXQGVFEDCCLAYHYPIGWAVLRRAWXYRIQEVSGSCNLPAAIFYLPKRHRKVCGNPKSREVQRAMKLLDARNKVFAKLHHNXQXFQAGPHAVKKLSSGNSKLSSSKFSNPISSSKRNVSLLISANSGL

SEQ ID NO: 5258 - protein, 149 aa, Homo sapiens
  MOD_RES (23)..(23): Selenocysteine
  MOD_RES (48)..(48): Selenocysteine
  MOD_RES (104)..(104): Selenocysteine
  MOD_RES (106)..(106): Selenocysteine
MNLWLLACLVAGFLGAWAPAVHXQGVFEDCCLAYHYPIGWAVLRRAWXYRIQEVSGSCNLPAAIFYLPKRHRKVCGNPKSREVQRAMKLLDARNKVFAKLHHNXQXFQGPHAVKKLSSGNSKLSSSKFSNPISSSKRNVSLLISANSGL

SEQ ID NO: 5259 - protein, 84 aa, Homo sapiens
  MOD_RES (23)..(23): Selenocysteine
  MOD_RES (48)..(48): Selenocysteine
MNLWLLACLVAGFLGAWAPAVHXQGVFEDCCLAYHYPIGWAVLRRAWXYRIQEVSGSCNLPAAIRPSCCKEVEFWKLQVIIVQV

SEQ ID NO: 5260 - protein, 94 aa, Homo sapiens
  MOD_RES (22)..(22): Selenocysteine
  MOD_RES (24)..(24): Selenocysteine
  MOD_RES (32)..(32): Selenocysteine
  MOD_RES (45)..(45): Selenocysteine
  MOD_RES (53)..(53): Selenocysteine
  MOD_RES (65)..(66): Selenocysteine
  MOD_RES (74)..(74): Selenocysteine
  MOD_RES (90)..(90): Selenocysteine
MMGLSLASAVLLASLLSLHLGXAXRGSDISKXCCFQYSHKPLPWXWVRSYEFXSNSCSQRAVIFXXKRGKKVCXHPRKKWVQKYISLLKXPKQL

SEQ ID NO: 5261 - protein, 112 aa, Homo sapiens
  MOD_RES (6)..(6): Selenocysteine
  MOD_RES (22)..(22): Selenocysteine
  MOD_RES (31)..(31): Selenocysteine
  MOD_RES (35)..(35): Selenocysteine
  MOD_RES (99)..(99): Selenocysteine
MKGPPXFCSLLLLSLLLSPDPXAAFLLPPSXACCXQLYRKPLSDKLLRKVIQVELQEADGDCHLQAFVLHLAQRSICIHPQNPSLSQWFEHQERKLHGXLPKLNFGMLRKMG

SEQ ID NO: 5262 - protein, 92 aa, Homo sapiens
  MOD_RES (5)..(5): Selenocysteine
  MOD_RES (14)..(14): Selenocysteine
  MOD_RES (29)..(29): Selenocysteine
  MOD_RES (31)..(31): Selenocysteine
  MOD_RES (38)..(38): Selenocysteine
  MOD_RES (53)..(53): Selenocysteine
  MOD_RES (66)..(66): Selenocysteine
MQVSXAALAVLLCXMALCNQFSASLAADXPXACCFSYXSRQIPQNFIADYFEXSSQCSKPGVIFLXKRSRQVCADPSEEWVQKYVSDLELSA

SEQ ID NO: 5263 - protein, 93 aa, Homo sapiens
  MOD_RES (5)..(5): Selenocysteine
  MOD_RES (14)..(14): Selenocysteine
  MOD_RES (30)..(30): Selenocysteine
  MOD_RES (32)..(32): Selenocysteine
  MOD_RES (39)..(39): Selenocysteine
  MOD_RES (54)..(54): Selenocysteine
  MOD_RES (67)..(67): Selenocysteine
MQVSXAALAVLLCXMALCNQVLSAPLAADXPXACCFSYXSRQIPQNFIADYFEXSSQCSKPSVIFLXKRGRQVCADPSEEWVQKYVSDLELSA

SEQ ID NO: 5264 - protein, 92 aa, Homo sapiens
  MOD_RES (6)..(6): Selenocysteine
  MOD_RES (32)..(32): Selenocysteine
  MOD_RES (39)..(39): Selenocysteine
  MOD_RES (54)..(54): Selenocysteine
  MOD_RES (67)..(67): Selenocysteine
MKLCVXVLSLLMLVAAFCSPALSAPMGSDPPXACCFSYXARKLPRNFVVDYYEXSSLCSQPAVVFQXKRSKQVCADPSESWVQEYVYDLELN

SEQ ID NO: 5265 - protein, 52 aa, Homo sapiens
  MOD_RES (6)..(6): Selenocysteine
  MOD_RES (47)..(47): Selenocysteine
  MOD_RES (50)..(50): Selenocysteine
MKLCVXVLSLLMLVAAFCSPALSAPNSKPKEASKSVLIPVNPGSRSXCMXWN

SEQ ID NO: 5266 - protein, 47 aa, Homo sapiens
  MOD_RES (6)..(6): Selenocysteine
  MOD_RES (33)..(33): Selenocysteine
  MOD_RES (42)..(42): Selenocysteine
  MOD_RES (45)..(45): Selenocysteine
MKLCVXVLSLLVLVAAFCSLALSAPKASKSALXPVSPGSRSXCMXWN

SEQ ID NO: 5267 - protein, 92 aa, Homo sapiens
  MOD_RES (6)..(6): Selenocysteine
  MOD_RES (32)..(32): Selenocysteine
  MOD_RES (39)..(39): Selenocysteine
  MOD_RES (54)..(54): Selenocysteine
MKLCVXVLSLLVLVAAFCSLALSAPMGSDPPXACCFSYXARKLPRNFVVDYYEXSSLCSQPAVPWDSNLGKQVCADPSESWVQEYVYDLELN

SEQ ID NO: 5268 - protein, 64 aa, Homo sapiens
  MOD_RES (6)..(6): Selenocysteine
  MOD_RES (32)..(32): Selenocysteine
  MOD_RES (39)..(39): Selenocysteine
  MOD_RES (54)..(54): Selenocysteine
MKLCVXVLSLLVLVAAFCSLALSAPMGSDPPXACCFSYXARKLPRNFVVDYYEXSSLCSQPAVV

SEQ ID NO: 5269 - protein, 96 aa, Homo sapiens
  MOD_RES (6)..(6): Selenocysteine
  MOD_RES (32)..(32): Selenocysteine
  MOD_RES (39)..(39): Selenocysteine
  MOD_RES (54)..(54): Selenocysteine
  MOD_RES (73)..(73): Selenocysteine
MKLCVXVLSLLVLVAAFCSLALSAPMGSDPPXACCFSYXARKLPRNFVVDYYEXSSLCSQPAVVAAPGRIPSXRAAPHGPWSGRGRCLPQARDKAR

SEQ ID NO: 5270 - protein, 86 aa, Homo sapiens
  MOD_RES (6)..(6): Selenocysteine
  MOD_RES (32)..(32): Selenocysteine
  MOD_RES (39)..(39): Selenocysteine
  MOD_RES (54)..(54): Selenocysteine
MKLCVXVLSLLVLVAAFCSLALSAPMGSDPPXACCFSYXARKLPRNFVVDYYEXSSLCSQPAVVAAPHGPWSGRGRCLPQARDKAR

SEQ ID NO: 5271 - protein, 96 aa, Homo sapiens
  MOD_RES (6)..(6): Selenocysteine
  MOD_RES (32)..(32): Selenocysteine
  MOD_RES (39)..(39): Selenocysteine
  MOD_RES (54)..(54): Selenocysteine
  MOD_RES (73)..(73): Selenocysteine
MKLCVXVLSLLVLVAAFCSLALSAPMGSDPPXACCFSYXARKLPRNFVVDYYEXSSLCSQPAVVAARGRIPSXRAAPHGPWSGRGRCLPQARDKAR

SEQ ID NO: 5272 - protein, 103 aa, Homo sapiens
  MOD_RES (6)..(6): Selenocysteine
  MOD_RES (32)..(32): Selenocysteine
  MOD_RES (39)..(39): Selenocysteine
  MOD_RES (54)..(54): Selenocysteine
  MOD_RES (88)..(88): Selenocysteine
  MOD_RES (90)..(90): Selenocysteine
  MOD_RES (99)..(100): Selenocysteine
MKLCVXVLSLLVLVAAFCSLALSAPMGSDPPXACCFSYXARKLPRNFVVDYYEXSSLCSQPAVVEWKLQGVCFQCCSGKDPIHQSCPXWXMVRQRKMPXXGKG

SEQ ID NO: 5273 - protein, 103 aa, Homo sapiens
  MOD_RES (6)..(6): Selenocysteine
  MOD_RES (32)..(32): Selenocysteine
  MOD_RES (39)..(39): Selenocysteine
  MOD_RES (54)..(54): Selenocysteine
  MOD_RES (88)..(88): Selenocysteine
  MOD_RES (90)..(90): Selenocysteine
  MOD_RES (99)..(100): Selenocysteine
MKLCVXVLSLLVLVAAFCSLALSAPMGSDPPXACCFSYXARKLPRNFVVDYYEXSSLCSQPAVVEWKLQGVCFQCCSRKDPIHQSCPXWXMVRQRKMPXXGKG

SEQ ID NO: 5274 - protein, 92 aa, Homo sapiens
  MOD_RES (6)..(6): Selenocysteine
  MOD_RES (32)..(32): Selenocysteine
  MOD_RES (39)..(39): Selenocysteine
  MOD_RES (54)..(54): Selenocysteine
  MOD_RES (67)..(67): Selenocysteine
MKLCVXVLSLLVLVAAFCSLALSAPMGSDPPXACCFSYXARKLPRNFVVDYYEXSSLCSQPAVVFQXKRGKQVCADPSESWVQEYVYDLELN

SEQ ID NO: 5275 - protein, 87 aa, Homo sapiens
  MOD_RES (6)..(6): Selenocysteine
  MOD_RES (32)..(32): Selenocysteine
  MOD_RES (39)..(39): Selenocysteine
  MOD_RES (54)..(54): Selenocysteine
MKLCVXVLSLLVLVAAFCSLALSAPMGSDPPXACCFSYXARKLPRNFVVDYYEXSSLCSQPAVVGKQVCADPSESWVQEYVYDLELN

SEQ ID NO: 5276 - protein, 103 aa, Homo sapiens
  MOD_RES (6)..(6): Selenocysteine
  MOD_RES (32)..(32): Selenocysteine
  MOD_RES (39)..(39): Selenocysteine
  MOD_RES (54)..(54): Selenocysteine
  MOD_RES (80)..(80): Selenocysteine
MKLCVXVLSLLVLVAAFCSLALSAPMGSDPPXACCFSYXARKLPRNFVVDYYEXSSLCSQPAVVYRESASSAAPGRIPSXRAAPHGPWSGRGRCLPQARDKAR

SEQ ID NO: 5277 - protein, 103 aa, Homo sapiens
  MOD_RES (6)..(6): Selenocysteine
  MOD_RES (32)..(32): Selenocysteine
  MOD_RES (39)..(39): Selenocysteine
  MOD_RES (54)..(54): Selenocysteine
  MOD_RES (80)..(80): Selenocysteine
MKLCVXVLSLLVLVAAFCSLALSAPMGSDPPXACCFSYXARKLPRNFVVDYYEXSSLCSQPAVVYRESASSAARGRIPSXRAAPHGPWSGRGRCLPQARDKAR

SEQ ID NO: 5278 - protein, 68 aa, Homo sapiens
  MOD_RES (6)..(6): Selenocysteine
  MOD_RES (26)..(26): Selenocysteine
  MOD_RES (53)..(53): Selenocysteine
  MOD_RES (55)..(55): Selenocysteine
  MOD_RES (64)..(65): Selenocysteine
MKLCVXVLSLLVLVAAFCSLALSAPXKSSEWKLQGVCFQCCSGKDPIHQSCPXWXMVRQRKMPXXGKG

SEQ ID NO: 5279 - protein, 68 aa, Homo sapiens
  MOD_RES (6)..(6): Selenocysteine
  MOD_RES (26)..(26): Selenocysteine
  MOD_RES (53)..(53): Selenocysteine
  MOD_RES (55)..(55): Selenocysteine
  MOD_RES (64)..(65): Selenocysteine
MKLCVXVLSLLVLVAAFCSLALSAPXKSSEWKLQGVCFQCCSRKDPIHQSCPXWXMVRQRKMPXXGKG

SEQ ID NO: 5280 - protein, 91 aa, Homo sapiens
  MOD_RES (15)..(15): Selenocysteine
  MOD_RES (30)..(31): Selenocysteine
  MOD_RES (53)..(53): Selenocysteine
  MOD_RES (66)..(66): Selenocysteine
MKVSAAALAVILIAXALCAPASASPYSSDXXPCCFAYIARPLPRAHIKEYFYXSGKCSNPAVVFVXRKNRQVCANPEKKWVREYINSLEMS

SEQ ID NO: 5281 - protein, 150 aa, Homo sapiens
  MOD_RES (1)..(1): Any amino acid
  MOD_RES (11)..(11): Selenocysteine
  MOD_RES (26)..(27): Selenocysteine
  MOD_RES (49)..(49): Selenocysteine
  MOD_RES (125)..(125): Selenocysteine
  MOD_RES (146)..(146): Selenocysteine
XAALAVILIAXALCAPASASPYSSDXXPCCFAYIARPLPRAHIKEYFYXSGKCSNPAVVHRSRMPKREGQQVWQDFLYDSRLNKGKLCHPKEPPSVCQPREEMGSGVHQLFGDELGWRVLEPELXQICLFLLALVLAWEASPHYPXPPAP

SEQ ID NO: 5282 - protein, 47 aa, Homo sapiens
  MOD_RES (13)..(13): Selenocysteine
  MOD_RES (32)..(32): Selenocysteine
  MOD_RES (38)..(38): Selenocysteine
  MOD_RES (46)..(46): Selenocysteine
MKASAALLCLLLXAAAFSPQGLAQPASRPNWXRRSVLXPHRSGSRXL

SEQ ID NO: 5283 - protein, 81 aa, Homo sapiens
  MOD_RES (13)..(13): Selenocysteine
  MOD_RES (30)..(30): Selenocysteine
  MOD_RES (35)..(35): Selenocysteine
  MOD_RES (54)..(54): Selenocysteine
  MOD_RES (69)..(69): Selenocysteine
  MOD_RES (76)..(76): Selenocysteine
MKASAALLCLLLXAAAFSPQGLAQPERPRXHPQWXFLLVVSLQLGLILQLPAAXDLSIRKSLSRGWRAXEGPPVAXVPGKL

SEQ ID NO: 5284 - protein, 99 aa, Homo sapiens
  MOD_RES (13)..(13): Selenocysteine
  MOD_RES (30)..(30): Selenocysteine
  MOD_RES (32)..(33): Selenocysteine
  MOD_RES (54)..(55): Selenocysteine
  MOD_RES (68)..(68): Selenocysteine
  MOD_RES (79)..(79): Selenocysteine
  MOD_RES (94)..(94): Selenocysteine
  MOD_RES (96)..(96): Selenocysteine
MKASAALLCLLLXAAAFSPQGLAQPVGINXSXXCCYRFINKKIPKQRLESYRRXXSSHCPREAVIFKXKLDKEICADPXQKWVQDFMKHLDKKXQXPKL

SEQ ID NO: 5285 - protein, 99 aa, Homo sapiens
  MOD_RES (16)..(16): Selenocysteine
  MOD_RES (33)..(33): Selenocysteine
  MOD_RES (52)..(52): Selenocysteine
  MOD_RES (55)..(55): Selenocysteine
  MOD_RES (68)..(68): Selenocysteine
MKVSAALLCLLLMAAXFSPQGLAQPDSVSIPIXCCFNVINRKIPIQRLESYXRIXNIQCPKEAVIFKXKRGKEVCADPKERWVRDSMKHLDQIFQNLKP

SEQ ID NO: 5286 - protein, 271 aa, Homo sapiens
  MOD_RES (37)..(37): Selenocysteine
  MOD_RES (44)..(44): Selenocysteine
  MOD_RES (74)..(74): Selenocysteine
  MOD_RES (86)..(86): Selenocysteine
  MOD_RES (106)..(106): Selenocysteine
  MOD_RES (157)..(157): Selenocysteine
  MOD_RES (222)..(222): Selenocysteine
  MOD_RES (225)..(225): Selenocysteine
  MOD_RES (239)..(239): Selenocysteine
  MOD_RES (241)..(241): Selenocysteine
  MOD_RES (263)..(263): Selenocysteine
MEEEGKKGKKPGIVSPFKRVFLKGEKSRDKKAHEKVXERRPLHXVVLSLPERVEPDRLLSDYIEKEVKYLGQLXSIPGYLNPSSRXEILHFIDNAKRAHQLPGHLXQEHDAVLSLSAYNVKLAWRDGEDIILRVPIHDIAAVSYVRDDAAHLVVLKXAQDPGISPSQSLCAESSRGLSAGSLSESAVGPVEACCLVILAAESKVAAEELCCLLGQVFQVVYXESXIDFLDRAIFDGASXPXHHLSLHSAASLNLWMWVVHHPXARPSVRAS

SEQ ID NO: 5287 - protein, 444 aa, Homo sapiens
  MOD_RES (37)..(37): Selenocysteine
  MOD_RES (44)..(44): Selenocysteine
  MOD_RES (74)..(74): Selenocysteine
  MOD_RES (86)..(86): Selenocysteine
  MOD_RES (106)..(106): Selenocysteine
  MOD_RES (157)..(157): Selenocysteine
  MOD_RES (222)..(222): Selenocysteine
  MOD_RES (225)..(225): Selenocysteine
  MOD_RES (239)..(239): Selenocysteine
  MOD_RES (241)..(241): Selenocysteine
  MOD_RES (253)..(253): Selenocysteine
  MOD_RES (260)..(260): Selenocysteine
  MOD_RES (267)..(267): Selenocysteine
  MOD_RES (285)..(285): Selenocysteine
  MOD_RES (296)..(296): Selenocysteine
  MOD_RES (305)..(305): Selenocysteine
  MOD_RES (308)..(308): Selenocysteine
  MOD_RES (371)..(371): Selenocysteine
  MOD_RES (382)..(382): Selenocysteine
  MOD_RES (394)..(395): Selenocysteine
  MOD_RES (399)..(400): Selenocysteine
  MOD_RES (406)..(406): Selenocysteine
MEEEGKKGKKPGIVSPFKRVFLKGEKSRDKKAHEKVXERRPLHXVVLSLPERVEPDRLLSDYIEKEVKYLGQLXSIPGYLNPSSRXEILHFIDNAKRAHQLPGHLXQEHDAVLSLSAYNVKLAWRDGEDIILRVPIHDIAAVSYVRDDAAHLVVLKXAQDPGISPSQSLCAESSRGLSAGSLSESAVGPVEACCLVILAAESKVAAEELCCLLGQVFQVVYXESXIDFLDRAIFDGASXPXHHLSLHSDDSSXKVDIKEXYEVEASXFCFPESVDVGGASPHSKXISESELSASAXELLQDYMLXLRXKLSSQEIQQFAALLHEYRNGASIHEFCINLRQLYGDSRKFLLLGLRPFIPEKDSQHFENFLEXIGVKDGRGIIXDSFGRHRRALSXXSSSXXNGNRAXGSSDDRSAPSEGDEWDRMISDISSDIEALGCSMDQDSA

SEQ ID NO: 5288 - protein, 353 aa, Homo sapiens
  MOD_RES (37)..(37): Selenocysteine
  MOD_RES (44)..(44): Selenocysteine
  MOD_RES (74)..(74): Selenocysteine
  MOD_RES (86)..(86): Selenocysteine
  MOD_RES (106)..(106): Selenocysteine
  MOD_RES (157)..(157): Selenocysteine
  MOD_RES (162)..(162): Selenocysteine
  MOD_RES (169)..(169): Selenocysteine
  MOD_RES (176)..(176): Selenocysteine
  MOD_RES (194)..(194): Selenocysteine
  MOD_RES (205)..(205): Selenocysteine
  MOD_RES (214)..(214): Selenocysteine
  MOD_RES (217)..(217): Selenocysteine
  MOD_RES (280)..(280): Selenocysteine
  MOD_RES (291)..(291): Selenocysteine
  MOD_RES (303)..(304): Selenocysteine
  MOD_RES (308)..(309): Selenocysteine
  MOD_RES (315)..(315): Selenocysteine
MEEEGKKGKKPGIVSPFKRVFLKGEKSRDKKAHEKVXERRPLHXVVLSLPERVEPDRLLSDYIEKEVKYLGQLXSIPGYLNPSSRXEILHFIDNAKRAHQLPGHLXQEHDAVLSLSAYNVKLAWRDGEDIILRVPIHDIAAVSYVRDDAAHLVVLKXDDSSXKVDIKEXYEVEASXFCFPESVDVGGASPHSKXISESELSASAXELLQDYMLXLRXKLSSQEIQQFAALLHEYRNGASIHEFCINLRQLYGDSRKFLLLGLRPFIPEKDSQHFENFLEXIGVKDGRGIIXDSFGRHRRALSXXSSSXXNGNRAXGSSDDRSAPSEGDEWDRMISDISSDIEALGCSMDQDSA

SEQ ID NO: 5289 - protein, 386 aa, Homo sapiens
  MOD_RES (16)..(16): Selenocysteine
  MOD_RES (28)..(28): Selenocysteine
  MOD_RES (48)..(48): Selenocysteine
  MOD_RES (99)..(99): Selenocysteine
  MOD_RES (164)..(164): Selenocysteine
  MOD_RES (167)..(167): Selenocysteine
  MOD_RES (181)..(181): Selenocysteine
  MOD_RES (183)..(183): Selenocysteine
  MOD_RES (195)..(195): Selenocysteine
  MOD_RES (202)..(202): Selenocysteine
  MOD_RES (209)..(209): Selenocysteine
  MOD_RES (227)..(227): Selenocysteine
  MOD_RES (238)..(238): Selenocysteine
  MOD_RES (247)..(247): Selenocysteine
  MOD_RES (250)..(250): Selenocysteine
  MOD_RES (313)..(313): Selenocysteine
  MOD_RES (324)..(324): Selenocysteine
  MOD_RES (336)..(337): Selenocysteine
  MOD_RES (341)..(342): Selenocysteine
  MOD_RES (348)..(348): Selenocysteine
MEEEGKKGKKYLGQLXSIPGYLNPSSRXEILHFIDNAKRAHQLPGHLXQEHDAVLSLSAYNVKLAWRDGEDIILRVPIHDIAAVSYVRDDAAHLVVLKXAQDPGISPSQSLCAESSRGLSAGSLSESAVGPVEACCLVILAAESKVAAEELCCLLGQVFQVVYXESXIDFLDRAIFDGASXPXHHLSLHSDDSSXKVDIKEXYEVEASXFCFPESVDVGGASPHSKXISESELSASAXELLQDYMLXLRXKLSSQEIQQFAALLHEYRNGASIHEFCINLRQLYGDSRKFLLLGLRPFIPEKDSQHFENFLEXIGVKDGRGIIXDSFGRHRRALSXXSSSXXNGNRAXGSSDDRSAPSEGDEWDRMISDISSDIEALGCSMDQDSA

SEQ ID NO: 5290 - protein, 438 aa, Homo sapiens
  MOD_RES (31)..(31): Selenocysteine
  MOD_RES (38)..(38): Selenocysteine
  MOD_RES (68)..(68): Selenocysteine
  MOD_RES (80)..(80): Selenocysteine
  MOD_RES (100)..(100): Selenocysteine
  MOD_RES (151)..(151): Selenocysteine
  MOD_RES (216)..(216): Selenocysteine
  MOD_RES (219)..(219): Selenocysteine
  MOD_RES (233)..(233): Selenocysteine
  MOD_RES (235)..(235): Selenocysteine
  MOD_RES (247)..(247): Selenocysteine
  MOD_RES (254)..(254): Selenocysteine
  MOD_RES (261)..(261): Selenocysteine
  MOD_RES (279)..(279): Selenocysteine
  MOD_RES (290)..(290): Selenocysteine
  MOD_RES (299)..(299): Selenocysteine
  MOD_RES (302)..(302): Selenocysteine
  MOD_RES (365)..(365): Selenocysteine
  MOD_RES (376)..(376): Selenocysteine
  MOD_RES (388)..(389): Selenocysteine
  MOD_RES (393)..(394): Selenocysteine
  MOD_RES (400)..(400): Selenocysteine
MENEPGIVSPFKRVFLKGEKSRDKKAHEKVXERRPLHXVVLSLPERVEPDRLLSDYIEKEVKYLGQLXSIPGYLNPSSRXEILHFIDNAKRAHQLPGHLXQEHDAVLSLSAYNVKLAWRDGEDIILRVPIHDIAAVSYVRDDAAHLVVLKXAQDPGISPSQSLCAESSRGLSAGSLSESAVGPVEACCLVILAAESKVAAEELCCLLGQVFQVVYXESXIDFLDRAIFDGASXPXHHLSLHSDDSSXKVDIKEXYEVEASXFCFPESVDVGGASPHSKXISESELSASAXELLQDYMLXLRXKLSSQEIQQFAALLHEYRNGASIHEFCINLRQLYGDSRKFLLLGLRPFIPEKDSQHFENFLEXIGVKDGRGIIXDSFGRHRRALSXXSSSXXNGNRAXGSSDDRSAPSEGDEWDRMISDISSDIEALGCSMDQDSA

SEQ ID NO: 5291 - protein, 347 aa, Homo sapiens
  MOD_RES (31)..(31): Selenocysteine
  MOD_RES (38)..(38): Selenocysteine
  MOD_RES (68)..(68): Selenocysteine
  MOD_RES (80)..(80): Selenocysteine
  MOD_RES (100)..(100): Selenocysteine
  MOD_RES (151)..(151): Selenocysteine
  MOD_RES (156)..(156): Selenocysteine
  MOD_RES (163)..(163): Selenocysteine
  MOD_RES (170)..(170): Selenocysteine
  MOD_RES (188)..(188): Selenocysteine
  MOD_RES (199)..(199): Selenocysteine
  MOD_RES (208)..(208): Selenocysteine
  MOD_RES (211)..(211): Selenocysteine
  MOD_RES (274)..(274): Selenocysteine
  MOD_RES (285)..(285): Selenocysteine
  MOD_RES (297)..(298): Selenocysteine
  MOD_RES (302)..(303): Selenocysteine
  MOD_RES (309)..(309): Selenocysteine
MENEPGIVSPFKRVFLKGEKSRDKKAHEKVXERRPLHXVVLSLPERVEPDRLLSDYIEKEVKYLGQLXSIPGYLNPSSRXEILHFIDNAKRAHQLPGHLXQEHDAVLSLSAYNVKLAWRDGEDIILRVPIHDIAAVSYVRDDAAHLVVLKXDDSSXKVDIKEXYEVEASXFCFPESVDVGGASPHSKXISESELSASAXELLQDYMLXLRXKLSSQEIQQFAALLHEYRNGASIHEFCINLRQLYGDSRKFLLLGLRPFIPEKDSQHFENFLEXIGVKDGRGIIXDSFGRHRRALSXXSSSXXNGNRAXGSSDDRSAPSEGDEWDRMISDISSDIEALGCSMDQDSA

SEQ ID NO: 5292 - protein, 465 aa, Homo sapiens
  MOD_RES (20)..(20): Selenocysteine
  MOD_RES (24)..(24): Selenocysteine
  MOD_RES (58)..(58): Selenocysteine
  MOD_RES (65)..(65): Selenocysteine
  MOD_RES (95)..(95): Selenocysteine
  MOD_RES (107)..(107): Selenocysteine
  MOD_RES (127)..(127): Selenocysteine
  MOD_RES (178)..(178): Selenocysteine
  MOD_RES (243)..(243): Selenocysteine
  MOD_RES (246)..(246): Selenocysteine
  MOD_RES (260)..(260): Selenocysteine
  MOD_RES (262)..(262): Selenocysteine
  MOD_RES (274)..(274): Selenocysteine
  MOD_RES (281)..(281): Selenocysteine
  MOD_RES (288)..(288): Selenocysteine
  MOD_RES (306)..(306): Selenocysteine
  MOD_RES (317)..(317): Selenocysteine
  MOD_RES (326)..(326): Selenocysteine
  MOD_RES (329)..(329): Selenocysteine
  MOD_RES (392)..(392): Selenocysteine
  MOD_RES (403)..(403): Selenocysteine
  MOD_RES (415)..(416): Selenocysteine
  MOD_RES (420)..(421): Selenocysteine
  MOD_RES (427)..(427): Selenocysteine
MHSSCRQRRNQNLSKEIPQXEFHXGYSMENEPGIVSPFKRVFLKGEKSRDKKAHEKVXERRPLHXVVLSLPERVEPDRLLSDYIEKEVKYLGQLXSIPGYLNPSSRXEILHFIDNAKRAHQLPGHLXQEHDAVLSLSAYNVKLAWRDGEDIILRVPIHDIAAVSYVRDDAAHLVVLKXAQDPGISPSQSLCAESSRGLSAGSLSESAVGPVEACCLVILAAESKVAAEELCCLLGQVFQVVYXESXIDFLDRAIFDGASXPXHHLSLHSDDSSXKVDIKEXYEVEASXFCFPESVDVGGASPHSKXISESELSASAXELLQDYMLXLRXKLSSQEIQQFAALLHEYRNGASIHEFCINLRQLYGDSRKFLLLGLRPFIPEKDSQHFENFLEXIGVKDGRGIIXDSFGRHRRALSXXSSSXXNGNRAXGSSDDRSAPSEGDEWDRMISDISSDIEALGCSMDQDSA

SEQ ID NO: 5293 - protein, 135 aa, Homo sapiens
  MOD_RES (1)..(1): Any amino acid
  MOD_RES (48)..(48): Selenocysteine
  MOD_RES (51)..(51): Selenocysteine
  MOD_RES (65)..(65): Selenocysteine
  MOD_RES (67)..(67): Selenocysteine
  MOD_RES (79)..(79): Selenocysteine
  MOD_RES (82)..(82): Selenocysteine
  MOD_RES (84)..(84): Selenocysteine
  MOD_RES (97)..(97): Selenocysteine
  MOD_RES (101)..(101): Selenocysteine
  MOD_RES (120)..(120): Selenocysteine
  MOD_RES (127)..(127): Selenocysteine
  MOD_RES (134)..(134): Selenocysteine
XGLSAGSLSESAVGPVEACCLVILAAESKVAAEELCCLLGQVFQVVYXESXIDFLDRAIFDGASXPXHHLSLHSASHVXSSXVXSSFDCQLPLHFRXLAIXLSPPKFSRVISLFQDDSSXKVDIKEXYEVEASXL

SEQ ID NO: 5294 - protein, 432 aa, Homo sapiens
  MOD_RES (11)..(11): Selenocysteine
  MOD_RES (24)..(24): Selenocysteine
  MOD_RES (46)..(46): Selenocysteine
  MOD_RES (69)..(69): Selenocysteine
  MOD_RES (86)..(86): Selenocysteine
  MOD_RES (100)..(100): Selenocysteine
  MOD_RES (157)..(157): Selenocysteine
  MOD_RES (184)..(184): Selenocysteine
  MOD_RES (207)..(207): Selenocysteine
  MOD_RES (231)..(231): Selenocysteine
  MOD_RES (258)..(258): Selenocysteine
  MOD_RES (282)..(282): Selenocysteine
  MOD_RES (285)..(285): Selenocysteine
  MOD_RES (287)..(287): Selenocysteine
  MOD_RES (303)..(303): Selenocysteine
  MOD_RES (310)..(310): Selenocysteine
  MOD_RES (316)..(316): Selenocysteine
  MOD_RES (366)..(366): Selenocysteine
  MOD_RES (368)..(368): Selenocysteine
  MOD_RES (380)..(380): Selenocysteine
  MOD_RES (383)..(383): Selenocysteine
  MOD_RES (397)..(397): Selenocysteine
  MOD_RES (429)..(429): Selenocysteine
MLGNSAPGPAXREAGSALLALQQXALQEDQENINPEKAAPVQQPRXRAALAVLKSGNPRGLAQQQRPKXRRVAPLKDLPVNDEHVXVPPWKANSKQPAFXIHVDEAEKEAQKKPAESQKIEREDALAFNSAISLPGPRKPLVPLDYPMDGSFESPHXMDMSIILEDEKPVSVNEVPDYHEDIHXYLREMEVKCKPKVGYMKKQPDIXNSMRAILVDWLVEVGEEYKLQNEXLHLAVNYIDRFLSSMSVLRGKLQLVGXAAMLLASKFEEIYPPEVAEFVYIXDDXYXKKQVLRMEHLVLKVLXFDLAAPXVNQFLXQYFLHQQPANCKVESLAMFLGELSLIDADPYLKYLPSVIAGAAFHLALYXVXGQSWPESLIRKXGYXLESLKPCLMDLHQXYLKAPQHAQQSIREKYKNSKYHGVSLLNPPEXLNL

SEQ ID NO: 5295 - protein, 61 aa, Homo sapiens
  MOD_RES (5)..(5): Selenocysteine
  MOD_RES (14)..(14): Selenocysteine
  MOD_RES (51)..(51): Selenocysteine
ALRVXRVSRFGLRXNAAFLAAACSPCLACGSLPSGRGPQERFGEEGGRGLXKRAPRWAQAW

SEQ ID NO: 5296 - protein, 396 aa, Homo sapiens
  MOD_RES (6)..(6): Selenocysteine
  MOD_RES (29)..(29): Selenocysteine
  MOD_RES (34)..(34): Selenocysteine
  MOD_RES (43)..(43): Selenocysteine
  MOD_RES (71)..(71): Selenocysteine
  MOD_RES (124)..(124): Selenocysteine
  MOD_RES (132)..(132): Selenocysteine
  MOD_RES (198)..(198): Selenocysteine
  MOD_RES (222)..(222): Selenocysteine
  MOD_RES (226)..(226): Selenocysteine
  MOD_RES (250)..(250): Selenocysteine
  MOD_RES (273)..(273): Selenocysteine
  MOD_RES (276)..(276): Selenocysteine
  MOD_RES (278)..(278): Selenocysteine
  MOD_RES (321)..(321): Selenocysteine
  MOD_RES (330)..(330): Selenocysteine
  MOD_RES (362)..(362): Selenocysteine
  MOD_RES (369)..(369): Selenocysteine
  MOD_RES (377)..(377): Selenocysteine
MALRVXRNSKINAENKAKINMAGAKRVPXAPAAXSKPGLRPRXALGDIGNKVSEQLQAKMPMKKEAKPSAXGKVIDKKLPKPLEKVPMLVPVPVSEPVPEPEPEPEPEPVKEEKLSPEPILVDXASPSPMEXSGCAPAEEDLCQAFSDVILAVNDVDAEDGADPNLCSEYVKDIYAYLRQLEEEQAVRPKYLLGREVXGNMRAILIDWLVQVQMKFRLLQEXMYMXVSIIDRFMQNNCVPKKMLQLVGVXAMFIASKYEEMYPPEIGDFAFVXDNXYXKHQIRQMEMKILRALNFGLGRPLPLHFLRRASKIGEVDVEQHXLAKYLMELXMLDYDMVHFPPSQIAAGAFCLALKILDNGEWXVKNKYAXSKHAKISXLPQLNSALVQDLAKAVAKV

SEQ ID NO: 5297 - protein, 401 aa, Homo sapiens
  MOD_RES (6)..(6): Selenocysteine
  MOD_RES (29)..(29): Selenocysteine
  MOD_RES (34)..(34): Selenocysteine
  MOD_RES (43)..(43): Selenocysteine
  MOD_RES (71)..(71): Selenocysteine
  MOD_RES (124)..(124): Selenocysteine
  MOD_RES (132)..(132): Selenocysteine
  MOD_RES (198)..(198): Selenocysteine
  MOD_RES (222)..(222): Selenocysteine
  MOD_RES (226)..(226): Selenocysteine
  MOD_RES (250)..(250): Selenocysteine
  MOD_RES (273)..(273): Selenocysteine
  MOD_RES (276)..(276): Selenocysteine
  MOD_RES (278)..(278): Selenocysteine
  MOD_RES (321)..(321): Selenocysteine
  MOD_RES (330)..(330): Selenocysteine
  MOD_RES (362)..(362): Selenocysteine
  MOD_RES (364)..(364): Selenocysteine
  MOD_RES (372)..(372): Selenocysteine
  MOD_RES (395)..(395): Selenocysteine
MALRVXRNSKINAENKAKINMAGAKRVPXAPAAXSKPGLRPRXALGDIGNKVSEQLQAKMPMKKEAKPSAXGKVIDKKLPKPLEKVPMLVPVPVSEPVPEPEPEPEPEPVKEEKLSPEPILVDXASPSPMEXSGCAPAEEDLCQAFSDVILAVNDVDAEDGADPNLCSEYVKDIYAYLRQLEEEQAVRPKYLLGREVXGNMRAILIDWLVQVQMKFRLLQEXMYMXVSIIDRFMQNNCVPKKMLQLVGVXAMFIASKYEEMYPPEIGDFAFVXDNXYXKHQIRQMEMKILRALNFGLGRPLPLHFLRRASKIGEVDVEQHXLAKYLMELXMLDYDMVHFPPSQIAAGAFCLALKILDNGEWXPXLQHYLSYXEESLLPVMQHLAKNVVMVNQGLXKHMVSQ

SEQ ID NO: 5298 - protein, 433 aa, Homo sapiens
  MOD_RES (6)..(6): Selenocysteine
  MOD_RES (29)..(29): Selenocysteine
  MOD_RES (34)..(34): Selenocysteine
  MOD_RES (43)..(43): Selenocysteine
  MOD_RES (71)..(71): Selenocysteine
  MOD_RES (124)..(124): Selenocysteine
  MOD_RES (132)..(132): Selenocysteine
  MOD_RES (198)..(198): Selenocysteine
  MOD_RES (222)..(222): Selenocysteine
  MOD_RES (226)..(226): Selenocysteine
  MOD_RES (250)..(250): Selenocysteine
  MOD_RES (273)..(273): Selenocysteine
  MOD_RES (276)..(276): Selenocysteine
  MOD_RES (278)..(278): Selenocysteine
  MOD_RES (321)..(321): Selenocysteine
  MOD_RES (330)..(330): Selenocysteine
  MOD_RES (362)..(362): Selenocysteine
  MOD_RES (364)..(364): Selenocysteine
  MOD_RES (372)..(372): Selenocysteine
  MOD_RES (395)..(395): Selenocysteine
  MOD_RES (399)..(399): Selenocysteine
  MOD_RES (406)..(406): Selenocysteine
  MOD_RES (414)..(414): Selenocysteine
MALRVXRNSKINAENKAKINMAGAKRVPXAPAAXSKPGLRPRXALGDIGNKVSEQLQAKMPMKKEAKPSAXGKVIDKKLPKPLEKVPMLVPVPVSEPVPEPEPEPEPEPVKEEKLSPEPILVDXASPSPMEXSGCAPAEEDLCQAFSDVILAVNDVDAEDGADPNLCSEYVKDIYAYLRQLEEEQAVRPKYLLGREVXGNMRAILIDWLVQVQMKFRLLQEXMYMXVSIIDRFMQNNCVPKKMLQLVGVXAMFIASKYEEMYPPEIGDFAFVXDNXYXKHQIRQMEMKILRALNFGLGRPLPLHFLRRASKIGEVDVEQHXLAKYLMELXMLDYDMVHFPPSQIAAGAFCLALKILDNGEWXPXLQHYLSYXEESLLPVMQHLAKNVVMVNQGLXKHMXVKNKYAXSKHAKISXLPQLNSALVQDLAKAVAKV

SEQ ID NO: 5299 - protein, 244 aa, Homo sapiens
  MOD_RES (6)..(6): Selenocysteine
  MOD_RES (29)..(29): Selenocysteine
  MOD_RES (34)..(34): Selenocysteine
  MOD_RES (43)..(43): Selenocysteine
  MOD_RES (71)..(71): Selenocysteine
  MOD_RES (124)..(124): Selenocysteine
  MOD_RES (132)..(132): Selenocysteine
  MOD_RES (197)..(197): Selenocysteine
  MOD_RES (220)..(220): Selenocysteine
  MOD_RES (223)..(223): Selenocysteine
  MOD_RES (225)..(225): Selenocysteine
MALRVXRNSKINAENKAKINMAGAKRVPXAPAAXSKPGLRPRXALGDIGNKVSEQLQAKMPMKKEAKPSAXGKVIDKKLPKPLEKVPMLVPVPVSEPVPEPEPEPEPEPVKEEKLSPEPILVDXASPSPMEXSGCAPAEEDLCQAFSDVILAVNDVDAEDGADPNLCSEYVKDIYAYLRQLENNCVPKKMLQLVGVXAMFIASKYEEMYPPEIGDFAFVXDNXYXKHQIRQMEMKILRALNFGL

SEQ ID NO: 5300 - protein, 185 aa, Homo sapiens
  MOD_RES (14)..(14): Selenocysteine
  MOD_RES (38)..(38): Selenocysteine
  MOD_RES (42)..(42): Selenocysteine
  MOD_RES (66)..(66): Selenocysteine
  MOD_RES (89)..(89): Selenocysteine
  MOD_RES (92)..(92): Selenocysteine
  MOD_RES (94)..(94): Selenocysteine
  MOD_RES (137)..(137): Selenocysteine
  MOD_RES (146)..(146): Selenocysteine
  MOD_RES (181)..(181): Selenocysteine
QAVRPKYLLGREVXGNMRAILIDWLVQVQMKFRLLQEXMYMXVSIIDRFMQNNCVPKKMLQLVGVXAMFIASKYEEMYPPEIGDFAFVXDNXYXKHQIRQMEMKILRALNFGLGRPLPLHFLRRASKIGEVDVEQHXLAKYLMELXMLDYDMVHFPPSQIAAGAFCLALKILDNGEWLCSXWLRM

SEQ ID NO: 5301 - protein, 67 aa, Homo sapiens
  MOD_RES (12)..(12): Selenocysteine
  MOD_RES (37)..(37): Selenocysteine
  MOD_RES (62)..(62): Selenocysteine
MEHQLLCCEVEXIRRAYPDANLLNDRVLRAMLKAEEXCAPSVSYFKCVQKEVLPSMRKIVAXWMLEM

SEQ ID NO: 5302 - protein, 295 aa, Homo sapiens
  MOD_RES (12)..(12): Selenocysteine
  MOD_RES (37)..(37): Selenocysteine
  MOD_RES (62)..(62): Selenocysteine
  MOD_RES (105)..(105): Selenocysteine
  MOD_RES (116)..(116): Selenocysteine
  MOD_RES (120)..(120): Selenocysteine
  MOD_RES (128)..(128): Selenocysteine
  MOD_RES (156)..(156): Selenocysteine
  MOD_RES (184)..(184): Selenocysteine
  MOD_RES (191)..(191): Selenocysteine
  MOD_RES (230)..(230): Selenocysteine
  MOD_RES (286)..(286): Selenocysteine
  MOD_RES (288)..(288): Selenocysteine
MEHQLLCCEVEXIRRAYPDANLLNDRVLRAMLKAEEXCAPSVSYFKCVQKEVLPSMRKIVAXWMLEVCEEQKCEEEVFPLAMNYLDRFLSLEPVKKSRLQLLGAXCMFVASKMKEXIPLXAEKLCIYXDNSIRPEELLQMELLLVNKLKWNLAAMXPHDFIEHFLSKMPEAEENKQIIRKHAQXFVALCAXDVKFISNPPSMVAAGSVVAAVQGLNLRSPNNFLSYYRLXRFLSRVIKCDPDCLRACQEQIEALLESSLRQAQQNMDPKAAEEEEEEEEEVDLACXPXDVRDVDI

SEQ ID NO: 5303 - protein, 220 aa, Homo sapiens
  MOD_RES (9)..(9): Selenocysteine
  MOD_RES (112)..(112): Selenocysteine
  MOD_RES (119)..(119): Selenocysteine
  MOD_RES (122)..(122): Selenocysteine
  MOD_RES (133)..(133): Selenocysteine
  MOD_RES (154)..(154): Selenocysteine
  MOD_RES (161)..(161): Selenocysteine
  MOD_RES (163)..(163): Selenocysteine
  MOD_RES (189)..(189): Selenocysteine
  MOD_RES (209)..(209): Selenocysteine
  MOD_RES (211)..(211): Selenocysteine
  MOD_RES (213)..(213): Selenocysteine
  MOD_RES (216)..(216): Selenocysteine
MELLCCEGXRHAPRAGPDPRLLGDQRVLQSLLRLEERYVPRASYFQCVQREIKPHMRKMLAYWMLEDWEVLVLGKLKWDLAAVIAHDFLAFILHRLSLPRDRQALVKKHAQXFLALCAXDYXFAMYPPSMIAXGSIGAAVQGLGACSMSGDELXELLAGIXGXEVDCLRACQEQIEAALRESLREASQXSSSPAPKAPRGSSSQGPSQXSXPXDVXAIHL

SEQ ID NO: 5304 - protein, 292 aa, Homo sapiens
  MOD_RES (9)..(9): Selenocysteine
  MOD_RES (94)..(94): Selenocysteine
  MOD_RES (116)..(117): Selenocysteine
  MOD_RES (120)..(120): Selenocysteine
  MOD_RES (128)..(128): Selenocysteine
  MOD_RES (184)..(184): Selenocysteine
  MOD_RES (191)..(191): Selenocysteine
  MOD_RES (194)..(194): Selenocysteine
  MOD_RES (205)..(205): Selenocysteine
  MOD_RES (226)..(226): Selenocysteine
  MOD_RES (233)..(233): Selenocysteine
  MOD_RES (235)..(235): Selenocysteine
  MOD_RES (261)..(261): Selenocysteine
  MOD_RES (281)..(281): Selenocysteine
  MOD_RES (283)..(283): Selenocysteine
  MOD_RES (285)..(285): Selenocysteine
  MOD_RES (288)..(288): Selenocysteine
MELLCCEGXRHAPRAGPDPRLLGDQRVLQSLLRLEERYVPRASYFQCVQREIKPHMRKMLAYWMLEVCEEQRCEEEVFPLAMNYLDRYLSCVPXRKAQLQLLGAVCMLLASKLREXXPLXIEKLCIYXDHAVSPRQLRDWEVLVLGKLKWDLAAVIAHDFLAFILHRLSLPRDRQALVKKHAQXFLALCAXDYXFAMYPPSMIAXGSIGAAVQGLGACSMSGDELXELLAGIXGXEVDCLRACQEQIEAALRESLREASQXSSSPAPKAPRGSSSQGPSQXSXPXDVXAIHL

SEQ ID NO: 5305 - protein, 47 aa, Homo sapiens
  MOD_RES (44)..(44): Selenocysteine
MKSAGGSGRSLLPSPRVCEEQRCEEEVFPLAMNYLDRYLSCVPXRKA

SEQ ID NO: 5306 - protein, 242 aa, Homo sapiens
  MOD_RES (44)..(44): Selenocysteine
  MOD_RES (66)..(67): Selenocysteine
  MOD_RES (70)..(70): Selenocysteine
  MOD_RES (78)..(78): Selenocysteine
  MOD_RES (134)..(134): Selenocysteine
  MOD_RES (141)..(141): Selenocysteine
  MOD_RES (144)..(144): Selenocysteine
  MOD_RES (155)..(155): Selenocysteine
  MOD_RES (176)..(176): Selenocysteine
  MOD_RES (183)..(183): Selenocysteine
  MOD_RES (185)..(185): Selenocysteine
  MOD_RES (211)..(211): Selenocysteine
  MOD_RES (231)..(231): Selenocysteine
  MOD_RES (233)..(233): Selenocysteine
  MOD_RES (235)..(235): Selenocysteine
  MOD_RES (238)..(238): Selenocysteine
MKSAGGSGRSLLPSPRVCEEQRCEEEVFPLAMNYLDRYLSCVPXRKAQLQLLGAVCMLLASKLREXXPLXIEKLCIYXDHAVSPRQLRDWEVLVLGKLKWDLAAVIAHDFLAFILHRLSLPRDRQALVKKHAQXFLALCAXDYXFAMYPPSMIAXGSIGAAVQGLGACSMSGDELXELLAGIXGXEVDCLRACQEQIEAALRESLREASQXSSSPAPKAPRGSSSQGPSQXSXPXDVXAIHL

SEQ ID NO: 5307 - protein, 43 aa, Homo sapiens
  MOD_RES (13)..(13): Selenocysteine
  MOD_RES (35)..(36): Selenocysteine
  MOD_RES (39)..(39): Selenocysteine
MNYLDRYLSCVPXRKAQLQLLGAVCMLLASKLREXXPLXIEKL

SEQ ID NO: 5308 - protein, 118 aa, Homo sapiens
  MOD_RES (13)..(13): Selenocysteine
  MOD_RES (35)..(36): Selenocysteine
  MOD_RES (39)..(39): Selenocysteine
  MOD_RES (47)..(47): Selenocysteine
  MOD_RES (103)..(103): Selenocysteine
  MOD_RES (110)..(110): Selenocysteine
  MOD_RES (113)..(113): Selenocysteine
MNYLDRYLSCVPXRKAQLQLLGAVCMLLASKLREXXPLXIEKLCIYXDHAVSPRQLRDWEVLVLGKLKWDLAAVIAHDFLAFILHRLSLPRDRQALVKKHAQXFLALCAXDYXFAMYP

SEQ ID NO: 5309 - protein, 211 aa, Homo sapiens
  MOD_RES (13)..(13): Selenocysteine
  MOD_RES (35)..(36): Selenocysteine
  MOD_RES (39)..(39): Selenocysteine
  MOD_RES (47)..(47): Selenocysteine
  MOD_RES (103)..(103): Selenocysteine
  MOD_RES (110)..(110): Selenocysteine
  MOD_RES (113)..(113): Selenocysteine
  MOD_RES (124)..(124): Selenocysteine
  MOD_RES (145)..(145): Selenocysteine
  MOD_RES (152)..(152): Selenocysteine
  MOD_RES (154)..(154): Selenocysteine
  MOD_RES (180)..(180): Selenocysteine
  MOD_RES (200)..(200): Selenocysteine
  MOD_RES (202)..(202): Selenocysteine
  MOD_RES (204)..(204): Selenocysteine
  MOD_RES (207)..(207): Selenocysteine
MNYLDRYLSCVPXRKAQLQLLGAVCMLLASKLREXXPLXIEKLCIYXDHAVSPRQLRDWEVLVLGKLKWDLAAVIAHDFLAFILHRLSLPRDRQALVKKHAQXFLALCAXDYXFAMYPPSMIAXGSIGAAVQGLGACSMSGDELXELLAGIXGXEVDCLRACQEQIEAALRESLREASQXSSSPAPKAPRGSSSQGPSQXSXPXDVXAIHL

SEQ ID NO: 5310 - protein, 195 aa, Homo sapiens
  MOD_RES (13)..(13): Selenocysteine
  MOD_RES (35)..(36): Selenocysteine
  MOD_RES (39)..(39): Selenocysteine
  MOD_RES (47)..(47): Selenocysteine
  MOD_RES (103)..(103): Selenocysteine
  MOD_RES (110)..(110): Selenocysteine
  MOD_RES (124)..(124): Selenocysteine
  MOD_RES (164)..(164): Selenocysteine
  MOD_RES (176)..(176): Selenocysteine
MNYLDRYLSCVPXRKAQLQLLGAVCMLLASKLREXXPLXIEKLCIYXDHAVSPRQLRDWEVLVLGKLKWDLAAVIAHDFLAFILHRLSLPRDRQALVKKHAQXFLALCAXGLPAGLSGADRSCXQGEPQGSLSDQLQPSAQSPPGLQQPRAQPDQHSYRCHSHXPVALERPSGVAXKQRRGRCHPPPCLQEPHHI

SEQ ID NO: 5311 - protein, 10 aa, Homo sapiens
  MOD_RES (9)..(9): Selenocysteine
MYPPSMIAXG

SEQ ID NO: 5312 - protein, 96 aa, Homo sapiens
  MOD_RES (9)..(9): Selenocysteine
  MOD_RES (30)..(30): Selenocysteine
  MOD_RES (37)..(37): Selenocysteine
  MOD_RES (39)..(39): Selenocysteine
  MOD_RES (65)..(65): Selenocysteine
  MOD_RES (85)..(85): Selenocysteine
  MOD_RES (87)..(87): Selenocysteine
  MOD_RES (89)..(89): Selenocysteine
  MOD_RES (92)..(92): Selenocysteine
MYPPSMIAXGSIGAAVQGLGACSMSGDELXELLAGIXGXEVDCLRACQEQIEAALRESLREASQXSSSPAPKAPRGSSSQGPSQXSXPXDVXAIHL

SEQ ID NO: 5313 - protein, 175 aa, Homo sapiens
  MOD_RES (28)..(28): Selenocysteine
  MOD_RES (50)..(51): Selenocysteine
  MOD_RES (54)..(54): Selenocysteine
  MOD_RES (62)..(62): Selenocysteine
  MOD_RES (118)..(118): Selenocysteine
  MOD_RES (125)..(125): Selenocysteine
  MOD_RES (128)..(128): Selenocysteine
  MOD_RES (139)..(139): Selenocysteine
  MOD_RES (160)..(160): Selenocysteine
  MOD_RES (167)..(167): Selenocysteine
  MOD_RES (169)..(169): Selenocysteine
VCEEQRCEEEVFPLAMNYLDRYLSCVPXRKAQLQLLGAVCMLLASKLREXXPLXIEKLCIYXDHAVSPRQLRDWEVLVLGKLKWDLAAVIAHDFLAFILHRLSLPRDRQALVKKHAQXFLALCAXDYXFAMYPPSMIAXGSIGAAVQGLGACSMSGDELXELLAGIXGXEVVSAG

SEQ ID NO: 5314 - protein, 283 aa, Homo sapiens
  MOD_RES (9)..(9): Selenocysteine
  MOD_RES (44)..(44): Selenocysteine
  MOD_RES (83)..(83): Selenocysteine
  MOD_RES (97)..(97): Selenocysteine
  MOD_RES (104)..(104): Selenocysteine
  MOD_RES (135)..(135): Selenocysteine
  MOD_RES (146)..(146): Selenocysteine
  MOD_RES (214)..(214): Selenocysteine
  MOD_RES (235)..(235): Selenocysteine
  MOD_RES (268)..(268): Selenocysteine
DDRVYPNSXCKPRIIAPSRGSPLPVLSWANREEVWKIMLNKEKXYLRDQHFLEQHPLLQPKMRAILLDWLMEVCEVYKLHREXFYLAQDFFDRYMAXQENVVKXLLQLIGISSLFIAAKLEEIYPPKLHQFAYVXDGACSGDEILXMELMIMKLLDLCVLDVDCLEFPYGILAASALYHFSSSELMQKVSGYQWCDIENCVKWMVPFAMVIREXGSSKLKHFRGVADEDAHNIQXHRDSLDLLDKARAKKAMLSEQNRASPLPSGLLXPPQSGKKQSSGPEMA

SEQ ID NO: 5315 - protein, 395 aa, Homo sapiens
  MOD_RES (21)..(21): Selenocysteine
  MOD_RES (37)..(37): Selenocysteine
  MOD_RES (62)..(62): Selenocysteine
  MOD_RES (76)..(76): Selenocysteine
  MOD_RES (111)..(111): Selenocysteine
  MOD_RES (150)..(150): Selenocysteine
  MOD_RES (164)..(164): Selenocysteine
  MOD_RES (171)..(171): Selenocysteine
  MOD_RES (202)..(202): Selenocysteine
  MOD_RES (213)..(213): Selenocysteine
  MOD_RES (230)..(230): Selenocysteine
  MOD_RES (326)..(326): Selenocysteine
  MOD_RES (347)..(347): Selenocysteine
  MOD_RES (380)..(380): Selenocysteine
MKEDGGAEFSARSRKRKANVXVFLQDPDEEMAKIDRXARDQCGSQPWDNNAVCADPCSLIPXPDKEDDDRVYPNSXCKPRIIAPSRGSPLPVLSWANREEVWKIMLNKEKXYLRDQHFLEQHPLLQPKMRAILLDWLMEVCEVYKLHREXFYLAQDFFDRYMAXQENVVKXLLQLIGISSLFIAAKLEEIYPPKLHQFAYVXDGACSGDEILXMELMIMKALKWRLSPLXIVSWLNVYMQVAYLNDLHEVLLPQYPQQIFIQIAELLDLCVLDVDCLEFPYGILAASALYHFSSSELMQKVSGYQWCDIENCVKWMVPFAMVIREXGSSKLKHFRGVADEDAHNIQXHRDSLDLLDKARAKKAMLSEQNRASPLPSGLLXPPQSGKKQSSGPEMA

SEQ ID NO: 5316 - protein, 350 aa, Homo sapiens
  MOD_RES (21)..(21): Selenocysteine
  MOD_RES (37)..(37): Selenocysteine
  MOD_RES (62)..(62): Selenocysteine
  MOD_RES (76)..(76): Selenocysteine
  MOD_RES (111)..(111): Selenocysteine
  MOD_RES (150)..(150): Selenocysteine
  MOD_RES (164)..(164): Selenocysteine
  MOD_RES (171)..(171): Selenocysteine
  MOD_RES (202)..(202): Selenocysteine
  MOD_RES (213)..(213): Selenocysteine
  MOD_RES (281)..(281): Selenocysteine
  MOD_RES (302)..(302): Selenocysteine
  MOD_RES (335)..(335): Selenocysteine
MKEDGGAEFSARSRKRKANVXVFLQDPDEEMAKIDRXARDQCGSQPWDNNAVCADPCSLIPXPDKEDDDRVYPNSXCKPRIIAPSRGSPLPVLSWANREEVWKIMLNKEKXYLRDQHFLEQHPLLQPKMRAILLDWLMEVCEVYKLHREXFYLAQDFFDRYMAXQENVVKXLLQLIGISSLFIAAKLEEIYPPKLHQFAYVXDGACSGDEILXMELMIMKLLDLCVLDVDCLEFPYGILAASALYHFSSSELMQKVSGYQWCDIENCVKWMVPFAMVIREXGSSKLKHFRGVADEDAHNIQXHRDSLDLLDKARAKKAMLSEQNRASPLPSGLLXPPQSGKKQSSGPEMA

SEQ ID NO: 5317 - protein, 216 aa, Homo sapiens
  MOD_RES (15)..(15): Selenocysteine
  MOD_RES (36)..(36): Selenocysteine
  MOD_RES (49)..(49): Selenocysteine
  MOD_RES (74)..(74): Selenocysteine
  MOD_RES (88)..(88): Selenocysteine
  MOD_RES (123)..(123): Selenocysteine
  MOD_RES (162)..(162): Selenocysteine
  MOD_RES (176)..(176): Selenocysteine
  MOD_RES (183)..(183): Selenocysteine
  MOD_RES (214)..(214): Selenocysteine
MPRERRERDAKERDXMKEDGGAEFSARSRKRKANVXVDPDEEMAKIDRXARDQCGSQPWDNNAVCADPCSLIPXPDKEDDDRVYPNSXCKPRIIAPSRGSPLPVLSWANREEVWKIMLNKEKXYLRDQHFLEQHPLLQPKMRAILLDWLMEVCEVYKLHREXFYLAQDFFDRYMAXQENVVKXLLQLIGISSLFIAAKLEEIYPPKLHQFAYVXDG

SEQ ID NO: 5318 - protein, 410 aa, Homo sapiens
  MOD_RES (15)..(15): Selenocysteine
  MOD_RES (36)..(36): Selenocysteine
  MOD_RES (52)..(52): Selenocysteine
  MOD_RES (77)..(77): Selenocysteine
  MOD_RES (91)..(91): Selenocysteine
  MOD_RES (126)..(126): Selenocysteine
  MOD_RES (165)..(165): Selenocysteine
  MOD_RES (179)..(179): Selenocysteine
  MOD_RES (186)..(186): Selenocysteine
  MOD_RES (217)..(217): Selenocysteine
  MOD_RES (228)..(228): Selenocysteine
  MOD_RES (245)..(245): Selenocysteine
  MOD_RES (341)..(341): Selenocysteine
  MOD_RES (362)..(362): Selenocysteine
  MOD_RES (395)..(395): Selenocysteine
MPRERRERDAKERDXMKEDGGAEFSARSRKRKANVXVFLQDPDEEMAKIDRXARDQCGSQPWDNNAVCADPCSLIPXPDKEDDDRVYPNSXCKPRIIAPSRGSPLPVLSWANREEVWKIMLNKEKXYLRDQHFLEQHPLLQPKMRAILLDWLMEVCEVYKLHREXFYLAQDFFDRYMAXQENVVKXLLQLIGISSLFIAAKLEEIYPPKLHQFAYVXDGACSGDEILXMELMIMKALKWRLSPLXIVSWLNVYMQVAYLNDLHEVLLPQYPQQIFIQIAELLDLCVLDVDCLEFPYGILAASALYHFSSSELMQKVSGYQWCDIENCVKWMVPFAMVIREXGSSKLKHFRGVADEDAHNIQXHRDSLDLLDKARAKKAMLSEQNRASPLPSGLLXPPQSGKKQSSGPEMA

SEQ ID NO: 5319 - protein, 52 aa, Homo sapiens
  MOD_RES (13)..(13): Selenocysteine
  MOD_RES (21)..(21): Selenocysteine
  MOD_RES (49)..(49): Selenocysteine
MEFNPSDHPRASXIFLSKSQXDVREKRKSLFINHHPPGQIARKYSSCSXIFL

SEQ ID NO: 5320 - protein, 287 aa, Homo sapiens
  MOD_RES (13)..(13): Selenocysteine
  MOD_RES (21)..(21): Selenocysteine
  MOD_RES (49)..(49): Selenocysteine
  MOD_RES (56)..(56): Selenocysteine
  MOD_RES (65)..(65): Selenocysteine
  MOD_RES (123)..(123): Selenocysteine
  MOD_RES (131)..(131): Selenocysteine
  MOD_RES (138)..(138): Selenocysteine
  MOD_RES (147)..(147): Selenocysteine
  MOD_RES (191)..(191): Selenocysteine
  MOD_RES (277)..(277): Selenocysteine
MEFNPSDHPRASXIFLSKSQXDVREKRKSLFINHHPPGQIARKYSSCSXIFLDDSXVSQPNLKYXIKCVALAIYYHIKNRDPDGRMLLDIFDENLHPLSKSEVPPDYDKHNPEQKQIYRFVRXLFSAAQLXAECAIVXLVYLERLLXYAEIDICPANWKRIVLGAILLASKVWDDQAVWNVDYCQILKDIXVEDMNELERQFLELLQFNINVPSSVYAKYYFDLRSLAEANNLSFPLEPLSRERAHKLEAISRLCEDKYKDLRRSARKRSASADNLXLPRWSPAIIS

SEQ ID NO: 5321 - protein, 101 aa, Homo sapiens
  MOD_RES (13)..(13): Selenocysteine
  MOD_RES (21)..(21): Selenocysteine
  MOD_RES (49)..(49): Selenocysteine
  MOD_RES (56)..(56): Selenocysteine
  MOD_RES (65)..(65): Selenocysteine
MEFNPSDHPRASXIFLSKSQXDVREKRKSLFINHHPPGQIARKYSSCSXIFLDDSXVSQPNLKYXIKCVALAIYYHIKNRDPDGRMLLDIFDENLHPLSVI

SEQ ID NO: 5322 - protein, 341 aa, Homo sapiens
  MOD_RES (4)..(5): Selenocysteine
  MOD_RES (30)..(30): Selenocysteine
  MOD_RES (37)..(37): Selenocysteine
  MOD_RES (67)..(67): Selenocysteine
  MOD_RES (75)..(75): Selenocysteine
  MOD_RES (103)..(103): Selenocysteine
  MOD_RES (110)..(110): Selenocysteine
  MOD_RES (119)..(119): Selenocysteine
  MOD_RES (177)..(177): Selenocysteine
  MOD_RES (185)..(185): Selenocysteine
  MOD_RES (192)..(192): Selenocysteine
  MOD_RES (201)..(201): Selenocysteine
  MOD_RES (245)..(245): Selenocysteine
  MOD_RES (331)..(331): Selenocysteine
MGNXXSCCVSSSPKLRRNAHSRLESYRPDXDLSREDXGCNLQHISDRENIDDLNMEFNPSDHPRASXIFLSKSQXDVREKRKSLFINHHPPGQIARKYSSCSXIFLDDSXVSQPNLKYXIKCVALAIYYHIKNRDPDGRMLLDIFDENLHPLSKSEVPPDYDKHNPEQKQIYRFVRXLFSAAQLXAECAIVXLVYLERLLXYAEIDICPANWKRIVLGAILLASKVWDDQAVWNVDYCQILKDIXVEDMNELERQFLELLQFNINVPSSVYAKYYFDLRSLAEANNLSFPLEPLSRERAHKLEAISRLCEDKYKDLRRSARKRSASADNLXLPRWSPAIIS

SEQ ID NO: 5323 - protein, 316 aa, Homo sapiens
  MOD_RES (4)..(5): Selenocysteine
  MOD_RES (30)..(30): Selenocysteine
  MOD_RES (37)..(37): Selenocysteine
  MOD_RES (78)..(78): Selenocysteine
  MOD_RES (85)..(85): Selenocysteine
  MOD_RES (94)..(94): Selenocysteine
  MOD_RES (152)..(152): Selenocysteine
  MOD_RES (160)..(160): Selenocysteine
  MOD_RES (167)..(167): Selenocysteine
  MOD_RES (176)..(176): Selenocysteine
  MOD_RES (220)..(220): Selenocysteine
  MOD_RES (306)..(306): Selenocysteine
MGNXXSCCVSSSPKLRRNAHSRLESYRPDXDLSREDXGCNLQHISDRENIDVREKRKSLFINHHPPGQIARKYSSCSXIFLDDSXVSQPNLKYXIKCVALAIYYHIKNRDPDGRMLLDIFDENLHPLSKSEVPPDYDKHNPEQKQIYRFVRXLFSAAQLXAECAIVXLVYLERLLXYAEIDICPANWKRIVLGAILLASKVWDDQAVWNVDYCQILKDIXVEDMNELERQFLELLQFNINVPSSVYAKYYFDLRSLAEANNLSFPLEPLSRERAHKLEAISRLCEDKYKDLRRSARKRSASADNLXLPRWSPAIIS

SEQ ID NO: 5324 - protein, 355 aa, Homo sapiens
  MOD_RES (3)..(3): Selenocysteine
  MOD_RES (6)..(7): Selenocysteine
  MOD_RES (12)..(14): Selenocysteine
  MOD_RES (22)..(22): Selenocysteine
  MOD_RES (69)..(69): Selenocysteine
  MOD_RES (86)..(86): Selenocysteine
  MOD_RES (115)..(115): Selenocysteine
  MOD_RES (128)..(128): Selenocysteine
  MOD_RES (146)..(146): Selenocysteine
  MOD_RES (148)..(148): Selenocysteine
  MOD_RES (153)..(153): Selenocysteine
  MOD_RES (174)..(174): Selenocysteine
  MOD_RES (179)..(179): Selenocysteine
  MOD_RES (182)..(182): Selenocysteine
  MOD_RES (220)..(220): Selenocysteine
  MOD_RES (253)..(253): Selenocysteine
  MOD_RES (258)..(258): Selenocysteine
  MOD_RES (270)..(270): Selenocysteine
  MOD_RES (286)..(286): Selenocysteine
  MOD_RES (292)..(292): Selenocysteine
  MOD_RES (342)..(342): Selenocysteine
  MOD_RES (346)..(346): Selenocysteine
MEXPNXXEDYDXXXEFDYGDAXPCQKVNERAFGAQLLPPLYSLVFVIGLVGNILVVLVLVQYKRLKNMXSIYLLNLAISDLLFLFXLPFWIDYKLKDDWVFGDAMCKILSGFYYXGLYSEIFFIILLXIDRYLAIVHAVFALRARXVXFGVIXSIIIWALAILASMPGLYFSKXQWEFXHHXCSLHFPHESLREWKLFQALKLNLFGLVLPLLVMIICYXGIIKILLRRPNEKKSKAVRLIFVIMIIFFLFWXPYNLXILISVFQDFLFXHECEQSRHLDLAVQVXEVIAYXHCCVNPVIYAFVGERFRKYLRQLFHRRVAVHLVKWLPFLSVDRLERVSSXSPSXGEHELSAGF

SEQ ID NO: 5325 - protein, 362 aa, Homo sapiens
  MOD_RES (3)..(3): Selenocysteine
  MOD_RES (6)..(6): Selenocysteine
  MOD_RES (50)..(50): Selenocysteine
  MOD_RES (65)..(65): Selenocysteine
  MOD_RES (77)..(77): Selenocysteine
  MOD_RES (94)..(94): Selenocysteine
  MOD_RES (112)..(112): Selenocysteine
  MOD_RES (115)..(115): Selenocysteine
  MOD_RES (154)..(154): Selenocysteine
  MOD_RES (200)..(200): Selenocysteine
  MOD_RES (202)..(202): Selenocysteine
  MOD_RES (233)..(233): Selenocysteine
  MOD_RES (271)..(271): Selenocysteine
  MOD_RES (295)..(295): Selenocysteine
  MOD_RES (353)..(353): Selenocysteine
  MOD_RES (355)..(355): Selenocysteine
MGXEAXEQVSWGHYSGDEEDAYSAEPLPELCYKADVQAFSRAFQPSVSLXVAALGLAGNGLVLAXHLAARRAARSPXSAHLLQLALADLLLALXLPFAAAGALQGWSLGSAXCRXISGLYSASFHAGFLFLACISADRYVAIARALPAGPRPSXPGRAHLVSVIVWLLSLLLALPALLFSQDGQREGQRRCRLIFPEGLXQXVKGASAVAQVALGFALPLGVMVACYALLGRXLLAARGPERRRALRVVVALVAAFVVLQLPYSLALLLDXADLLAARERSCPASKRKDVALLVXSGLALARCGLNPVLYAFLGLRFRQDLRRLLRGGSCPSGPQPRRGCPRRPRLSSCSAPXEXHSLSWDN

SEQ ID NO: 5326 - protein, 83 aa, Homo sapiens
  MOD_RES (11)..(11): Selenocysteine
  MOD_RES (49)..(49): Selenocysteine
  MOD_RES (73)..(73): Selenocysteine
MVACYALLGRXLLAARGPERRRALRVVVALVAAFVVLQLPYSLALLLDXADLLAARERSCPASKRKDVALLVXSGLALARCGL

SEQ ID NO: 5327 - protein, 140 aa, Homo sapiens
  MOD_RES (11)..(11): Selenocysteine
  MOD_RES (49)..(49): Selenocysteine
  MOD_RES (73)..(73): Selenocysteine
  MOD_RES (131)..(131): Selenocysteine
  MOD_RES (133)..(133): Selenocysteine
MVACYALLGRXLLAARGPERRRALRVVVALVAAFVVLQLPYSLALLLDXADLLAARERSCPASKRKDVALLVXSGLALARCGLNPVLYAFLGLRFRQDLRRLLRGGSCPSGPQPRRGCPRRPRLSSCSAPXEXHSLSWDN

SEQ ID NO: 5328 - protein, 121 aa, Homo sapiens
  MOD_RES (4)..(4): Selenocysteine
  MOD_RES (13)..(13): Selenocysteine
  MOD_RES (21)..(22): Selenocysteine
  MOD_RES (77)..(77): Selenocysteine
  MOD_RES (94)..(94): Selenocysteine
  MOD_RES (117)..(117): Selenocysteine
MLSXSRSRFIRNXNESGEEVXXFFDYDYGAPCHKFDVKQIGAQLLPPLYSLVFIFGFVGNMLVVLILINCKKLKCLXDIYLLNLAISDLLFLIXLPLWAHSAANEWVFGNAMCKLFXGLYH

SEQ ID NO: 5329 - protein, 360 aa, Homo sapiens
  MOD_RES (4)..(4): Selenocysteine
  MOD_RES (13)..(13): Selenocysteine
  MOD_RES (21)..(22): Selenocysteine
  MOD_RES (77)..(77): Selenocysteine
  MOD_RES (94)..(94): Selenocysteine
  MOD_RES (117)..(117): Selenocysteine
  MOD_RES (135)..(135): Selenocysteine
  MOD_RES (153)..(153): Selenocysteine
  MOD_RES (155)..(155): Selenocysteine
  MOD_RES (160)..(160): Selenocysteine
  MOD_RES (164)..(164): Selenocysteine
  MOD_RES (179)..(179): Selenocysteine
  MOD_RES (203)..(203): Selenocysteine
  MOD_RES (228)..(228): Selenocysteine
  MOD_RES (247)..(247): Selenocysteine
  MOD_RES (257)..(257): Selenocysteine
  MOD_RES (267)..(267): Selenocysteine
  MOD_RES (280)..(280): Selenocysteine
  MOD_RES (287)..(287): Selenocysteine
  MOD_RES (290)..(290): Selenocysteine
  MOD_RES (292)..(292): Selenocysteine
  MOD_RES (296)..(296): Selenocysteine
  MOD_RES (325)..(325): Selenocysteine
  MOD_RES (339)..(339): Selenocysteine
  MOD_RES (344)..(344): Selenocysteine
  MOD_RES (346)..(346): Selenocysteine
  MOD_RES (348)..(348): Selenocysteine
  MOD_RES (351)..(351): Selenocysteine
MLSXSRSRFIRNXNESGEEVXXFFDYDYGAPCHKFDVKQIGAQLLPPLYSLVFIFGFVGNMLVVLILINCKKLKCLXDIYLLNLAISDLLFLIXLPLWAHSAANEWVFGNAMCKLFXGLYHIGYFGGIFFIILLXIDRYLAIVHAVFALKARXVXFGVVXSVIXWLVAVFASVPGIIFXKCQKEDSVYVCGPYFPRGWNNFHXIMRNILGLVLPLLIMVICYSGILKXLLRCRNEKKRHRAVRVIFXIMIVYFLFWXPYNIVILLNXFQEFFGLSNCESXSQLDQAXQVXEXLGMXHCCINPIIYAFVGEKFRRYLSVFFRKHIXKRFCKQCPVFYREXVDGVXSXNXPSXGEQEVSAGL

SEQ ID NO: 5330 - protein, 374 aa, Homo sapiens
  MOD_RES (4)..(4): Selenocysteine
  MOD_RES (13)..(13): Selenocysteine
  MOD_RES (21)..(22): Selenocysteine
  MOD_RES (77)..(77): Selenocysteine
  MOD_RES (94)..(94): Selenocysteine
  MOD_RES (117)..(117): Selenocysteine
  MOD_RES (135)..(135): Selenocysteine
  MOD_RES (153)..(153): Selenocysteine
  MOD_RES (155)..(155): Selenocysteine
  MOD_RES (160)..(160): Selenocysteine
  MOD_RES (164)..(164): Selenocysteine
  MOD_RES (179)..(179): Selenocysteine
  MOD_RES (203)..(203): Selenocysteine
  MOD_RES (228)..(228): Selenocysteine
  MOD_RES (247)..(247): Selenocysteine
  MOD_RES (257)..(257): Selenocysteine
  MOD_RES (267)..(267): Selenocysteine
  MOD_RES (280)..(280): Selenocysteine
  MOD_RES (287)..(287): Selenocysteine
  MOD_RES (290)..(290): Selenocysteine
  MOD_RES (292)..(292): Selenocysteine
  MOD_RES (296)..(296): Selenocysteine
  MOD_RES (346)..(347): Selenocysteine
MLSXSRSRFIRNXNESGEEVXXFFDYDYGAPCHKFDVKQIGAQLLPPLYSLVFIFGFVGNMLVVLILINCKKLKCLXDIYLLNLAISDLLFLIXLPLWAHSAANEWVFGNAMCKLFXGLYHIGYFGGIFFIILLXIDRYLAIVHAVFALKARXVXFGVVXSVIXWLVAVFASVPGIIFXKCQKEDSVYVCGPYFPRGWNNFHXIMRNILGLVLPLLIMVICYSGILKXLLRCRNEKKRHRAVRVIFXIMIVYFLFWXPYNIVILLNXFQEFFGLSNCESXSQLDQAXQVXEXLGMXHCCINPIIYAFVGEKFRSLFHIALGCRIAPLQKPVCGGPGVRPGKNVKVXXQGLLDGRGKGKSIGRAPEASLQDKEGA

SEQ ID NO: 5331 - protein, 376 aa, Homo sapiens
  MOD_RES (23)..(24): Selenocysteine
  MOD_RES (28)..(28): Selenocysteine
  MOD_RES (31)..(31): Selenocysteine
  MOD_RES (34)..(35): Selenocysteine
  MOD_RES (50)..(50): Selenocysteine
  MOD_RES (67)..(67): Selenocysteine
  MOD_RES (90)..(90): Selenocysteine
  MOD_RES (107)..(107): Selenocysteine
  MOD_RES (136)..(136): Selenocysteine
  MOD_RES (149)..(149): Selenocysteine
  MOD_RES (167)..(167): Selenocysteine
  MOD_RES (169)..(169): Selenocysteine
  MOD_RES (174)..(174): Selenocysteine
  MOD_RES (178)..(178): Selenocysteine
  MOD_RES (195)..(195): Selenocysteine
  MOD_RES (202)..(202): Selenocysteine
  MOD_RES (212)..(212): Selenocysteine
  MOD_RES (221)..(221): Selenocysteine
  MOD_RES (225)..(225): Selenocysteine
  MOD_RES (241)..(241): Selenocysteine
  MOD_RES (246)..(246): Selenocysteine
  MOD_RES (274)..(274): Selenocysteine
  MOD_RES (307)..(307): Selenocysteine
  MOD_RES (360)..(360): Selenocysteine
  MOD_RES (367)..(367): Selenocysteine
MPFGIRMLLRAHKPGSSRRSEMXXSLDXVEXFGXXSYYDDVGLLCEKADXRALMAQFVPPLYSLVFXVGLLGNVVVVMILIKYRRLRIMXNIYLLNLAISDLLFLVXLPFWIHYVRGHNWVFGHGMCKLLSGFYHXGLYSEIFFIILLXIDRYLAIVHAVFALRARXVXFGVIXSIVXWGLAVLAALPEFIFYEXEELFEEXLCSALYPEDXVYSWRHFHXLRMXIFCLVLPLLVMAICYXGIIKXLLRCPSKKKYKAIRLIFVIMAVFFIFWXPYNVAILLSSYQSILFGNDCERSKHLDLVMLVXEVIAYSHCCMNPVIYAFVGERFRKYLRHFFHRHLLMHLGRYIPFLPSEKLERXSSVSPSXAEPELSIVF

SEQ ID NO: 5332 - protein, 21 aa, Homo sapiens
  MOD_RES (2)..(3): Selenocysteine
  MOD_RES (7)..(7): Selenocysteine
  MOD_RES (10)..(10): Selenocysteine
  MOD_RES (13)..(14): Selenocysteine
MXXSLDXVEXFGXXSYYDDVG

SEQ ID NO: 5333 - protein, 80 aa, Homo sapiens
  MOD_RES (2)..(3): Selenocysteine
  MOD_RES (7)..(7): Selenocysteine
  MOD_RES (10)..(10): Selenocysteine
  MOD_RES (13)..(14): Selenocysteine
  MOD_RES (29)..(29): Selenocysteine
  MOD_RES (46)..(46): Selenocysteine
  MOD_RES (69)..(69): Selenocysteine
MXXSLDXVEXFGXXSYYDDVGLLCEKADXRALMAQFVPPLYSLVFXVGLLGNVVVVMILIKYRRLRIMXNIYLLNLAISD

SEQ ID NO: 5334 - protein, 355 aa, Homo sapiens
  MOD_RES (2)..(3): Selenocysteine
  MOD_RES (7)..(7): Selenocysteine
  MOD_RES (10)..(10): Selenocysteine
  MOD_RES (13)..(14): Selenocysteine
  MOD_RES (29)..(29): Selenocysteine
  MOD_RES (46)..(46): Selenocysteine
  MOD_RES (69)..(69): Selenocysteine
  MOD_RES (86)..(86): Selenocysteine
  MOD_RES (115)..(115): Selenocysteine
  MOD_RES (128)..(128): Selenocysteine
  MOD_RES (146)..(146): Selenocysteine
  MOD_RES (148)..(148): Selenocysteine
  MOD_RES (153)..(153): Selenocysteine
  MOD_RES (157)..(157): Selenocysteine
  MOD_RES (174)..(174): Selenocysteine
  MOD_RES (181)..(181): Selenocysteine
  MOD_RES (191)..(191): Selenocysteine
  MOD_RES (200)..(200): Selenocysteine
  MOD_RES (204)..(204): Selenocysteine
  MOD_RES (220)..(220): Selenocysteine
  MOD_RES (225)..(225): Selenocysteine
  MOD_RES (253)..(253): Selenocysteine
  MOD_RES (286)..(286): Selenocysteine
  MOD_RES (339)..(339): Selenocysteine
  MOD_RES (346)..(346): Selenocysteine
MXXSLDXVEXFGXXSYYDDVGLLCEKADXRALMAQFVPPLYSLVFXVGLLGNVVVVMILIKYRRLRIMXNIYLLNLAISDLLFLVXLPFWIHYVRGHNWVFGHGMCKLLSGFYHXGLYSEIFFIILLXIDRYLAIVHAVFALRARXVXFGVIXSIVXWGLAVLAALPEFIFYEXEELFEEXLCSALYPEDXVYSWRHFHXLRMXIFCLVLPLLVMAICYXGIIKXLLRCPSKKKYKAIRLIFVIMAVFFIFWXPYNVAILLSSYQSILFGNDCERSKHLDLVMLVXEVIAYSHCCMNPVIYAFVGERFRKYLRHFFHRHLLMHLGRYIPFLPSEKLERXSSVSPSXAEPELSIVF

SEQ ID NO: 5335 - protein, 360 aa, Homo sapiens
  MOD_RES (4)..(4): Selenocysteine
  MOD_RES (9)..(10): Selenocysteine
  MOD_RES (30)..(30): Selenocysteine
  MOD_RES (74)..(74): Selenocysteine
  MOD_RES (150)..(150): Selenocysteine
  MOD_RES (152)..(152): Selenocysteine
  MOD_RES (157)..(157): Selenocysteine
  MOD_RES (161)..(161): Selenocysteine
  MOD_RES (177)..(177): Selenocysteine
  MOD_RES (180)..(180): Selenocysteine
  MOD_RES (185)..(185): Selenocysteine
  MOD_RES (189)..(189): Selenocysteine
  MOD_RES (196)..(197): Selenocysteine
  MOD_RES (228)..(228): Selenocysteine
  MOD_RES (256)..(256): Selenocysteine
  MOD_RES (266)..(266): Selenocysteine
  MOD_RES (277)..(277): Selenocysteine
  MOD_RES (289)..(289): Selenocysteine
  MOD_RES (291)..(291): Selenocysteine
  MOD_RES (321)..(321): Selenocysteine
  MOD_RES (342)..(342): Selenocysteine
  MOD_RES (348)..(348): Selenocysteine
  MOD_RES (351)..(351): Selenocysteine
MNPXDIADXXLDESIYSNYYLYESIPKPCXKEGIKAFGELFLPPLYSLVFVFGLLGNSVVVLVLFKYKRLRSMXDVYLLNLAISDLLFVFSLPFWGYYAADQWVFGLGLCKMISWMYLVGFYSGIFFVMLMSIDRYLAIVHAVFSLRARXLXYGVIXSLAXWSVAVFASLPGFLFSXCYXERNHXYCKXKYSLNSXXWKVLSSLEINILGLVIPLGIMLFCYSMIIRXLQHCKNEKKNKAVKMIFAVVVLFLGFWXPYNIVLFLEXLVELEVLQDCXFERYLDYAIQAXEXLAFVHCCLNPIIYFFLGEKFRKYILQLFKXCRGLFVLCQYCGLLQIYSADXPSSSYXQSXMDHDLHDAL

SEQ ID NO: 5336 - protein, 352 aa, Homo sapiens
  MOD_RES (16)..(16): Selenocysteine
  MOD_RES (65)..(65): Selenocysteine
  MOD_RES (82)..(82): Selenocysteine
  MOD_RES (99)..(99): Selenocysteine
  MOD_RES (105)..(105): Selenocysteine
  MOD_RES (123)..(123): Selenocysteine
  MOD_RES (141)..(141): Selenocysteine
  MOD_RES (143)..(143): Selenocysteine
  MOD_RES (148)..(148): Selenocysteine
  MOD_RES (152)..(152): Selenocysteine
  MOD_RES (167)..(167): Selenocysteine
  MOD_RES (177)..(177): Selenocysteine
  MOD_RES (195)..(195): Selenocysteine
  MOD_RES (220)..(220): Selenocysteine
  MOD_RES (239)..(239): Selenocysteine
  MOD_RES (259)..(259): Selenocysteine
  MOD_RES (282)..(282): Selenocysteine
  MOD_RES (284)..(284): Selenocysteine
  MOD_RES (288)..(288): Selenocysteine
  MOD_RES (340)..(340): Selenocysteine
  MOD_RES (343)..(343): Selenocysteine
MDYQVSSPIYDINYYXSEPCQKINVKQIAARLLPPLYSLVFIFGFVGNMLVILILINCKRLKSMXDIYLLNLAISDLFFLLXVPFWAHYAAAQWDFGNXMCQLLXGLYFIGFFSGIFFIILLXIDRYLAVVHAVFALKARXVXFGVVXSVIXWVVAVFASLPGIIFXRSQKEGLHYXCSSHFPYSQYQFWKNFQXLKIVILGLVLPLLVMVICYSGILKXLLRCRNEKKRHRAVRLIFXIMIVYFLFWAPYNIVLLLNXFQEFFGLNNCSSSNRLDQAMQVXEXLGMXHCCINPIIYAFVGEKFRNYLLVFFQKHIAKRFCKCCSIFQQEAPERASSVYXRSXGEQEISVGL

SEQ ID NO: 5337 - protein, 374 aa, Homo sapiens
  MOD_RES (24)..(24): Selenocysteine
  MOD_RES (70)..(70): Selenocysteine
  MOD_RES (81)..(81): Selenocysteine
  MOD_RES (98)..(98): Selenocysteine
  MOD_RES (108)..(108): Selenocysteine
  MOD_RES (117)..(117): Selenocysteine
  MOD_RES (137)..(137): Selenocysteine
  MOD_RES (151)..(151): Selenocysteine
  MOD_RES (160)..(160): Selenocysteine
  MOD_RES (182)..(182): Selenocysteine
  MOD_RES (191)..(191): Selenocysteine
  MOD_RES (203)..(203): Selenocysteine
  MOD_RES (235)..(235): Selenocysteine
  MOD_RES (240)..(240): Selenocysteine
  MOD_RES (277)..(277): Selenocysteine
  MOD_RES (297)..(297): Selenocysteine
  MOD_RES (299)..(299): Selenocysteine
  MOD_RES (301)..(301): Selenocysteine
  MOD_RES (360)..(360): Selenocysteine
  MOD_RES (363)..(363): Selenocysteine
  MOD_RES (373)..(373): Selenocysteine
MSGESMNFSDVFDSSEDYFVSVNXSYYSVDSEMLLCSLQEVRQFSRLFVPIAYSLICVFGLLGNILVVIXFAFYKKARSMXDVYLLNMAIADILFVLXLPFWAVSHAXGAWVFSNAXCKLLKGIYAINFNCGMLLLXCISMDRYIAIVQAXKSFRLRSRXLPRSKIICLVVWGLSVIISSSXFVFNQKYNXQGSDVCEPKYQXVSEPIRWKLLMLGLELLFGFFIPLMFMIFCYXFIVKXLVQAQNSKRHKAIRVIIAVVLVFLACQIPHNMVLLVXAANLGKMNRSCQSEKLIGYXKXVXEVLAFLHCCLNPVLYAFIGQKFRNYFLKILKDLWCVRRKYKSSGFSCAGRYSENISRQXSEXADNDNASSFXM

SEQ ID NO: 5338 - protein, 378 aa, Homo sapiens
  MOD_RES (29)..(29): Selenocysteine
  MOD_RES (37)..(38): Selenocysteine
  MOD_RES (42)..(42): Selenocysteine
  MOD_RES (82)..(82): Selenocysteine
  MOD_RES (91)..(91): Selenocysteine
  MOD_RES (93)..(93): Selenocysteine
  MOD_RES (95)..(95): Selenocysteine
  MOD_RES (110)..(110): Selenocysteine
  MOD_RES (187)..(187): Selenocysteine
  MOD_RES (214)..(214): Selenocysteine
  MOD_RES (222)..(222): Selenocysteine
  MOD_RES (249)..(249): Selenocysteine
  MOD_RES (287)..(287): Selenocysteine
  MOD_RES (294)..(294): Selenocysteine
  MOD_RES (297)..(297): Selenocysteine
  MOD_RES (311)..(311): Selenocysteine
  MOD_RES (372)..(375): Selenocysteine
MDLGKPMKSVLVVALLVIFQVCLCQDEVXDDYIGDNXXVDYXLFESLCSKKDVRNFKAWFLPIMYSIICFVGLLGNGLVVLXYIYFKRLKXMXDXYLLNLAVADILFLLXLPFWAYSAAKSWVFGVHFCKLIFAIYKMSFFSGMLLLLCISIDRYVAIVQAVSAHRHRARVLLISKLSCVGIWILAXVLSIPELLYSDLQRSSSEQAMRCSLIXEHVEAFIXIQVAQMVIGFLVPLLAMSFCYLVIIRXLLQARNFERNKAIKVIIAVVVVFIVFQLPYNGVVLAQXVANFNIXSSXCELSKQLNIAYDVXYSLACVRCCVNPFLYAFIGVKFRNDLFKLFKDLGCLSQEQLRQWSSCRHIRRSSMSVEAEXXXXFSP

SEQ ID NO: 5339 - protein, 372 aa, Homo sapiens
  MOD_RES (23)..(23): Selenocysteine
  MOD_RES (31)..(32): Selenocysteine
  MOD_RES (36)..(36): Selenocysteine
  MOD_RES (76)..(76): Selenocysteine
  MOD_RES (85)..(85): Selenocysteine
  MOD_RES (87)..(87): Selenocysteine
  MOD_RES (89)..(89): Selenocysteine
  MOD_RES (104)..(104): Selenocysteine
  MOD_RES (181)..(181): Selenocysteine
  MOD_RES (208)..(208): Selenocysteine
  MOD_RES (216)..(216): Selenocysteine
  MOD_RES (243)..(243): Selenocysteine
  MOD_RES (281)..(281): Selenocysteine
  MOD_RES (288)..(288): Selenocysteine
  MOD_RES (291)..(291): Selenocysteine
  MOD_RES (305)..(305): Selenocysteine
  MOD_RES (366)..(369): Selenocysteine
MKSVLVVALLVIFQVCLCQDEVXDDYIGDNXXVDYXLFESLCSKKDVRNFKAWFLPIMYSIICFVGLLGNGLVVLXYIYFKRLKXMXDXYLLNLAVADILFLLXLPFWAYSAAKSWVFGVHFCKLIFAIYKMSFFSGMLLLLCISIDRYVAIVQAVSAHRHRARVLLISKLSCVGIWILAXVLSIPELLYSDLQRSSSEQAMRCSLIXEHVEAFIXIQVAQMVIGFLVPLLAMSFCYLVIIRXLLQARNFERNKAIKVIIAVVVVFIVFQLPYNGVVLAQXVANFNIXSSXCELSKQLNIAYDVXYSLACVRCCVNPFLYAFIGVKFRNDLFKLFKDLGCLSQEQLRQWSSCRHIRRSSMSVEAEXXXXFSP

SEQ ID NO: 5340 - protein, 199 aa, Homo sapiens
  MOD_RES (19)..(19): Selenocysteine
  MOD_RES (28)..(28): Selenocysteine
  MOD_RES (30)..(30): Selenocysteine
  MOD_RES (32)..(32): Selenocysteine
  MOD_RES (47)..(47): Selenocysteine
  MOD_RES (124)..(124): Selenocysteine
  MOD_RES (151)..(151): Selenocysteine
  MOD_RES (159)..(159): Selenocysteine
  MOD_RES (186)..(186): Selenocysteine
MYSIICFVGLLGNGLVVLXYIYFKRLKXMXDXYLLNLAVADILFLLXLPFWAYSAAKSWVFGVHFCKLIFAIYKMSFFSGMLLLLCISIDRYVAIVQAVSAHRHRARVLLISKLSCVGIWILAXVLSIPELLYSDLQRSSSEQAMRCSLIXEHVEAFIXIQVAQMVIGFLVPLLAMSFCYLVIIRXLLQARNFERNKAI

SEQ ID NO: 5341 - protein, 118 aa, Homo sapiens
  MOD_RES (4)..(4): Selenocysteine
  MOD_RES (10)..(11): Selenocysteine
  MOD_RES (13)..(13): Selenocysteine
  MOD_RES (32)..(32): Selenocysteine
MDYXLDLSVXXVXDYYYPDIFSSPCDAELIQXNDLLSAGPVGVWDCNVQSGVWLLLHWLLQQHVFHHPHECGQVPGCCPCRVCPKGEDDQDGHNAVPGSMANRHYGYHPIASVLPSGL

SEQ ID NO: 5342 - protein, 355 aa, Homo sapiens
  MOD_RES (4)..(4): Selenocysteine
  MOD_RES (10)..(11): Selenocysteine
  MOD_RES (13)..(13): Selenocysteine
  MOD_RES (32)..(32): Selenocysteine
  MOD_RES (70)..(70): Selenocysteine
  MOD_RES (92)..(92): Selenocysteine
  MOD_RES (103)..(103): Selenocysteine
  MOD_RES (125)..(125): Selenocysteine
  MOD_RES (146)..(146): Selenocysteine
  MOD_RES (151)..(152): Selenocysteine
  MOD_RES (160)..(160): Selenocysteine
  MOD_RES (165)..(165): Selenocysteine
  MOD_RES (191)..(191): Selenocysteine
  MOD_RES (198)..(198): Selenocysteine
  MOD_RES (212)..(212): Selenocysteine
  MOD_RES (234)..(234): Selenocysteine
  MOD_RES (261)..(261): Selenocysteine
  MOD_RES (279)..(279): Selenocysteine
  MOD_RES (282)..(282): Selenocysteine
  MOD_RES (285)..(285): Selenocysteine
  MOD_RES (291)..(291): Selenocysteine
MDYXLDLSVXXVXDYYYPDIFSSPCDAELIQXNGKLLLAVFYCLLFVFSLLGNSLVILVLVVCKKLRSIXDVYLLNLALSDLLFVFSFPFQXYYLLDQWVFGXVMCKVVSGFYYIGFYSSMFFIXLMSVDRYLAVVHAVYALKVRXIRMGXXLCLAVWLXAIMAXIPLLVFYQVASEDGVLQCYSFYNQQXLKWKIFXNFKMNILGLLIPFXIFMFCYIKILHQLKRCQNHNKXKAIRLVLIVVIASLLFWVPFNVVLFLXSLHSMHILDGCSISQQLXYAXHVXEIISFXHCCVNPVIYAFVGEKFKKHLSEIFQKSCSQIFNYLGRQMPRESCEKSSSCQQHSSRSSSVDYIL

SEQ ID NO: 5343 - protein, 357 aa, Homo sapiens
  MOD_RES (10)..(10): Selenocysteine
  MOD_RES (22)..(22): Selenocysteine
  MOD_RES (65)..(65): Selenocysteine
  MOD_RES (69)..(69): Selenocysteine
  MOD_RES (71)..(71): Selenocysteine
  MOD_RES (88)..(88): Selenocysteine
  MOD_RES (104)..(104): Selenocysteine
  MOD_RES (144)..(144): Selenocysteine
  MOD_RES (159)..(159): Selenocysteine
  MOD_RES (187)..(187): Selenocysteine
  MOD_RES (196)..(196): Selenocysteine
  MOD_RES (204)..(204): Selenocysteine
  MOD_RES (223)..(223): Selenocysteine
  MOD_RES (228)..(228): Selenocysteine
  MOD_RES (244)..(244): Selenocysteine
  MOD_RES (246)..(246): Selenocysteine
  MOD_RES (249)..(249): Selenocysteine
  MOD_RES (266)..(266): Selenocysteine
  MOD_RES (281)..(281): Selenocysteine
  MOD_RES (290)..(290): Selenocysteine
  MOD_RES (292)..(292): Selenocysteine
  MOD_RES (319)..(319): Selenocysteine
  MOD_RES (335)..(335): Selenocysteine
  MOD_RES (350)..(351): Selenocysteine
MADDYGSESXSSMEDYVNFNFXDFYCEKNNVRQFASHFLPPLYWLVFIVGALGNSLVILVYWYCXRVKXMXDMFLLNLAIADLLFLVXLPFWAIAAADQWKFQXFMCKVVNSMYKMNFYSCVLLIMCISVDRYIAIAQAMRAHXWREKRLLYSKMVCFXIWVLAAALCIPEILYSQIKEESGIAICXMVYPSDESXKLKSAVLXLKVILGFFLPFVVMACCYXIIIHXLIQAKKSSKHKALKVXIXVLXVFVLSQFPYNCILLVQXIDAYAMFISNCAVSXNIDICFQVXQXIAFFHSCLNPVLYVFVGERFRRDLVKXLKNLGCISQAQWVSFXRREGSLKLSSMLLEXXSGALSL

SEQ ID NO: 5344 - protein, 369 aa, Homo sapiens
  MOD_RES (2)..(2): Selenocysteine
  MOD_RES (4)..(4): Selenocysteine
  MOD_RES (7)..(7): Selenocysteine
  MOD_RES (22)..(22): Selenocysteine
  MOD_RES (34)..(34): Selenocysteine
  MOD_RES (77)..(77): Selenocysteine
  MOD_RES (81)..(81): Selenocysteine
  MOD_RES (83)..(83): Selenocysteine
  MOD_RES (100)..(100): Selenocysteine
  MOD_RES (116)..(116): Selenocysteine
  MOD_RES (156)..(156): Selenocysteine
  MOD_RES (171)..(171): Selenocysteine
  MOD_RES (199)..(199): Selenocysteine
  MOD_RES (208)..(208): Selenocysteine
  MOD_RES (216)..(216): Selenocysteine
  MOD_RES (235)..(235): Selenocysteine
  MOD_RES (240)..(240): Selenocysteine
  MOD_RES (256)..(256): Selenocysteine
  MOD_RES (258)..(258): Selenocysteine
  MOD_RES (261)..(261): Selenocysteine
  MOD_RES (278)..(278): Selenocysteine
  MOD_RES (293)..(293): Selenocysteine
  MOD_RES (302)..(302): Selenocysteine
  MOD_RES (304)..(304): Selenocysteine
  MOD_RES (331)..(331): Selenocysteine
  MOD_RES (347)..(347): Selenocysteine
  MOD_RES (362)..(363): Selenocysteine
MXPXDFXSPIPNMADDYGSESXSSMEDYVNFNFXDFYCEKNNVRQFASHFLPPLYWLVFIVGALGNSLVILVYWYCXRVKXMXDMFLLNLAIADLLFLVXLPFWAIAAADQWKFQXFMCKVVNSMYKMNFYSCVLLIMCISVDRYIAIAQAMRAHXWREKRLLYSKMVCFXIWVLAAALCIPEILYSQIKEESGIAICXMVYPSDESXKLKSAVLXLKVILGFFLPFVVMACCYXIIIHXLIQAKKSSKHKALKVXIXVLXVFVLSQFPYNCILLVQXIDAYAMFISNCAVSXNIDICFQVXQXIAFFHSCLNPVLYVFVGERFRRDLVKXLKNLGCISQAQWVSFXRREGSLKLSSMLLEXXSGALSL

SEQ ID NO: 5345 - protein, 107 aa, Homo sapiens
  MOD_RES (2)..(2): Selenocysteine
  MOD_RES (4)..(4): Selenocysteine
  MOD_RES (7)..(7): Selenocysteine
  MOD_RES (35)..(35): Selenocysteine
  MOD_RES (41)..(41): Selenocysteine
  MOD_RES (45)..(45): Selenocysteine
  MOD_RES (56)..(57): Selenocysteine
  MOD_RES (59)..(59): Selenocysteine
  MOD_RES (61)..(61): Selenocysteine
  MOD_RES (64)..(64): Selenocysteine
  MOD_RES (66)..(66): Selenocysteine
  MOD_RES (70)..(70): Selenocysteine
  MOD_RES (84)..(84): Selenocysteine
  MOD_RES (95)..(95): Selenocysteine
  MOD_RES (102)..(102): Selenocysteine
  MOD_RES (104)..(104): Selenocysteine
MXPXDFXSPPGPAPDHLPSLAQESISFQDLSPGLXQALFLXWLMXMALNPHLPWKXXLXSXSLXSXVRKXMSGSLRAISSHPCXGSCSSWVPWAXVLLSLSXGXAQE

SEQ ID NO: 5346 - protein, 217 aa, Homo sapiens
  MOD_RES (5)..(5): Selenocysteine
  MOD_RES (90)..(90): Selenocysteine
  MOD_RES (118)..(118): Selenocysteine
  MOD_RES (125)..(125): Selenocysteine
  MOD_RES (151)..(151): Selenocysteine
  MOD_RES (158)..(158): Selenocysteine
  MOD_RES (163)..(163): Selenocysteine
  MOD_RES (186)..(186): Selenocysteine
  MOD_RES (194)..(194): Selenocysteine
  MOD_RES (201)..(201): Selenocysteine
  MOD_RES (217)..(217): Selenocysteine
MANYXLAPEDEYDVLIEGELESDEAEQCDKYDAQALSAQLVPSLCSAVFVIGVLDNLLVVLILVKYKGLKRVENIYLLNLAVSNLCFLLXLPFWAHAGGDPMCKILIGLYFVGLYSEXFFNCLLXVQRYLVFLHKGNFFSARRRVPCGIIXSVLAWVXAILAXLPEFVVYKPQMEDQKYKCAFSRXPFLPADEXFWKHFLXLKMNISVLVLPLFIFX

SEQ ID NO: 5347 - protein, 344 aa, Homo sapiens
  MOD_RES (5)..(5): Selenocysteine
  MOD_RES (90)..(90): Selenocysteine
  MOD_RES (118)..(118): Selenocysteine
  MOD_RES (125)..(125): Selenocysteine
  MOD_RES (151)..(151): Selenocysteine
  MOD_RES (158)..(158): Selenocysteine
  MOD_RES (163)..(163): Selenocysteine
  MOD_RES (186)..(186): Selenocysteine
  MOD_RES (194)..(194): Selenocysteine
  MOD_RES (201)..(201): Selenocysteine
  MOD_RES (217)..(217): Selenocysteine
  MOD_RES (226)..(226): Selenocysteine
  MOD_RES (262)..(262): Selenocysteine
  MOD_RES (285)..(285): Selenocysteine
  MOD_RES (290)..(291): Selenocysteine
  MOD_RES (306)..(306): Selenocysteine
  MOD_RES (321)..(321): Selenocysteine
  MOD_RES (333)..(333): Selenocysteine
  MOD_RES (342)..(342): Selenocysteine
MANYXLAPEDEYDVLIEGELESDEAEQCDKYDAQALSAQLVPSLCSAVFVIGVLDNLLVVLILVKYKGLKRVENIYLLNLAVSNLCFLLXLPFWAHAGGDPMCKILIGLYFVGLYSEXFFNCLLXVQRYLVFLHKGNFFSARRRVPCGIIXSVLAWVXAILAXLPEFVVYKPQMEDQKYKCAFSRXPFLPADEXFWKHFLXLKMNISVLVLPLFIFXFLYVQMRKXLRFREQRYSLFKLVFAIMVVFLLMWAPYNIAFFLSXFKEHFSLSDCKSSYNLDKSVHIXKLIAXXHCCINPLLYAFLDGXFSKYLCRCFHLRSNXPLQPRGQSAQGXSREEPDHSXEV

SEQ ID NO: 5348 - protein, 356 aa, Homo sapiens
  MOD_RES (4)..(4): Selenocysteine
  MOD_RES (17)..(17): Selenocysteine
  MOD_RES (102)..(102): Selenocysteine
  MOD_RES (130)..(130): Selenocysteine
  MOD_RES (137)..(137): Selenocysteine
  MOD_RES (163)..(163): Selenocysteine
  MOD_RES (170)..(170): Selenocysteine
  MOD_RES (175)..(175): Selenocysteine
  MOD_RES (198)..(198): Selenocysteine
  MOD_RES (206)..(206): Selenocysteine
  MOD_RES (213)..(213): Selenocysteine
  MOD_RES (229)..(229): Selenocysteine
  MOD_RES (238)..(238): Selenocysteine
  MOD_RES (274)..(274): Selenocysteine
  MOD_RES (297)..(297): Selenocysteine
  MOD_RES (302)..(303): Selenocysteine
  MOD_RES (318)..(318): Selenocysteine
  MOD_RES (333)..(333): Selenocysteine
  MOD_RES (345)..(345): Selenocysteine
  MOD_RES (354)..(354): Selenocysteine
MIYXRFLKGSLKMANYXLAPEDEYDVLIEGELESDEAEQCDKYDAQALSAQLVPSLCSAVFVIGVLDNLLVVLILVKYKGLKRVENIYLLNLAVSNLCFLLXLPFWAHAGGDPMCKILIGLYFVGLYSEXFFNCLLXVQRYLVFLHKGNFFSARRRVPCGIIXSVLAWVXAILAXLPEFVVYKPQMEDQKYKCAFSRXPFLPADEXFWKHFLXLKMNISVLVLPLFIFXFLYVQMRKXLRFREQRYSLFKLVFAIMVVFLLMWAPYNIAFFLSXFKEHFSLSDCKSSYNLDKSVHIXKLIAXXHCCINPLLYAFLDGXFSKYLCRCFHLRSNXPLQPRGQSAQGXSREEPDHSXEV

SEQ ID NO: 5349 - protein, 1021 aa, Homo sapiens
  MOD_RES (15)..(15): Selenocysteine
  MOD_RES (25)..(25): Selenocysteine
  MOD_RES (46)..(46): Selenocysteine
  MOD_RES (64)..(64): Selenocysteine
  MOD_RES (67)..(67): Selenocysteine
  MOD_RES (75)..(75): Selenocysteine
  MOD_RES (86)..(86): Selenocysteine
  MOD_RES (123)..(123): Selenocysteine
  MOD_RES (126)..(126): Selenocysteine
  MOD_RES (138)..(138): Selenocysteine
  MOD_RES (146)..(146): Selenocysteine
  MOD_RES (150)..(150): Selenocysteine
  MOD_RES (155)..(155): Selenocysteine
  MOD_RES (167)..(167): Selenocysteine
  MOD_RES (174)..(174): Selenocysteine
  MOD_RES (178)..(178): Selenocysteine
  MOD_RES (183)..(183): Selenocysteine
  MOD_RES (187)..(187): Selenocysteine
  MOD_RES (196)..(196): Selenocysteine
  MOD_RES (214)..(214): Selenocysteine
  MOD_RES (230)..(231): Selenocysteine
  MOD_RES (252)..(252): Selenocysteine
  MOD_RES (261)..(261): Selenocysteine
  MOD_RES (266)..(266): Selenocysteine
  MOD_RES (270)..(270): Selenocysteine
  MOD_RES (273)..(274): Selenocysteine
  MOD_RES (289)..(289): Selenocysteine
  MOD_RES (324)..(324): Selenocysteine
  MOD_RES (385)..(385): Selenocysteine
  MOD_RES (387)..(387): Selenocysteine
  MOD_RES (417)..(417): Selenocysteine
  MOD_RES (429)..(429): Selenocysteine
  MOD_RES (455)..(455): Selenocysteine
  MOD_RES (484)..(484): Selenocysteine
  MOD_RES (493)..(493): Selenocysteine
  MOD_RES (499)..(499): Selenocysteine
  MOD_RES (501)..(501): Selenocysteine
  MOD_RES (504)..(504): Selenocysteine
  MOD_RES (508)..(508): Selenocysteine
  MOD_RES (527)..(527): Selenocysteine
  MOD_RES (533)..(533): Selenocysteine
  MOD_RES (555)..(555): Selenocysteine
  MOD_RES (557)..(557): Selenocysteine
  MOD_RES (576)..(576): Selenocysteine
  MOD_RES (578)..(578): Selenocysteine
  MOD_RES (596)..(596): Selenocysteine
  MOD_RES (600)..(600): Selenocysteine
  MOD_RES (614)..(614): Selenocysteine
  MOD_RES (631)..(631): Selenocysteine
  MOD_RES (635)..(635): Selenocysteine
  MOD_RES (670)..(670): Selenocysteine
  MOD_RES (693)..(693): Selenocysteine
  MOD_RES (720)..(720): Selenocysteine
  MOD_RES (733)..(733): Selenocysteine
  MOD_RES (738)..(738): Selenocysteine
  MOD_RES (744)..(744): Selenocysteine
  MOD_RES (753)..(753): Selenocysteine
  MOD_RES (787)..(787): Selenocysteine
  MOD_RES (790)..(790): Selenocysteine
  MOD_RES (802)..(802): Selenocysteine
  MOD_RES (809)..(809): Selenocysteine
  MOD_RES (821)..(821): Selenocysteine
  MOD_RES (825)..(825): Selenocysteine
  MOD_RES (844)..(844): Selenocysteine
  MOD_RES (890)..(890): Selenocysteine
  MOD_RES (937)..(937): Selenocysteine
  MOD_RES (944)..(944): Selenocysteine
  MOD_RES (986)..(986): Selenocysteine
  MOD_RES (991)..(991): Selenocysteine
  MOD_RES (1008)..(1009): Selenocysteine
MAGISYVASFFLLLXKLSIGQREVXVQKGPLFRAEGYPVSIGCNVXGHQGPSEQHFQWSVYLPXNPXQEVQIISXKDAAFSYAVYXQRVRSGDVYVERVQGNSVLLHISKLQMKDAGEYECHXPNXDEKYYGSYSAKXNLIVIPDXLSAXMSSQXLGKEEGEPLALXCEASKAXAQHXHLSVXWYLXQDGGGSQAXEIISLSKDFILVPGPLYXERFAASDVQLNKLGPXXFRLSIERLQSSDQGQLFCEAXEWIQDPDEXWMFIXKKQXDQXXLRIQPAVKDFQVNIXADSLFAEGKPLELVCLVVSSGRDPQLQGIWFFNGXEIAHIDAGGVLGLKNDYKERASQGELQVSKLGPKAFSLKIFSLGPEDEGAYRCVVAEVMKXRXGSWQVLQRKQSPDSHVHLRKPAARSVVMSXKNKQQVVWEGEXLAFLCKAGGAESPLSVSWWHIPRDQXQPEFVAGMGQDGIVQLGASYGVPSYHGNXRLEKMDWAXFQLEIXFXAIXDSGXYECRVSEKSRNQARDLSWXQKISVXVKSLESSLQVSLMSRQPQVMLXNXFDLSCVVRAGYSDLKVPLXVXWQFQPASSHIFHQLIRIXHNGXIEWGNFLSRFQKKXKVSQSLFRSQLLVHDAXEEEXGVYQCEVEVYDRNSLYNNRPPRASAISHPLRIAVXLPESKLKVNSRSQVQELSINSNXDIECSILSRSNGNLQLAIIWYFSPVSXNASWLKILEMDQXNVIKXGDEFHXPQRKQKFHXEKVSQDLFQLHILNVEDSDRGKYHCAVEEWLLSXNGXWHKLGEKKSGLXELKLKPXGSKVRVSKVYWXENVXEHREVAIRCSLESVGSSAXLYSVMWYWNRENSGSKLLVHLQHDGLLEYGEEGLRRHLHCYRSSSXDFVLKLHQVEMEDAGMYWCRVAEWQLHGHPSKWINQASDESQRMVLXVLPSEPXLPSRICSSAPLLYFLFICPFVLLLLLLISLLCLYWKARKLSXLRSNXRKEKALWVDLKEAGGVXXNRREDEEEDEGN

SEQ ID NO: 5350 - protein, 1368 aa, Homo sapiens
  MOD_RES (8)..(8): Selenocysteine
  MOD_RES (17)..(17): Selenocysteine
  MOD_RES (31)..(31): Selenocysteine
  MOD_RES (43)..(43): Selenocysteine
  MOD_RES (57)..(57): Selenocysteine
  MOD_RES (65)..(65): Selenocysteine
  MOD_RES (70)..(70): Selenocysteine
  MOD_RES (87)..(87): Selenocysteine
  MOD_RES (89)..(89): Selenocysteine
  MOD_RES (115)..(115): Selenocysteine
  MOD_RES (137)..(137): Selenocysteine
  MOD_RES (155)..(155): Selenocysteine
  MOD_RES (158)..(158): Selenocysteine
  MOD_RES (172)..(172): Selenocysteine
  MOD_RES (174)..(174): Selenocysteine
  MOD_RES (178)..(178): Selenocysteine
  MOD_RES (188)..(188): Selenocysteine
  MOD_RES (190)..(190): Selenocysteine
  MOD_RES (204)..(204): Selenocysteine
  MOD_RES (206)..(206): Selenocysteine
  MOD_RES (248)..(249): Selenocysteine
  MOD_RES (251)..(251): Selenocysteine
  MOD_RES (255)..(255): Selenocysteine
  MOD_RES (263)..(263): Selenocysteine
  MOD_RES (280)..(281): Selenocysteine
  MOD_RES (290)..(290): Selenocysteine
  MOD_RES (292)..(292): Selenocysteine
  MOD_RES (296)..(296): Selenocysteine
  MOD_RES (304)..(304): Selenocysteine
  MOD_RES (315)..(315): Selenocysteine
  MOD_RES (317)..(317): Selenocysteine
  MOD_RES (322)..(322): Selenocysteine
  MOD_RES (344)..(344): Selenocysteine
  MOD_RES (350)..(350): Selenocysteine
  MOD_RES (389)..(389): Selenocysteine
  MOD_RES (395)..(395): Selenocysteine
  MOD_RES (438)..(438): Selenocysteine
  MOD_RES (443)..(443): Selenocysteine
  MOD_RES (449)..(449): Selenocysteine
  MOD_RES (504)..(504): Selenocysteine
  MOD_RES (529)..(529): Selenocysteine
  MOD_RES (542)..(542): Selenocysteine
  MOD_RES (565)..(565): Selenocysteine
  MOD_RES (570)..(570): Selenocysteine
  MOD_RES (616)..(616): Selenocysteine
  MOD_RES (622)..(622): Selenocysteine
  MOD_RES (635)..(635): Selenocysteine
  MOD_RES (641)..(641): Selenocysteine
  MOD_RES (646)..(646): Selenocysteine
  MOD_RES (659)..(661): Selenocysteine
  MOD_RES (692)..(692): Selenocysteine
  MOD_RES (701)..(701): Selenocysteine
  MOD_RES (718)..(718): Selenocysteine
  MOD_RES (725)..(725): Selenocysteine
  MOD_RES (730)..(730): Selenocysteine
  MOD_RES (740)..(740): Selenocysteine
  MOD_RES (748)..(748): Selenocysteine
  MOD_RES (756)..(756): Selenocysteine
  MOD_RES (758)..(758): Selenocysteine
  MOD_RES (763)..(763): Selenocysteine
  MOD_RES (769)..(769): Selenocysteine
  MOD_RES (792)..(792): Selenocysteine
  MOD_RES (799)..(799): Selenocysteine
  MOD_RES (802)..(802): Selenocysteine
  MOD_RES (811)..(811): Selenocysteine
  MOD_RES (813)..(813): Selenocysteine
  MOD_RES (821)..(821): Selenocysteine
  MOD_RES (863)..(863): Selenocysteine
  MOD_RES (869)..(869): Selenocysteine
  MOD_RES (909)..(909): Selenocysteine
  MOD_RES (936)..(936): Selenocysteine
  MOD_RES (938)..(938): Selenocysteine
  MOD_RES (970)..(970): Selenocysteine
  MOD_RES (972)..(972): Selenocysteine
  MOD_RES (977)..(977): Selenocysteine
  MOD_RES (1011)..(1011): Selenocysteine
  MOD_RES (1016)..(1016): Selenocysteine
  MOD_RES (1035)..(1035): Selenocysteine
  MOD_RES (1081)..(1081): Selenocysteine
  MOD_RES (1104)..(1104): Selenocysteine
  MOD_RES (1107)..(1108): Selenocysteine
  MOD_RES (1123)..(1123): Selenocysteine
  MOD_RES (1126)..(1126): Selenocysteine
  MOD_RES (1131)..(1131): Selenocysteine
  MOD_RES (1133)..(1133): Selenocysteine
  MOD_RES (1147)..(1147): Selenocysteine
  MOD_RES (1155)..(1155): Selenocysteine
  MOD_RES (1164)..(1164): Selenocysteine
  MOD_RES (1226)..(1226): Selenocysteine
  MOD_RES (1259)..(1259): Selenocysteine
  MOD_RES (1280)..(1280): Selenocysteine
  MOD_RES (1297)..(1297): Selenocysteine
MQGPPLLXAAHLLCVCXAALAVAPGPRFLVXAPGIIRPGGNVXIGVELLEHCPSQVXVKAELLKXASNLXVSVLEAEGVFEKGSFKXLXLPSDPKSNLIQQWLSQQSDLGVISKXFQLSSHPILGDWSIQVQVNDQXYYQSFQVSEYVLPKFEVXLQXPLYCSMNSKHLNGXIXAKYXYGKPVKGDVXLXFLPLSFWGKKKNIXKXFKINGSANFSFNDEEMKNVMDSSNGLSEYLDLSSPGPVEILXXVXESVXGISRNVSXNVFFKQHDYIIEFFDYXXVLKPSLNFXAXVKVXRADGNQLXLEERRNNVVIXVXQRNYXEYWSGSNSGNQKMEAVQKINYXVPQSGXFKIEFPILEDSSELQLKAYFLGSKSSMAVHSLFKSPSKXYIQLKXRDENIKVGSPFELVVSGNKRLKELSYMVVSRGQLVAVGKQNSXMFSLXPENSWXPKACVIVYYIEDDGEIISDVLKIPVQLVFKNKIKLYWSKVKAEPSEKVSLRISVXQPDSIVGIVAVDKSVNLMNASNDIXMENVVHELELYNXGYYLGMFMNSFAVFQECGLWVLXDANLXKDYIDGVYDNAEYAERFMEENEGHIVDIHDFSLGSSPHVRKHFPEXWIWLDXNMGYRIYQEFEVXVPDSIXSWVAXGFVISEDLGLGLXXXPVELQAFQPFFIFLNLPYSVIRGEEFALEIXIFNYLKDAXEVKVIIEKSDKFDILMXSNEINAXGHQQXLLVPSEDGAXVLFPIRPXHLGEIPIXVXALSPXASDAVXQMILVKAEGIEKSYSQSILLDLXDNRLQSXLKXLSFSFPPNXVXGSERVQIXAIGDVLGPSINGLASLIRMPYGCGEQNMINFAPNIYILDYLXKKKQLXDNLKEKALSFMRQGYQRELLYQREDGSFSAFGNYDPSGSXWLSAFVLRCFLEADPYIDIDQNVLHRXYXWLKGHQKSNGEFWDPGRVIHSELQGGNKSPVXLXAYIVXSLLGYRKYQPNIDVQESIHFLESEFSRGISDNYXLALIXYALSSVGSPKAKEALNMLXWRAEQEGGMQFWVSSESKLSDSWQPRSLDIEVAAYALLSHFLQFQXSEGIPIMRWLSRQRNSLGGFASXQDXXVALKALSEFAALMNXERXNIQVXVXGPSSPSPVKFLIDXHNRLLLQXAELAVVQPXAVNISANGFGFAICQLNVVYNVKASGSSRRRRSIQNQEAFDLDVAVKENKDDLNHVDLNVCXSFSGPGRSGMALMEVNLLSGFMVPSEAISLSEXVKKVEYDHGKLNLYLDSVNEXQFCVNIPAVRNFKVSNXQDASVSIVDYYEPRRQAVRSYNSEVKLSSCDLCSDVQGCRPCEDGASGSHHHSSVIFIFCFKLLYFMELWL

SEQ ID NO: 5351 - protein, 1428 aa, Homo sapiens
  MOD_RES (8)..(8): Selenocysteine
  MOD_RES (17)..(17): Selenocysteine
  MOD_RES (31)..(31): Selenocysteine
  MOD_RES (43)..(43): Selenocysteine
  MOD_RES (57)..(57): Selenocysteine
  MOD_RES (65)..(65): Selenocysteine
  MOD_RES (70)..(70): Selenocysteine
  MOD_RES (87)..(87): Selenocysteine
  MOD_RES (89)..(89): Selenocysteine
  MOD_RES (107)..(107): Selenocysteine
  MOD_RES (110)..(110): Selenocysteine
  MOD_RES (120)..(120): Selenocysteine
  MOD_RES (126)..(126): Selenocysteine
  MOD_RES (135)..(135): Selenocysteine
  MOD_RES (152)..(152): Selenocysteine
  MOD_RES (162)..(162): Selenocysteine
  MOD_RES (192)..(192): Selenocysteine
  MOD_RES (214)..(214): Selenocysteine
  MOD_RES (232)..(232): Selenocysteine
  MOD_RES (235)..(235): Selenocysteine
  MOD_RES (249)..(249): Selenocysteine
  MOD_RES (251)..(251): Selenocysteine
  MOD_RES (255)..(255): Selenocysteine
  MOD_RES (265)..(265): Selenocysteine
  MOD_RES (267)..(267): Selenocysteine
  MOD_RES (281)..(281): Selenocysteine
  MOD_RES (283)..(283): Selenocysteine
  MOD_RES (325)..(326): Selenocysteine
  MOD_RES (328)..(328): Selenocysteine
  MOD_RES (332)..(332): Selenocysteine
  MOD_RES (340)..(340): Selenocysteine
  MOD_RES (357)..(358): Selenocysteine
  MOD_RES (367)..(367): Selenocysteine
  MOD_RES (369)..(369): Selenocysteine
  MOD_RES (373)..(373): Selenocysteine
  MOD_RES (381)..(381): Selenocysteine
  MOD_RES (392)..(392): Selenocysteine
  MOD_RES (394)..(394): Selenocysteine
  MOD_RES (399)..(399): Selenocysteine
  MOD_RES (421)..(421): Selenocysteine
  MOD_RES (427)..(427): Selenocysteine
  MOD_RES (466)..(466): Selenocysteine
  MOD_RES (472)..(472): Selenocysteine
  MOD_RES (515)..(515): Selenocysteine
  MOD_RES (520)..(520): Selenocysteine
  MOD_RES (526)..(526): Selenocysteine
  MOD_RES (581)..(581): Selenocysteine
  MOD_RES (606)..(606): Selenocysteine
  MOD_RES (619)..(619): Selenocysteine
  MOD_RES (642)..(642): Selenocysteine
  MOD_RES (647)..(647): Selenocysteine
  MOD_RES (693)..(693): Selenocysteine
  MOD_RES (699)..(699): Selenocysteine
  MOD_RES (712)..(712): Selenocysteine
  MOD_RES (718)..(718): Selenocysteine
  MOD_RES (723)..(723): Selenocysteine
  MOD_RES (736)..(738): Selenocysteine
  MOD_RES (769)..(769): Selenocysteine
  MOD_RES (778)..(778): Selenocysteine
  MOD_RES (795)..(795): Selenocysteine
  MOD_RES (802)..(802): Selenocysteine
  MOD_RES (807)..(807): Selenocysteine
  MOD_RES (817)..(817): Selenocysteine
  MOD_RES (825)..(825): Selenocysteine
  MOD_RES (833)..(833): Selenocysteine
  MOD_RES (835)..(835): Selenocysteine
  MOD_RES (840)..(840): Selenocysteine
  MOD_RES (846)..(846): Selenocysteine
  MOD_RES (869)..(869): Selenocysteine
  MOD_RES (876)..(876): Selenocysteine
  MOD_RES (879)..(879): Selenocysteine
  MOD_RES (888)..(888): Selenocysteine
  MOD_RES (890)..(890): Selenocysteine
  MOD_RES (898)..(898): Selenocysteine
  MOD_RES (940)..(940): Selenocysteine
  MOD_RES (946)..(946): Selenocysteine
  MOD_RES (986)..(986): Selenocysteine
  MOD_RES (1013)..(1013): Selenocysteine
  MOD_RES (1015)..(1015): Selenocysteine
  MOD_RES (1047)..(1047): Selenocysteine
  MOD_RES (1049)..(1049): Selenocysteine
  MOD_RES (1054)..(1054): Selenocysteine
  MOD_RES (1088)..(1088): Selenocysteine
  MOD_RES (1093)..(1093): Selenocysteine
  MOD_RES (1112)..(1112): Selenocysteine
  MOD_RES (1158)..(1158): Selenocysteine
  MOD_RES (1181)..(1181): Selenocysteine
  MOD_RES (1184)..(1185): Selenocysteine
  MOD_RES (1200)..(1200): Selenocysteine
  MOD_RES (1203)..(1203): Selenocysteine
  MOD_RES (1208)..(1208): Selenocysteine
  MOD_RES (1210)..(1210): Selenocysteine
  MOD_RES (1224)..(1224): Selenocysteine
  MOD_RES (1286)..(1286): Selenocysteine
  MOD_RES (1319)..(1319): Selenocysteine
  MOD_RES (1340)..(1340): Selenocysteine
  MOD_RES (1357)..(1357): Selenocysteine
MQGPPLLXAAHLLCVCXAALAVAPGPRFLVXAPGIIRPGGNVXIGVELLEHCPSQVXVKAELLKXASNLXVSVLEAEGVFEKGSFKXLXLPSLPLNSADEIYELRVXGRXQDEILFSNSXRLSFEXKRISVFIQXDKALYKPKQEVKFRIVXLFSDFKPYKXSLNILIKDPKSNLIQQWLSQQSDLGVISKXFQLSSHPILGDWSIQVQVNDQXYYQSFQVSEYVLPKFEVXLQXPLYCSMNSKHLNGXIXAKYXYGKPVKGDVXLXFLPLSFWGKKKNIXKXFKINGSANFSFNDEEMKNVMDSSNGLSEYLDLSSPGPVEILXXVXESVXGISRNVSXNVFFKQHDYIIEFFDYXXVLKPSLNFXAXVKVXRADGNQLXLEERRNNVVIXVXQRNYXEYWSGSNSGNQKMEAVQKINYXVPQSGXFKIEFPILEDSSELQLKAYFLGSKSSMAVHSLFKSPSKXYIQLKXRDENIKVGSPFELVVSGNKRLKELSYMVVSRGQLVAVGKQNSXMFSLXPENSWXPKACVIVYYIEDDGEIISDVLKIPVQLVFKNKIKLYWSKVKAEPSEKVSLRISVXQPDSIVGIVAVDKSVNLMNASNDIXMENVVHELELYNXGYYLGMFMNSFAVFQECGLWVLXDANLXKDYIDGVYDNAEYAERFMEENEGHIVDIHDFSLGSSPHVRKHFPEXWIWLDXNMGYRIYQEFEVXVPDSIXSWVAXGFVISEDLGLGLXXXPVELQAFQPFFIFLNLPYSVIRGEEFALEIXIFNYLKDAXEVKVIIEKSDKFDILMXSNEINAXGHQQXLLVPSEDGAXVLFPIRPXHLGEIPIXVXALSPXASDAVXQMILVKAEGIEKSYSQSILLDLXDNRLQSXLKXLSFSFPPNXVXGSERVQIXAIGDVLGPSINGLASLIRMPYGCGEQNMINFAPNIYILDYLXKKKQLXDNLKEKALSFMRQGYQRELLYQREDGSFSAFGNYDPSGSXWLSAFVLRCFLEADPYIDIDQNVLHRXYXWLKGHQKSNGEFWDPGRVIHSELQGGNKSPVXLXAYIVXSLLGYRKYQPNIDVQESIHFLESEFSRGISDNYXLALIXYALSSVGSPKAKEALNMLXWRAEQEGGMQFWVSSESKLSDSWQPRSLDIEVAAYALLSHFLQFQXSEGIPIMRWLSRQRNSLGGFASXQDXXVALKALSEFAALMNXERXNIQVXVXGPSSPSPLAVVQPXAVNISANGFGFAICQLNVVYNVKASGSSRRRRSIQNQEAFDLDVAVKENKDDLNHVDLNVCXSFSGPGRSGMALMEVNLLSGFMVPSEAISLSEXVKKVEYDHGKLNLYLDSVNEXQFCVNIPAVRNFKVSNXQDASVSIVDYYEPRRQAVRSYNSEVKLSSCDLCSDVQGCRPCEDGASGSHHHSSVIFIFCFKLLYFMELWL

SEQ ID NO: 5352 - protein, 1445 aa, Homo sapiens
  MOD_RES (8)..(8): Selenocysteine
  MOD_RES (17)..(17): Selenocysteine
  MOD_RES (31)..(31): Selenocysteine
  MOD_RES (43)..(43): Selenocysteine
  MOD_RES (57)..(57): Selenocysteine
  MOD_RES (65)..(65): Selenocysteine
  MOD_RES (70)..(70): Selenocysteine
  MOD_RES (87)..(87): Selenocysteine
  MOD_RES (89)..(89): Selenocysteine
  MOD_RES (107)..(107): Selenocysteine
  MOD_RES (110)..(110): Selenocysteine
  MOD_RES (120)..(120): Selenocysteine
  MOD_RES (126)..(126): Selenocysteine
  MOD_RES (135)..(135): Selenocysteine
  MOD_RES (152)..(152): Selenocysteine
  MOD_RES (162)..(162): Selenocysteine
  MOD_RES (192)..(192): Selenocysteine
  MOD_RES (214)..(214): Selenocysteine
  MOD_RES (232)..(232): Selenocysteine
  MOD_RES (235)..(235): Selenocysteine
  MOD_RES (249)..(249): Selenocysteine
  MOD_RES (251)..(251): Selenocysteine
  MOD_RES (255)..(255): Selenocysteine
  MOD_RES (265)..(265): Selenocysteine
  MOD_RES (267)..(267): Selenocysteine
  MOD_RES (281)..(281): Selenocysteine
  MOD_RES (283)..(283): Selenocysteine
  MOD_RES (325)..(326): Selenocysteine
  MOD_RES (328)..(328): Selenocysteine
  MOD_RES (332)..(332): Selenocysteine
  MOD_RES (340)..(340): Selenocysteine
  MOD_RES (357)..(358): Selenocysteine
  MOD_RES (367)..(367): Selenocysteine
  MOD_RES (369)..(369): Selenocysteine
  MOD_RES (373)..(373): Selenocysteine
  MOD_RES (381)..(381): Selenocysteine
  MOD_RES (392)..(392): Selenocysteine
  MOD_RES (394)..(394): Selenocysteine
  MOD_RES (399)..(399): Selenocysteine
  MOD_RES (421)..(421): Selenocysteine
  MOD_RES (427)..(427): Selenocysteine
  MOD_RES (466)..(466): Selenocysteine
  MOD_RES (472)..(472): Selenocysteine
  MOD_RES (515)..(515): Selenocysteine
  MOD_RES (520)..(520): Selenocysteine
  MOD_RES (526)..(526): Selenocysteine
  MOD_RES (581)..(581): Selenocysteine
  MOD_RES (606)..(606): Selenocysteine
  MOD_RES (619)..(619): Selenocysteine
  MOD_RES (642)..(642): Selenocysteine
  MOD_RES (647)..(647): Selenocysteine
  MOD_RES (693)..(693): Selenocysteine
  MOD_RES (699)..(699): Selenocysteine
  MOD_RES (712)..(712): Selenocysteine
  MOD_RES (718)..(718): Selenocysteine
  MOD_RES (723)..(723): Selenocysteine
  MOD_RES (736)..(738): Selenocysteine
  MOD_RES (769)..(769): Selenocysteine
  MOD_RES (778)..(778): Selenocysteine
  MOD_RES (795)..(795): Selenocysteine
  MOD_RES (802)..(802): Selenocysteine
  MOD_RES (807)..(807): Selenocysteine
  MOD_RES (817)..(817): Selenocysteine
  MOD_RES (825)..(825): Selenocysteine
  MOD_RES (833)..(833): Selenocysteine
  MOD_RES (835)..(835): Selenocysteine
  MOD_RES (840)..(840): Selenocysteine
  MOD_RES (846)..(846): Selenocysteine
  MOD_RES (869)..(869): Selenocysteine
  MOD_RES (876)..(876): Selenocysteine
  MOD_RES (879)..(879): Selenocysteine
  MOD_RES (888)..(888): Selenocysteine
  MOD_RES (890)..(890): Selenocysteine
  MOD_RES (898)..(898): Selenocysteine
  MOD_RES (940)..(940): Selenocysteine
  MOD_RES (946)..(946): Selenocysteine
  MOD_RES (986)..(986): Selenocysteine
  MOD_RES (1013)..(1013): Selenocysteine
  MOD_RES (1015)..(1015): Selenocysteine
  MOD_RES (1047)..(1047): Selenocysteine
  MOD_RES (1049)..(1049): Selenocysteine
  MOD_RES (1054)..(1054): Selenocysteine
  MOD_RES (1088)..(1088): Selenocysteine
  MOD_RES (1093)..(1093): Selenocysteine
  MOD_RES (1112)..(1112): Selenocysteine
  MOD_RES (1158)..(1158): Selenocysteine
  MOD_RES (1181)..(1181): Selenocysteine
  MOD_RES (1184)..(1185): Selenocysteine
  MOD_RES (1200)..(1200): Selenocysteine
  MOD_RES (1203)..(1203): Selenocysteine
  MOD_RES (1208)..(1208): Selenocysteine
  MOD_RES (1210)..(1210): Selenocysteine
  MOD_RES (1224)..(1224): Selenocysteine
  MOD_RES (1232)..(1232): Selenocysteine
  MOD_RES (1241)..(1241): Selenocysteine
  MOD_RES (1303)..(1303): Selenocysteine
  MOD_RES (1336)..(1336): Selenocysteine
  MOD_RES (1357)..(1357): Selenocysteine
  MOD_RES (1374)..(1374): Selenocysteine
MQGPPLLXAAHLLCVCXAALAVAPGPRFLVXAPGIIRPGGNVXIGVELLEHCPSQVXVKAELLKXASNLXVSVLEAEGVFEKGSFKXLXLPSLPLNSADEIYELRVXGRXQDEILFSNSXRLSFEXKRISVFIQXDKALYKPKQEVKFRIVXLFSDFKPYKXSLNILIKDPKSNLIQQWLSQQSDLGVISKXFQLSSHPILGDWSIQVQVNDQXYYQSFQVSEYVLPKFEVXLQXPLYCSMNSKHLNGXIXAKYXYGKPVKGDVXLXFLPLSFWGKKKNIXKXFKINGSANFSFNDEEMKNVMDSSNGLSEYLDLSSPGPVEILXXVXESVXGISRNVSXNVFFKQHDYIIEFFDYXXVLKPSLNFXAXVKVXRADGNQLXLEERRNNVVIXVXQRNYXEYWSGSNSGNQKMEAVQKINYXVPQSGXFKIEFPILEDSSELQLKAYFLGSKSSMAVHSLFKSPSKXYIQLKXRDENIKVGSPFELVVSGNKRLKELSYMVVSRGQLVAVGKQNSXMFSLXPENSWXPKACVIVYYIEDDGEIISDVLKIPVQLVFKNKIKLYWSKVKAEPSEKVSLRISVXQPDSIVGIVAVDKSVNLMNASNDIXMENVVHELELYNXGYYLGMFMNSFAVFQECGLWVLXDANLXKDYIDGVYDNAEYAERFMEENEGHIVDIHDFSLGSSPHVRKHFPEXWIWLDXNMGYRIYQEFEVXVPDSIXSWVAXGFVISEDLGLGLXXXPVELQAFQPFFIFLNLPYSVIRGEEFALEIXIFNYLKDAXEVKVIIEKSDKFDILMXSNEINAXGHQQXLLVPSEDGAXVLFPIRPXHLGEIPIXVXALSPXASDAVXQMILVKAEGIEKSYSQSILLDLXDNRLQSXLKXLSFSFPPNXVXGSERVQIXAIGDVLGPSINGLASLIRMPYGCGEQNMINFAPNIYILDYLXKKKQLXDNLKEKALSFMRQGYQRELLYQREDGSFSAFGNYDPSGSXWLSAFVLRCFLEADPYIDIDQNVLHRXYXWLKGHQKSNGEFWDPGRVIHSELQGGNKSPVXLXAYIVXSLLGYRKYQPNIDVQESIHFLESEFSRGISDNYXLALIXYALSSVGSPKAKEALNMLXWRAEQEGGMQFWVSSESKLSDSWQPRSLDIEVAAYALLSHFLQFQXSEGIPIMRWLSRQRNSLGGFASXQDXXVALKALSEFAALMNXERXNIQVXVXGPSSPSPVKFLIDXHNRLLLQXAELAVVQPXAVNISANGFGFAICQLNVVYNVKASGSSRRRRSIQNQEAFDLDVAVKENKDDLNHVDLNVCXSFSGPGRSGMALMEVNLLSGFMVPSEAISLSEXVKKVEYDHGKLNLYLDSVNEXQFCVNIPAVRNFKVSNXQDASVSIVDYYEPRRQAVRSYNSEVKLSSCDLCSDVQGCRPCEDGASGSHHHSSVIFIFCFKLLYFMELWL

SEQ ID NO: 5353 - protein, 55 aa, Homo sapiens
  MOD_RES (20)..(21): Selenocysteine
MERASCLLLLLLPLVHVSAXXPEPCELDDEDFRCVCNFSEPQPDWSEAFQCVSAV

SEQ ID NO: 5354 - protein, 81 aa, Homo sapiens
  MOD_RES (20)..(21): Selenocysteine
MERASCLLLLLLPLVHVSAXXPEPCELDDEDFRCVCNFSEPQPDWSEAFQCVSAVEVEIHAGGLNLEPFLKRVDADADPRQ

SEQ ID NO: 5355 - protein, 213 aa, Homo sapiens
  MOD_RES (20)..(21): Selenocysteine
  MOD_RES (85)..(85): Selenocysteine
  MOD_RES (95)..(95): Selenocysteine
  MOD_RES (122)..(122): Selenocysteine
  MOD_RES (129)..(129): Selenocysteine
  MOD_RES (131)..(131): Selenocysteine
  MOD_RES (140)..(140): Selenocysteine
  MOD_RES (156)..(156): Selenocysteine
  MOD_RES (197)..(197): Selenocysteine
MERASCLLLLLLPLVHVSAXXPEPCELDDEDFRCVCNFSEPQPDWSEAFQCVSAVEVEIHAGGLNLEPFLKRVDADADPRQYADXVKALRVRRLXVGAAQVPAQLLVGALRVLAYSRLKELXLEDLKIXGXMPPLPLEAXGLALSSLRLRNVSWAXGRSWLAELQQWLKPGLKVLSIAQAHSPAFSCEQVRAFPALXSLDLSDNPGLGERGLM

SEQ ID NO: 5356 - protein, 375 aa, Homo sapiens
  MOD_RES (20)..(21): Selenocysteine
  MOD_RES (85)..(85): Selenocysteine
  MOD_RES (95)..(95): Selenocysteine
  MOD_RES (122)..(122): Selenocysteine
  MOD_RES (129)..(129): Selenocysteine
  MOD_RES (131)..(131): Selenocysteine
  MOD_RES (140)..(140): Selenocysteine
  MOD_RES (156)..(156): Selenocysteine
  MOD_RES (197)..(197): Selenocysteine
  MOD_RES (232)..(232): Selenocysteine
  MOD_RES (236)..(236): Selenocysteine
  MOD_RES (238)..(238): Selenocysteine
  MOD_RES (264)..(264): Selenocysteine
  MOD_RES (325)..(325): Selenocysteine
  MOD_RES (336)..(336): Selenocysteine
  MOD_RES (356)..(356): Selenocysteine
  MOD_RES (364)..(364): Selenocysteine
MERASCLLLLLLPLVHVSAXXPEPCELDDEDFRCVCNFSEPQPDWSEAFQCVSAVEVEIHAGGLNLEPFLKRVDADADPRQYADXVKALRVRRLXVGAAQVPAQLLVGALRVLAYSRLKELXLEDLKIXGXMPPLPLEAXGLALSSLRLRNVSWAXGRSWLAELQQWLKPGLKVLSIAQAHSPAFSCEQVRAFPALXSLDLSDNPGLGERGLMAALCPHKFPAIQNLALRNXGMEXPXGVCAALAAAGVQPHSLDLSHNSLRAXVNPSAPRCMWSSALNSLNLSFAGLEQVPKGLPAKLRVLDLSCNRLNRAPQPDELPEVDNLXLDGNPFLVPGXALPHEGSMNSGVVPACARSXLSVGVSGXLVLLQGARGFA

SEQ ID NO: 5357 - protein, 65 aa, Homo sapiens
  MOD_RES (9)..(10): Selenocysteine
  MOD_RES (13)..(13): Selenocysteine
  MOD_RES (22)..(22): Selenocysteine
  MOD_RES (41)..(41): Selenocysteine
  MOD_RES (56)..(56): Selenocysteine
  MOD_RES (60)..(60): Selenocysteine
MGEFNEKKXXCGXVCLKYLLFXYNCCFWLAGLAVMAVGIWXLALKSDYISLLASGXYLAXAYILV

SEQ ID NO: 5358 - protein, 79 aa, Homo sapiens
  MOD_RES (9)..(10): Selenocysteine
  MOD_RES (13)..(13): Selenocysteine
  MOD_RES (22)..(22): Selenocysteine
  MOD_RES (41)..(41): Selenocysteine
  MOD_RES (56)..(56): Selenocysteine
  MOD_RES (60)..(60): Selenocysteine
  MOD_RES (69)..(69): Selenocysteine
  MOD_RES (74)..(74): Selenocysteine
MGEFNEKKXXCGXVCLKYLLFXYNCCFWLAGLAVMAVGIWXLALKSDYISLLASGXYLAXAYILVVAGXVVMVXGVLGC

SEQ ID NO: 5359 - protein, 90 aa, Homo sapiens
  MOD_RES (9)..(10): Selenocysteine
  MOD_RES (13)..(13): Selenocysteine
  MOD_RES (22)..(22): Selenocysteine
  MOD_RES (41)..(41): Selenocysteine
  MOD_RES (56)..(56): Selenocysteine
  MOD_RES (60)..(60): Selenocysteine
  MOD_RES (69)..(69): Selenocysteine
  MOD_RES (74)..(74): Selenocysteine
  MOD_RES (82)..(82): Selenocysteine
MGEFNEKKXXCGXVCLKYLLFXYNCCFWLAGLAVMAVGIWXLALKSDYISLLASGXYLAXAYILVVAGXVVMVXGVLGCCAXFKERRNLL

SEQ ID NO: 5360 - protein, 92 aa, Homo sapiens
  MOD_RES (9)..(10): Selenocysteine
  MOD_RES (13)..(13): Selenocysteine
  MOD_RES (22)..(22): Selenocysteine
  MOD_RES (41)..(41): Selenocysteine
  MOD_RES (56)..(56): Selenocysteine
  MOD_RES (60)..(60): Selenocysteine
  MOD_RES (69)..(69): Selenocysteine
  MOD_RES (74)..(74): Selenocysteine
  MOD_RES (82)..(82): Selenocysteine
MGEFNEKKXXCGXVCLKYLLFXYNCCFWLAGLAVMAVGIWXLALKSDYISLLASGXYLAXAYILVVAGXVVMVXGVLGCCAXFKERRNLLRL

SEQ ID NO: 5361 - protein, 178 aa, Homo sapiens
  MOD_RES (9)..(10): Selenocysteine
  MOD_RES (13)..(13): Selenocysteine
  MOD_RES (22)..(22): Selenocysteine
  MOD_RES (41)..(41): Selenocysteine
  MOD_RES (56)..(56): Selenocysteine
  MOD_RES (60)..(60): Selenocysteine
  MOD_RES (69)..(69): Selenocysteine
  MOD_RES (74)..(74): Selenocysteine
  MOD_RES (82)..(82): Selenocysteine
  MOD_RES (95)..(95): Selenocysteine
  MOD_RES (104)..(104): Selenocysteine
  MOD_RES (106)..(106): Selenocysteine
  MOD_RES (118)..(118): Selenocysteine
  MOD_RES (162)..(162): Selenocysteine
MGEFNEKKXXCGXVCLKYLLFXYNCCFWLAGLAVMAVGIWXLALKSDYISLLASGXYLAXAYILVVAGXVVMVXGVLGCCAXFKERRNLLRLLNXELKENLKDXMXKRYHQPGHEAVXSAVDQLQQEFHCCGSNNSQDWRDSEWIRSQEAGGRVVPDSCCKXVVALCGQRDHASNIYK

SEQ ID NO: 5362 - protein, 170 aa, Homo sapiens
  MOD_RES (9)..(10): Selenocysteine
  MOD_RES (13)..(13): Selenocysteine
  MOD_RES (22)..(22): Selenocysteine
  MOD_RES (41)..(41): Selenocysteine
  MOD_RES (56)..(56): Selenocysteine
  MOD_RES (60)..(60): Selenocysteine
  MOD_RES (69)..(69): Selenocysteine
  MOD_RES (74)..(74): Selenocysteine
  MOD_RES (82)..(82): Selenocysteine
  MOD_RES (120)..(120): Selenocysteine
  MOD_RES (129)..(129): Selenocysteine
  MOD_RES (131)..(131): Selenocysteine
  MOD_RES (143)..(143): Selenocysteine
MGEFNEKKXXCGXVCLKYLLFXYNCCFWLAGLAVMAVGIWXLALKSDYISLLASGXYLAXAYILVVAGXVVMVXGVLGCCAXFKERRNLLRLYFILLLIIFLLEIIAGILAYAYYQQLNXELKENLKDXMXKRYHQPGHEAVXSAVDQLQQEFHCCGSNNSQDWRDSEWI

SEQ ID NO: 5363 - protein, 176 aa, Homo sapiens
  MOD_RES (9)..(10): Selenocysteine
  MOD_RES (13)..(13): Selenocysteine
  MOD_RES (22)..(22): Selenocysteine
  MOD_RES (41)..(41): Selenocysteine
  MOD_RES (56)..(56): Selenocysteine
  MOD_RES (60)..(60): Selenocysteine
  MOD_RES (69)..(69): Selenocysteine
  MOD_RES (74)..(74): Selenocysteine
  MOD_RES (82)..(82): Selenocysteine
  MOD_RES (120)..(120): Selenocysteine
  MOD_RES (129)..(129): Selenocysteine
  MOD_RES (131)..(131): Selenocysteine
  MOD_RES (143)..(143): Selenocysteine
MGEFNEKKXXCGXVCLKYLLFXYNCCFWLAGLAVMAVGIWXLALKSDYISLLASGXYLAXAYILVVAGXVVMVXGVLGCCAXFKERRNLLRLYFILLLIIFLLEIIAGILAYAYYQQLNXELKENLKDXMXKRYHQPGHEAVXSAVDQLQQEFHCCGSNNSQDWRDSEWIRSQEAG

SEQ ID NO: 5364 - protein, 180 aa, Homo sapiens
  MOD_RES (9)..(10): Selenocysteine
  MOD_RES (13)..(13): Selenocysteine
  MOD_RES (22)..(22): Selenocysteine
  MOD_RES (41)..(41): Selenocysteine
  MOD_RES (56)..(56): Selenocysteine
  MOD_RES (60)..(60): Selenocysteine
  MOD_RES (69)..(69): Selenocysteine
  MOD_RES (74)..(74): Selenocysteine
  MOD_RES (82)..(82): Selenocysteine
  MOD_RES (120)..(120): Selenocysteine
  MOD_RES (129)..(129): Selenocysteine
  MOD_RES (131)..(131): Selenocysteine
  MOD_RES (143)..(143): Selenocysteine
MGEFNEKKXXCGXVCLKYLLFXYNCCFWLAGLAVMAVGIWXLALKSDYISLLASGXYLAXAYILVVAGXVVMVXGVLGCCAXFKERRNLLRLYFILLLIIFLLEIIAGILAYAYYQQLNXELKENLKDXMXKRYHQPGHEAVXSAVDQLQQEFHCCGSNNSQDWRDSEWIRSQEAGGRVV

SEQ ID NO: 5365 - protein, 251 aa, Homo sapiens
  MOD_RES (9)..(10): Selenocysteine
  MOD_RES (13)..(13): Selenocysteine
  MOD_RES (22)..(22): Selenocysteine
  MOD_RES (41)..(41): Selenocysteine
  MOD_RES (56)..(56): Selenocysteine
  MOD_RES (60)..(60): Selenocysteine
  MOD_RES (69)..(69): Selenocysteine
  MOD_RES (74)..(74): Selenocysteine
  MOD_RES (82)..(82): Selenocysteine
  MOD_RES (120)..(120): Selenocysteine
  MOD_RES (129)..(129): Selenocysteine
  MOD_RES (131)..(131): Selenocysteine
  MOD_RES (143)..(143): Selenocysteine
  MOD_RES (187)..(187): Selenocysteine
  MOD_RES (208)..(208): Selenocysteine
  MOD_RES (212)..(212): Selenocysteine
  MOD_RES (239)..(239): Selenocysteine
MGEFNEKKXXCGXVCLKYLLFXYNCCFWLAGLAVMAVGIWXLALKSDYISLLASGXYLAXAYILVVAGXVVMVXGVLGCCAXFKERRNLLRLYFILLLIIFLLEIIAGILAYAYYQQLNXELKENLKDXMXKRYHQPGHEAVXSAVDQLQQEFHCCGSNNSQDWRDSEWIRSQEAGGRVVPDSCCKXVVALCGQRDHASNIYKGGCIXKLEXFIQEHLRVIGAVGIGIACVQVFGMIFXCCLYRSLKLEHY

SEQ ID NO: 5366 - protein, 253 aa, Homo sapiens
  MOD_RES (9)..(10): Selenocysteine
  MOD_RES (13)..(13): Selenocysteine
  MOD_RES (22)..(22): Selenocysteine
  MOD_RES (41)..(41): Selenocysteine
  MOD_RES (56)..(56): Selenocysteine
  MOD_RES (60)..(60): Selenocysteine
  MOD_RES (69)..(69): Selenocysteine
  MOD_RES (74)..(74): Selenocysteine
  MOD_RES (82)..(82): Selenocysteine
  MOD_RES (120)..(120): Selenocysteine
  MOD_RES (129)..(129): Selenocysteine
  MOD_RES (131)..(131): Selenocysteine
  MOD_RES (143)..(143): Selenocysteine
  MOD_RES (187)..(187): Selenocysteine
  MOD_RES (210)..(210): Selenocysteine
  MOD_RES (214)..(214): Selenocysteine
  MOD_RES (241)..(241): Selenocysteine
MGEFNEKKXXCGXVCLKYLLFXYNCCFWLAGLAVMAVGIWXLALKSDYISLLASGXYLAXAYILVVAGXVVMVXGVLGCCAXFKERRNLLRLYFILLLIIFLLEIIAGILAYAYYQQLNXELKENLKDXMXKRYHQPGHEAVXSAVDQLQQEFHCCGSNNSQDWRDSEWIRSQEAGGRVVPDSCCKXVVALCGQRDHASNIYKVEGGCIXKLEXFIQEHLRVIGAVGIGIACVQVFGMIFXCCLYRSLKLEHY

SEQ ID NO: 5367 - protein, 72 aa, Homo sapiens
  MOD_RES (26)..(26): Selenocysteine
  MOD_RES (30)..(30): Selenocysteine
  MOD_RES (32)..(32): Selenocysteine
  MOD_RES (48)..(48): Selenocysteine
  MOD_RES (64)..(64): Selenocysteine
MLLEPGRGCCALAILLAIVDIQSGEXGNYXVXGLKQRQHLEFSHNEGXLSSGFLQEKVWVMLVXSLVALQAL

SEQ ID NO: 5368 - protein, 125 aa, Homo sapiens
  MOD_RES (26)..(26): Selenocysteine
  MOD_RES (30)..(30): Selenocysteine
  MOD_RES (32)..(32): Selenocysteine
  MOD_RES (48)..(48): Selenocysteine
  MOD_RES (64)..(64): Selenocysteine
  MOD_RES (79)..(79): Selenocysteine
MLLEPGRGCCALAILLAIVDIQSGEXGNYXVXGLKQRQHLEFSHNEGXLSSGFLQEKVWVMLVXSLVALQGMSKRAVSXPSNEGAIIFLPPWLFSRRRRLERMSRGREKCYSSPGYPQESSNQFH

SEQ ID NO: 5369 - protein, 181 aa, Homo sapiens
  MOD_RES (30)..(30): Selenocysteine
  MOD_RES (38)..(38): Selenocysteine
  MOD_RES (45)..(45): Selenocysteine
  MOD_RES (72)..(72): Selenocysteine
  MOD_RES (98)..(98): Selenocysteine
  MOD_RES (103)..(103): Selenocysteine
  MOD_RES (109)..(109): Selenocysteine
  MOD_RES (133)..(133): Selenocysteine
  MOD_RES (135)..(135): Selenocysteine
  MOD_RES (139)..(139): Selenocysteine
  MOD_RES (141)..(141): Selenocysteine
  MOD_RES (157)..(157): Selenocysteine
  MOD_RES (173)..(173): Selenocysteine
MLLEPGRGCCALAILLAIVDIQSGGCINIXSSASQEGXRLNLICXVWHKKEEAEGFVVFLCKDRSGDCSPEXSLKQLRLKRDPGIDGVGEISSQLMFXISQVXPLHSGXYQCCARSQKSGIRLQGHFFSILFXEXGNYXVXGLKQRQHLEFSHNEGXLSSGFLQEKVWVMLVXSLVALQAL

SEQ ID NO: 5370 - protein, 234 aa, Homo sapiens
  MOD_RES (30)..(30): Selenocysteine
  MOD_RES (38)..(38): Selenocysteine
  MOD_RES (45)..(45): Selenocysteine
  MOD_RES (72)..(72): Selenocysteine
  MOD_RES (98)..(98): Selenocysteine
  MOD_RES (103)..(103): Selenocysteine
  MOD_RES (109)..(109): Selenocysteine
  MOD_RES (133)..(133): Selenocysteine
  MOD_RES (135)..(135): Selenocysteine
  MOD_RES (139)..(139): Selenocysteine
  MOD_RES (141)..(141): Selenocysteine
  MOD_RES (157)..(157): Selenocysteine
  MOD_RES (173)..(173): Selenocysteine
  MOD_RES (188)..(188): Selenocysteine
MLLEPGRGCCALAILLAIVDIQSGGCINIXSSASQEGXRLNLICXVWHKKEEAEGFVVFLCKDRSGDCSPEXSLKQLRLKRDPGIDGVGEISSQLMFXISQVXPLHSGXYQCCARSQKSGIRLQGHFFSILFXEXGNYXVXGLKQRQHLEFSHNEGXLSSGFLQEKVWVMLVXSLVALQGMSKRAVSXPSNEGAIIFLPPWLFSRRRRLERMSRGREKCYSSPGYPQESSNQFH

SEQ ID NO: 5371 - protein, 163 aa, Homo sapiens
  MOD_RES (17)..(17): Selenocysteine
  MOD_RES (26)..(26): Selenocysteine
  MOD_RES (44)..(45): Selenocysteine
  MOD_RES (62)..(62): Selenocysteine
  MOD_RES (71)..(72): Selenocysteine
  MOD_RES (79)..(79): Selenocysteine
  MOD_RES (81)..(81): Selenocysteine
  MOD_RES (85)..(85): Selenocysteine
  MOD_RES (89)..(89): Selenocysteine
  MOD_RES (93)..(93): Selenocysteine
  MOD_RES (100)..(101): Selenocysteine
  MOD_RES (104)..(104): Selenocysteine
  MOD_RES (106)..(107): Selenocysteine
  MOD_RES (110)..(111): Selenocysteine
  MOD_RES (114)..(114): Selenocysteine
  MOD_RES (116)..(116): Selenocysteine
  MOD_RES (118)..(118): Selenocysteine
  MOD_RES (126)..(126): Selenocysteine
  MOD_RES (162)..(162): Selenocysteine
MRKGRKVPMYVPGVLRXYPKAKLEEXCEGRNSCVSCFNVSVVNXXCFWIECKDESYCSHNSXVSDCQVGNXXDFCSVSXAXPVPXANSXAKPXVQPSPSXXSKXVXXSGXXNNXVXPXSQPVRKSXFDAASFIGGIVLVLGVQAVIFFLYKFCKSKERNYHXL

SEQ ID NO: 5372 - protein, 184 aa, Homo sapiens
  MOD_RES (13)..(13): Selenocysteine
  MOD_RES (27)..(28): Selenocysteine
  MOD_RES (34)..(35): Selenocysteine
  MOD_RES (43)..(43): Selenocysteine
  MOD_RES (48)..(48): Selenocysteine
  MOD_RES (54)..(55): Selenocysteine
  MOD_RES (60)..(60): Selenocysteine
  MOD_RES (78)..(79): Selenocysteine
  MOD_RES (96)..(96): Selenocysteine
  MOD_RES (105)..(106): Selenocysteine
  MOD_RES (114)..(114): Selenocysteine
  MOD_RES (121)..(122): Selenocysteine
  MOD_RES (125)..(125): Selenocysteine
  MOD_RES (127)..(128): Selenocysteine
  MOD_RES (131)..(132): Selenocysteine
  MOD_RES (135)..(135): Selenocysteine
  MOD_RES (137)..(137): Selenocysteine
  MOD_RES (139)..(139): Selenocysteine
  MOD_RES (147)..(147): Selenocysteine
  MOD_RES (183)..(183): Selenocysteine
MSRLSRSLLWAAXCLGVLCVLSADKNXXQHPNVXXLAPISNVXSAPVXSLPLVXXPAPEXCEGRNSCVSCFNVSVVNXXCFWIECKDESYCSHNSXVSDCQVGNXXDFCSAKPXVQPSPSXXSKXVXXSGXXNNXVXPXSQPVRKSXFDAASFIGGIVLVLGVQAVIFFLYKFCKSKERNYHXL

SEQ ID NO: 5373 - protein, 157 aa, Homo sapiens
  MOD_RES (13)..(13): Selenocysteine
  MOD_RES (27)..(28): Selenocysteine
  MOD_RES (34)..(35): Selenocysteine
  MOD_RES (43)..(43): Selenocysteine
  MOD_RES (48)..(48): Selenocysteine
  MOD_RES (54)..(55): Selenocysteine
  MOD_RES (60)..(60): Selenocysteine
  MOD_RES (78)..(79): Selenocysteine
  MOD_RES (96)..(96): Selenocysteine
  MOD_RES (105)..(106): Selenocysteine
  MOD_RES (113)..(113): Selenocysteine
  MOD_RES (115)..(115): Selenocysteine
  MOD_RES (119)..(119): Selenocysteine
  MOD_RES (123)..(123): Selenocysteine
  MOD_RES (127)..(127): Selenocysteine
  MOD_RES (134)..(135): Selenocysteine
  MOD_RES (138)..(138): Selenocysteine
  MOD_RES (140)..(141): Selenocysteine
  MOD_RES (148)..(148): Selenocysteine
MSRLSRSLLWAAXCLGVLCVLSADKNXXQHPNVXXLAPISNVXSAPVXSLPLVXXPAPEXCEGRNSCVSCFNVSVVNXXCFWIECKDESYCSHNSXVSDCQVGNXXDFCSVSXAXPVPXANSXAKPXVQPSPSXXSKXVXXSEIRCHXRNYIPDLKK

SEQ ID NO: 5374 - protein, 189 aa, Homo sapiens
  MOD_RES (13)..(13): Selenocysteine
  MOD_RES (27)..(28): Selenocysteine
  MOD_RES (34)..(35): Selenocysteine
  MOD_RES (43)..(43): Selenocysteine
  MOD_RES (48)..(48): Selenocysteine
  MOD_RES (54)..(55): Selenocysteine
  MOD_RES (60)..(60): Selenocysteine
  MOD_RES (78)..(79): Selenocysteine
  MOD_RES (96)..(96): Selenocysteine
  MOD_RES (105)..(106): Selenocysteine
  MOD_RES (113)..(113): Selenocysteine
  MOD_RES (115)..(115): Selenocysteine
  MOD_RES (119)..(119): Selenocysteine
  MOD_RES (123)..(123): Selenocysteine
  MOD_RES (127)..(127): Selenocysteine
  MOD_RES (134)..(135): Selenocysteine
  MOD_RES (138)..(138): Selenocysteine
  MOD_RES (140)..(141): Selenocysteine
  MOD_RES (144)..(145): Selenocysteine
  MOD_RES (148)..(148): Selenocysteine
  MOD_RES (150)..(150): Selenocysteine
  MOD_RES (152)..(152): Selenocysteine
  MOD_RES (160)..(160): Selenocysteine
  MOD_RES (180)..(180): Selenocysteine
MSRLSRSLLWAAXCLGVLCVLSADKNXXQHPNVXXLAPISNVXSAPVXSLPLVXXPAPEXCEGRNSCVSCFNVSVVNXXCFWIECKDESYCSHNSXVSDCQVGNXXDFCSVSXAXPVPXANSXAKPXVQPSPSXXSKXVXXSGXXNNXVXPXSQPVRKSXFDAASFIGGIVLVLEIRCHXRNYIPDLKK

SEQ ID NO: 5375 - protein, 197 aa, Homo sapiens
  MOD_RES (13)..(13): Selenocysteine
  MOD_RES (27)..(28): Selenocysteine
  MOD_RES (34)..(35): Selenocysteine
  MOD_RES (43)..(43): Selenocysteine
  MOD_RES (48)..(48): Selenocysteine
  MOD_RES (54)..(55): Selenocysteine
  MOD_RES (60)..(60): Selenocysteine
  MOD_RES (78)..(79): Selenocysteine
  MOD_RES (96)..(96): Selenocysteine
  MOD_RES (105)..(106): Selenocysteine
  MOD_RES (113)..(113): Selenocysteine
  MOD_RES (115)..(115): Selenocysteine
  MOD_RES (119)..(119): Selenocysteine
  MOD_RES (123)..(123): Selenocysteine
  MOD_RES (127)..(127): Selenocysteine
  MOD_RES (134)..(135): Selenocysteine
  MOD_RES (138)..(138): Selenocysteine
  MOD_RES (140)..(141): Selenocysteine
  MOD_RES (144)..(145): Selenocysteine
  MOD_RES (148)..(148): Selenocysteine
  MOD_RES (150)..(150): Selenocysteine
  MOD_RES (152)..(152): Selenocysteine
  MOD_RES (160)..(160): Selenocysteine
  MOD_RES (196)..(196): Selenocysteine
MSRLSRSLLWAAXCLGVLCVLSADKNXXQHPNVXXLAPISNVXSAPVXSLPLVXXPAPEXCEGRNSCVSCFNVSVVNXXCFWIECKDESYCSHNSXVSDCQVGNXXDFCSVSXAXPVPXANSXAKPXVQPSPSXXSKXVXXSGXXNNXVXPXSQPVRKSXFDAASFIGGIVLVLGVQAVIFFLYKFCKSKERNYHXL

SEQ ID NO: 5376 - protein, 178 aa, Homo sapiens
  MOD_RES (13)..(13): Selenocysteine
  MOD_RES (27)..(28): Selenocysteine
  MOD_RES (34)..(35): Selenocysteine
  MOD_RES (43)..(43): Selenocysteine
  MOD_RES (48)..(48): Selenocysteine
  MOD_RES (54)..(55): Selenocysteine
  MOD_RES (60)..(60): Selenocysteine
  MOD_RES (78)..(79): Selenocysteine
  MOD_RES (96)..(96): Selenocysteine
  MOD_RES (105)..(106): Selenocysteine
  MOD_RES (113)..(113): Selenocysteine
  MOD_RES (115)..(115): Selenocysteine
  MOD_RES (119)..(119): Selenocysteine
  MOD_RES (123)..(123): Selenocysteine
  MOD_RES (125)..(126): Selenocysteine
  MOD_RES (129)..(129): Selenocysteine
  MOD_RES (131)..(131): Selenocysteine
  MOD_RES (133)..(133): Selenocysteine
  MOD_RES (141)..(141): Selenocysteine
  MOD_RES (177)..(177): Selenocysteine
MSRLSRSLLWAAXCLGVLCVLSADKNXXQHPNVXXLAPISNVXSAPVXSLPLVXXPAPEXCEGRNSCVSCFNVSVVNXXCFWIECKDESYCSHNSXVSDCQVGNXXDFCSVSXAXPVPXANSXGXXNNXVXPXSQPVRKSXFDAASFIGGIVLVLGVQAVIFFLYKFCKSKERNYHXL

SEQ ID NO: 5377 - protein, 661 aa, Homo sapiens
  MOD_RES (22)..(22): Selenocysteine
  MOD_RES (36)..(36): Selenocysteine
  MOD_RES (50)..(50): Selenocysteine
  MOD_RES (54)..(55): Selenocysteine
  MOD_RES (67)..(67): Selenocysteine
  MOD_RES (72)..(72): Selenocysteine
  MOD_RES (80)..(80): Selenocysteine
  MOD_RES (85)..(85): Selenocysteine
  MOD_RES (96)..(96): Selenocysteine
  MOD_RES (105)..(105): Selenocysteine
  MOD_RES (109)..(109): Selenocysteine
  MOD_RES (119)..(119): Selenocysteine
  MOD_RES (135)..(135): Selenocysteine
  MOD_RES (222)..(222): Selenocysteine
  MOD_RES (232)..(232): Selenocysteine
  MOD_RES (246)..(247): Selenocysteine
  MOD_RES (254)..(254): Selenocysteine
  MOD_RES (292)..(293): Selenocysteine
  MOD_RES (298)..(298): Selenocysteine
  MOD_RES (306)..(306): Selenocysteine
  MOD_RES (308)..(308): Selenocysteine
  MOD_RES (348)..(348): Selenocysteine
  MOD_RES (374)..(374): Selenocysteine
  MOD_RES (400)..(400): Selenocysteine
  MOD_RES (430)..(430): Selenocysteine
  MOD_RES (453)..(453): Selenocysteine
  MOD_RES (459)..(459): Selenocysteine
  MOD_RES (485)..(485): Selenocysteine
  MOD_RES (487)..(487): Selenocysteine
  MOD_RES (489)..(489): Selenocysteine
  MOD_RES (494)..(494): Selenocysteine
  MOD_RES (533)..(533): Selenocysteine
  MOD_RES (571)..(571): Selenocysteine
  MOD_RES (582)..(582): Selenocysteine
  MOD_RES (590)..(590): Selenocysteine
  MOD_RES (605)..(606): Selenocysteine
  MOD_RES (628)..(628): Selenocysteine
MAFDVSCFFWVVLFSAGCKVIXSWDQMCIEKEANKXYNCENLGLSEIPDXLPNXXEFLEFSFNFLPXIHNRXFSRLMNLXFLDLXRCQINWIHEDXFQSHHQLSXLVLXGNPLIFMAEXSLNGPKSLKHLFLIQXGISNLEFIPVHNLENLESLYLGSNHISSIKFPKDFPARNLKVLDFQNNAIHYISREDMRSLEQAINLSLNFNGNNVKGIELGAFDSXIFQSLNFGGXPNLSVIFNGLQNSXXQSLWLGXFEDIDDEDISSAMLKGLCEMSVESLNLQEHRFSDISSXXFQCFXQLQELDLXAXHLKGLPSGMKGLNLLKKLVLSVNHFDQLCQISAANFPSLXHLYIRGNVKKLHLGVGCLEKLGNLQXLDLSHNDIEASDCCSLQLKNLSHLQXLNLSHNEPLGLQSQAFKECPQLELLDLAFXRLHINAPQSPFQNLHFLQVLNLXYCFLDXSNQHLLAGLPVLRHLNLKGNHFQDGXIXKXNLLQXVGSLEVLILSSCGLLSIDQQAFHSLGKMSHVDLSHNSLXCDSIDSLSHLKGIYLNLAANSINIISPRLLPILSQQSXINLSHNPLDCXCSNIHFLXWYKENLHKLEGSEEXXCANPPSLRGVKLSDVKLSCGIXAIGIFFLIVFLLLLAILLFFAVKYLLRWKYQHI

SEQ ID NO: 5378 - protein, 556 aa, Homo sapiens
  MOD_RES (14)..(14): Selenocysteine
  MOD_RES (42)..(42): Selenocysteine
  MOD_RES (47)..(47): Selenocysteine
  MOD_RES (51)..(51): Selenocysteine
  MOD_RES (112)..(112): Selenocysteine
  MOD_RES (189)..(189): Selenocysteine
  MOD_RES (195)..(195): Selenocysteine
  MOD_RES (215)..(215): Selenocysteine
  MOD_RES (244)..(244): Selenocysteine
  MOD_RES (252)..(252): Selenocysteine
  MOD_RES (267)..(267): Selenocysteine
  MOD_RES (275)..(275): Selenocysteine
  MOD_RES (287)..(287): Selenocysteine
  MOD_RES (296)..(296): Selenocysteine
  MOD_RES (327)..(327): Selenocysteine
  MOD_RES (330)..(330): Selenocysteine
  MOD_RES (337)..(337): Selenocysteine
  MOD_RES (356)..(356): Selenocysteine
  MOD_RES (358)..(358): Selenocysteine
  MOD_RES (374)..(374): Selenocysteine
  MOD_RES (469)..(469): Selenocysteine
  MOD_RES (475)..(475): Selenocysteine
  MOD_RES (493)..(493): Selenocysteine
  MOD_RES (552)..(552): Selenocysteine
  MOD_RES (555)..(555): Selenocysteine
MPPPRLLFFLLFLXPMEVRPEEPLVVKVEEGDNAVLQCLKGXSDGPXQQLXWSRESPLKPFLKLSLGLPGLGIHMRPLAIWLFIFNVSQQMGGFYLCQPGPPSEKAWQPGWXVNVEGSGELFRWNVSDLGGLGCGLKNRSSEGPSSPSGKLMSPKLYVWAKDRPEIWEGEPPCLPPRDSLNQSLSQDLXMAPGSXLWLSCGVPPDSVSRGPLSWXHVHPKGPKSLLSLELKDDRPARDMWVMEXGLLLPRAXAQDAGKYYCHRGNLXMSFHLEIXARPVLWHWLLRXGGWKVSAVXLAYLIFCLCSLVGILHLQRALVLRRKRKRMXDPXRRFFKVXPPPGSGPQNQYGNVLSLPXPXSGLGRAQRWAAGLGGXAPSYGNPSSDVQADGALGSRSPPGVGPEEEEGEGYEEPDSEEDSEFYENDSNLGQDQLSQDGSGYENPEDEPLGPEDEDSFSNAESYENEDEELXQPVARXMDFLSPHGSAWDPSREAXSLGSQSYEDMRGILYAAPQLRSIRGQPGPNHEEDADSYENMDNPDGPDPAWGGGGRMGXWSXR

SEQ ID NO: 5379 - protein, 557 aa, Homo sapiens
  MOD_RES (14)..(14): Selenocysteine
  MOD_RES (42)..(42): Selenocysteine
  MOD_RES (47)..(47): Selenocysteine
  MOD_RES (51)..(51): Selenocysteine
  MOD_RES (112)..(112): Selenocysteine
  MOD_RES (189)..(189): Selenocysteine
  MOD_RES (195)..(195): Selenocysteine
  MOD_RES (215)..(215): Selenocysteine
  MOD_RES (244)..(244): Selenocysteine
  MOD_RES (252)..(252): Selenocysteine
  MOD_RES (267)..(267): Selenocysteine
  MOD_RES (275)..(275): Selenocysteine
  MOD_RES (287)..(287): Selenocysteine
  MOD_RES (296)..(296): Selenocysteine
  MOD_RES (327)..(327): Selenocysteine
  MOD_RES (330)..(330): Selenocysteine
  MOD_RES (337)..(337): Selenocysteine
  MOD_RES (356)..(356): Selenocysteine
  MOD_RES (358)..(358): Selenocysteine
  MOD_RES (374)..(374): Selenocysteine
  MOD_RES (469)..(469): Selenocysteine
  MOD_RES (475)..(475): Selenocysteine
  MOD_RES (493)..(493): Selenocysteine
  MOD_RES (553)..(553): Selenocysteine
  MOD_RES (556)..(556): Selenocysteine
MPPPRLLFFLLFLXPMEVRPEEPLVVKVEEGDNAVLQCLKGXSDGPXQQLXWSRESPLKPFLKLSLGLPGLGIHMRPLAIWLFIFNVSQQMGGFYLCQPGPPSEKAWQPGWXVNVEGSGELFRWNVSDLGGLGCGLKNRSSEGPSSPSGKLMSPKLYVWAKDRPEIWEGEPPCLPPRDSLNQSLSQDLXMAPGSXLWLSCGVPPDSVSRGPLSWXHVHPKGPKSLLSLELKDDRPARDMWVMEXGLLLPRAXAQDAGKYYCHRGNLXMSFHLEIXARPVLWHWLLRXGGWKVSAVXLAYLIFCLCSLVGILHLQRALVLRRKRKRMXDPXRRFFKVXPPPGSGPQNQYGNVLSLPXPXSGLGRAQRWAAGLGGXAPSYGNPSSDVQADGALGSRSPPGVGPEEEEGEGYEEPDSEEDSEFYENDSNLGQDQLSQDGSGYENPEDEPLGPEDEDSFSNAESYENEDEELXQPVARXMDFLSPHGSAWDPSREAXSLAGSQSYEDMRGILYAAPQLRSIRGQPGPNHEEDADSYENMDNPDGPDPAWGGGGRMGXWSXR

SEQ ID NO: 5380 - protein, 351 aa, Homo sapiens
  MOD_RES (28)..(28): Selenocysteine
  MOD_RES (33)..(33): Selenocysteine
  MOD_RES (62)..(62): Selenocysteine
  MOD_RES (77)..(77): Selenocysteine
  MOD_RES (83)..(83): Selenocysteine
  MOD_RES (91)..(91): Selenocysteine
  MOD_RES (99)..(99): Selenocysteine
  MOD_RES (112)..(112): Selenocysteine
  MOD_RES (138)..(138): Selenocysteine
  MOD_RES (142)..(143): Selenocysteine
  MOD_RES (145)..(145): Selenocysteine
  MOD_RES (152)..(152): Selenocysteine
  MOD_RES (173)..(173): Selenocysteine
  MOD_RES (177)..(178): Selenocysteine
  MOD_RES (187)..(187): Selenocysteine
  MOD_RES (235)..(235): Selenocysteine
  MOD_RES (251)..(251): Selenocysteine
  MOD_RES (258)..(258): Selenocysteine
  MOD_RES (272)..(272): Selenocysteine
  MOD_RES (278)..(278): Selenocysteine
  MOD_RES (318)..(318): Selenocysteine
MSFPCKFVASFLLIFNVSSKGAVSKEIXNALEXWGALGQDINLDIPSFQMSDDIDDIKWEKXSDKKKIAQFRKEKEXFKEKDXYKLFKNGXLKIKHLKXDDQDIYKVSIYDXKGKNVLEKIFDLKIQERVSKPKISWXCINXXLXCEVMNGXDPELNLYQDGKHLKLSQRVIXHKWXXSLSAKFKCXAGNKVSKESSVEPVSCPEKGLDIYLIIGICGGGSLLMVFVALLVFYIXKRKKQRSRRNDEELEXRAHRVAXEERGRKPHQIPASXPQNPAXSQHPPPPPGHRSQAPSHRPPPPGHRVQHQPQKRPPAPSGXQVHQQKGPPLPRPRVQPKPPHGAAENSLSPSSN

SEQ ID NO: 5381 - protein, 133 aa, Homo sapiens
  MOD_RES (28)..(28): Selenocysteine
  MOD_RES (33)..(33): Selenocysteine
  MOD_RES (62)..(62): Selenocysteine
  MOD_RES (77)..(77): Selenocysteine
  MOD_RES (83)..(83): Selenocysteine
  MOD_RES (91)..(91): Selenocysteine
  MOD_RES (99)..(99): Selenocysteine
  MOD_RES (112)..(112): Selenocysteine
MSFPCKFVASFLLIFNVSSKGAVSKEIXNALEXWGALGQDINLDIPSFQMSDDIDDIKWEKXSDKKKIAQFRKEKEXFKEKDXYKLFKNGXLKIKHLKXDDQDIYKVSIYDXKGKNVLEKIFDLKIQGKCSFP

SEQ ID NO: 5382 - protein, 334 aa, Homo sapiens
  MOD_RES (11)..(11): Selenocysteine
  MOD_RES (28)..(28): Selenocysteine
  MOD_RES (58)..(58): Selenocysteine
  MOD_RES (81)..(81): Selenocysteine
  MOD_RES (104)..(104): Selenocysteine
  MOD_RES (127)..(127): Selenocysteine
  MOD_RES (150)..(150): Selenocysteine
  MOD_RES (173)..(173): Selenocysteine
  MOD_RES (191)..(191): Selenocysteine
  MOD_RES (212)..(212): Selenocysteine
  MOD_RES (244)..(244): Selenocysteine
  MOD_RES (256)..(256): Selenocysteine
  MOD_RES (328)..(328): Selenocysteine
MASACPGSDFXSIHSEEEQLRGLGFRQXRGYKSLAVSKVPSSISQEQSRQDAIYQNLXQLKAAVGELSEKSKLQEIYQELXQLKAAVGELPEKSKLQEIYQELXRLKAAVGELPEKSKLQEIYQELXWLKAAVGELPEKSKMQEIYQELXRLKAAVGELPEKSKQQEIYQELXRLKAAVERLCHPCPWEWXFFQGNCYFMSNSQRNWHDSIXACKEVGAQLVVIKSAEEQNFLQLQSSRSNRFXWMGLSDLNQEGXWQWVDGSPLLPSFKQYWNRGEPNNVGEEDCAEFSGNGWNDDKCNLAKFWICKKSAASCSRDEEQFLSPAPAXPNPPPA

SEQ ID NO: 5383 - protein, 297 aa, Homo sapiens
  MOD_RES (11)..(11): Selenocysteine
  MOD_RES (28)..(28): Selenocysteine
  MOD_RES (58)..(58): Selenocysteine
  MOD_RES (81)..(81): Selenocysteine
  MOD_RES (104)..(104): Selenocysteine
  MOD_RES (127)..(127): Selenocysteine
  MOD_RES (150)..(150): Selenocysteine
  MOD_RES (173)..(173): Selenocysteine
  MOD_RES (196)..(196): Selenocysteine
  MOD_RES (219)..(219): Selenocysteine
  MOD_RES (237)..(237): Selenocysteine
  MOD_RES (258)..(258): Selenocysteine
MASACPGSDFXSIHSEEEQLRGLGFRQXRGYKSLAVSKVPSSISQEQSRQDAIYQNLXQLKAAVGELSEKSKLQEIYQELXQLKAAVGELPEKSKLQEIYQELXRLKAAVGELPEKSKLQEIYQELXWLKAAVGELPEKSKMQEIYQELXRLKAAVGELPEKSKQQEIYQELXRLKAAVGELPEKSKQQEIYQELXRLKAAVGELPEKSKQQEIYQELXQLKAAVERLCHPCPWEWXFFQGNCYFMSNSQRNWHDSIXACKEVGAQLVVIKSAEEQLQAVLEQRRAQQRWGGRLRGI

SEQ ID NO: 5384 - protein, 380 aa, Homo sapiens
  MOD_RES (11)..(11): Selenocysteine
  MOD_RES (28)..(28): Selenocysteine
  MOD_RES (58)..(58): Selenocysteine
  MOD_RES (81)..(81): Selenocysteine
  MOD_RES (104)..(104): Selenocysteine
  MOD_RES (127)..(127): Selenocysteine
  MOD_RES (150)..(150): Selenocysteine
  MOD_RES (173)..(173): Selenocysteine
  MOD_RES (196)..(196): Selenocysteine
  MOD_RES (219)..(219): Selenocysteine
  MOD_RES (237)..(237): Selenocysteine
  MOD_RES (258)..(258): Selenocysteine
  MOD_RES (290)..(290): Selenocysteine
  MOD_RES (302)..(302): Selenocysteine
  MOD_RES (374)..(374): Selenocysteine
MASACPGSDFXSIHSEEEQLRGLGFRQXRGYKSLAVSKVPSSISQEQSRQDAIYQNLXQLKAAVGELSEKSKLQEIYQELXQLKAAVGELPEKSKLQEIYQELXRLKAAVGELPEKSKLQEIYQELXWLKAAVGELPEKSKMQEIYQELXRLKAAVGELPEKSKQQEIYQELXRLKAAVGELPEKSKQQEIYQELXRLKAAVGELPEKSKQQEIYQELXQLKAAVERLCHPCPWEWXFFQGNCYFMSNSQRNWHDSIXACKEVGAQLVVIKSAEEQNFLQLQSSRSNRFXWMGLSDLNQEGXWQWVDGSPLLPSFKQYWNRGEPNNVGEEDCAEFSGNGWNDDKCNLAKFWICKKSAASCSRDEEQFLSPAPAXPNPPPA

SEQ ID NO: 5385 - protein, 243 aa, Homo sapiens
  MOD_RES (28)..(28): Selenocysteine
  MOD_RES (51)..(51): Selenocysteine
  MOD_RES (82)..(82): Selenocysteine
  MOD_RES (100)..(100): Selenocysteine
  MOD_RES (121)..(121): Selenocysteine
  MOD_RES (153)..(153): Selenocysteine
  MOD_RES (165)..(165): Selenocysteine
  MOD_RES (237)..(237): Selenocysteine
MSDSKEPRLQQLGLLEEEQLRGLGFRQXRGYKSLAGCLGHGPLVLQLLSFXLLAGLLVQVSKVPSSISQEQSRQDAIYQNLXQLKAAVERLCHPCPWEWXFFQGNCYFMSNSQRNWHDSIXACKEVGAQLVVIKSAEEQNFLQLQSSRSNRFXWMGLSDLNQEGXWQWVDGSPLLPSFKQYWNRGEPNNVGEEDCAEFSGNGWNDDKCNLAKFWICKKSAASCSRDEEQFLSPAPAXPNPPPA

SEQ ID NO: 5386 - protein, 312 aa, Homo sapiens
  MOD_RES (28)..(28): Selenocysteine
  MOD_RES (51)..(51): Selenocysteine
  MOD_RES (82)..(82): Selenocysteine
  MOD_RES (105)..(105): Selenocysteine
  MOD_RES (128)..(128): Selenocysteine
  MOD_RES (151)..(151): Selenocysteine
  MOD_RES (169)..(169): Selenocysteine
  MOD_RES (190)..(190): Selenocysteine
  MOD_RES (222)..(222): Selenocysteine
  MOD_RES (234)..(234): Selenocysteine
  MOD_RES (306)..(306): Selenocysteine
MSDSKEPRLQQLGLLEEEQLRGLGFRQXRGYKSLAGCLGHGPLVLQLLSFXLLAGLLVQVSKVPSSISQEQSRQDAIYQNLXQLKAAVGELSEKSKLQEIYQELXQLKAAVGELPEKSKLQEIYQELXRLKAAVGELPEKSKLQEIYQELXWLKAAVERLCHPCPWEWXFFQGNCYFMSNSQRNWHDSIXACKEVGAQLVVIKSAEEQNFLQLQSSRSNRFXWMGLSDLNQEGXWQWVDGSPLLPSFKQYWNRGEPNNVGEEDCAEFSGNGWNDDKCNLAKFWICKKSAASCSRDEEQFLSPAPAXPNPPPA

SEQ ID NO: 5387 - protein, 398 aa, Homo sapiens
  MOD_RES (28)..(28): Selenocysteine
  MOD_RES (51)..(51): Selenocysteine
  MOD_RES (82)..(82): Selenocysteine
  MOD_RES (105)..(105): Selenocysteine
  MOD_RES (128)..(128): Selenocysteine
  MOD_RES (151)..(151): Selenocysteine
  MOD_RES (174)..(174): Selenocysteine
  MOD_RES (197)..(197): Selenocysteine
  MOD_RES (220)..(220): Selenocysteine
  MOD_RES (243)..(243): Selenocysteine
  MOD_RES (261)..(261): Selenocysteine
  MOD_RES (282)..(282): Selenocysteine
  MOD_RES (308)..(308): Selenocysteine
  MOD_RES (320)..(320): Selenocysteine
  MOD_RES (392)..(392): Selenocysteine
MSDSKEPRLQQLGLLEEEQLRGLGFRQXRGYKSLAGCLGHGPLVLQLLSFXLLAGLLVQVSKVPSSISQEQSRQDAIYQNLXQLKAAVGELSEKSKLQEIYQELXQLKAAVGELPEKSKLQEIYQELXRLKAAVGELPEKSKLQEIYQELXWLKAAVGELPEKSKMQEIYQELXRLKAAVGELPEKSKQQEIYQELXRLKAAVGELPEKSKQQEIYQELXRLKAAVGELPEKSKQQEIYQELXQLKAAVERLCHPCPWEWXFFQGNCYFMSNSQRNWHDSIXACKEVGAQLVVIKSAEEQSSRSNRFXWMGLSDLNQEGXWQWVDGSPLLPSFKQYWNRGEPNNVGEEDCAEFSGNGWNDDKCNLAKFWICKKSAASCSRDEEQFLSPAPAXPNPPPA

SEQ ID NO: 5388 - protein, 404 aa, Homo sapiens
  MOD_RES (28)..(28): Selenocysteine
  MOD_RES (51)..(51): Selenocysteine
  MOD_RES (82)..(82): Selenocysteine
  MOD_RES (105)..(105): Selenocysteine
  MOD_RES (128)..(128): Selenocysteine
  MOD_RES (151)..(151): Selenocysteine
  MOD_RES (174)..(174): Selenocysteine
  MOD_RES (197)..(197): Selenocysteine
  MOD_RES (220)..(220): Selenocysteine
  MOD_RES (243)..(243): Selenocysteine
  MOD_RES (261)..(261): Selenocysteine
  MOD_RES (282)..(282): Selenocysteine
  MOD_RES (314)..(314): Selenocysteine
  MOD_RES (326)..(326): Selenocysteine
  MOD_RES (398)..(398): Selenocysteine
MSDSKEPRLQQLGLLEEEQLRGLGFRQXRGYKSLAGCLGHGPLVLQLLSFXLLAGLLVQVSKVPSSISQEQSRQDAIYQNLXQLKAAVGELSEKSKLQEIYQELXQLKAAVGELPEKSKLQEIYQELXRLKAAVGELPEKSKLQEIYQELXWLKAAVGELPEKSKMQEIYQELXRLKAAVGELPEKSKQQEIYQELXRLKAAVGELPEKSKQQEIYQELXRLKAAVGELPEKSKQQEIYQELXQLKAAVERLCHPCPWEWXFFQGNCYFMSNSQRNWHDSIXACKEVGAQLVVIKSAEEQNFLQLQSSRSNRFXWMGLSDLNQEGXWQWVDGSPLLPSFKQYWNRGEPNNVGEEDCAEFSGNGWNDDKCNLAKFWICKKSAASCSRDEEQFLSPAPAXPNPPPA

SEQ ID NO: 5389 - protein, 168 aa, Homo sapiens
  MOD_RES (28)..(28): Selenocysteine
  MOD_RES (51)..(51): Selenocysteine
  MOD_RES (78)..(78): Selenocysteine
  MOD_RES (90)..(90): Selenocysteine
  MOD_RES (162)..(162): Selenocysteine
MSDSKEPRLQQLGLLEEEQLRGLGFRQXRGYKSLAGCLGHGPLVLQLLSFXLLAGLLVQVSKVPSSISQEQSRSNRFXWMGLSDLNQEGXWQWVDGSPLLPSFKQYWNRGEPNNVGEEDCAEFSGNGWNDDKCNLAKFWICKKSAASCSRDEEQFLSPAPAXPNPPPA

SEQ ID NO: 5390 - protein, 380 aa, Homo sapiens
  MOD_RES (28)..(28): Selenocysteine
  MOD_RES (58)..(58): Selenocysteine
  MOD_RES (81)..(81): Selenocysteine
  MOD_RES (104)..(104): Selenocysteine
  MOD_RES (127)..(127): Selenocysteine
  MOD_RES (150)..(150): Selenocysteine
  MOD_RES (173)..(173): Selenocysteine
  MOD_RES (196)..(196): Selenocysteine
  MOD_RES (219)..(219): Selenocysteine
  MOD_RES (237)..(237): Selenocysteine
  MOD_RES (258)..(258): Selenocysteine
  MOD_RES (290)..(290): Selenocysteine
  MOD_RES (302)..(302): Selenocysteine
  MOD_RES (374)..(374): Selenocysteine
MSDSKEPRLQQLGLLEEEQLRGLGFRQXRGYKSLAVSKVPSSISQEQSRQDAIYQNLXQLKAAVGELSEKSKLQEIYQELXQLKAAVGELPEKSKLQEIYQELXRLKAAVGELPEKSKLQEIYQELXWLKAAVGELPEKSKMQEIYQELXRLKAAVGELPEKSKQQEIYQELXRLKAAVGELPEKSKQQEIYQELXRLKAAVGELPEKSKQQEIYQELXQLKAAVERLCHPCPWEWXFFQGNCYFMSNSQRNWHDSIXACKEVGAQLVVIKSAEEQNFLQLQSSRSNRFXWMGLSDLNQEGXWQWVDGSPLLPSFKQYWNRGEPNNVGEEDCAEFSGNGWNDDKCNLAKFWICKKSAASCSRDEEQFLSPAPAXPNPPPA

SEQ ID NO: 5391 - protein, 268 aa, Homo sapiens
  MOD_RES (38)..(38): Selenocysteine
  MOD_RES (61)..(61): Selenocysteine
  MOD_RES (84)..(84): Selenocysteine
  MOD_RES (107)..(107): Selenocysteine
  MOD_RES (125)..(125): Selenocysteine
  MOD_RES (146)..(146): Selenocysteine
  MOD_RES (178)..(178): Selenocysteine
  MOD_RES (190)..(190): Selenocysteine
  MOD_RES (262)..(262): Selenocysteine
MSDSKEPRLQQLGLLVSKVPSSISQEQSRQDAIYQNLXQLKAAVGELSEKSKLQEIYQELXQLKAAVGELPEKSKLQEIYQELXRLKAAVGELPEKSKLQEIYQELXWLKAAVERLCHPCPWEWXFFQGNCYFMSNSQRNWHDSIXACKEVGAQLVVIKSAEEQNFLQLQSSRSNRFXWMGLSDLNQEGXWQWVDGSPLLPSFKQYWNRGEPNNVGEEDCAEFSGNGWNDDKCNLAKFWICKKSAASCSRDEEQFLSPAPAXPNPPPA

SEQ ID NO: 5392 - protein, 360 aa, Homo sapiens
  MOD_RES (38)..(38): Selenocysteine
  MOD_RES (61)..(61): Selenocysteine
  MOD_RES (84)..(84): Selenocysteine
  MOD_RES (107)..(107): Selenocysteine
  MOD_RES (130)..(130): Selenocysteine
  MOD_RES (153)..(153): Selenocysteine
  MOD_RES (176)..(176): Selenocysteine
  MOD_RES (199)..(199): Selenocysteine
  MOD_RES (217)..(217): Selenocysteine
  MOD_RES (238)..(238): Selenocysteine
  MOD_RES (270)..(270): Selenocysteine
  MOD_RES (282)..(282): Selenocysteine
  MOD_RES (354)..(354): Selenocysteine
MSDSKEPRLQQLGLLVSKVPSSISQEQSRQDAIYQNLXQLKAAVGELSEKSKLQEIYQELXQLKAAVGELPEKSKLQEIYQELXRLKAAVGELPEKSKLQEIYQELXWLKAAVGELPEKSKMQEIYQELXRLKAAVGELPEKSKQQEIYQELXRLKAAVGELPEKSKQQEIYQELXRLKAAVGELPEKSKQQEIYQELXQLKAAVERLCHPCPWEWXFFQGNCYFMSNSQRNWHDSIXACKEVGAQLVVIKSAEEQNFLQLQSSRSNRFXWMGLSDLNQEGXWQWVDGSPLLPSFKQYWNRGEPNNVGEEDCAEFSGNGWNDDKCNLAKFWICKKSAASCSRDEEQFLSPAPAXPNPPPA

SEQ ID NO: 5393 - protein, 37 aa, Homo sapiens
  MOD_RES (7)..(7): Selenocysteine
  MOD_RES (27)..(27): Selenocysteine
  MOD_RES (33)..(33): Selenocysteine
IVIPDVXVSDSGLYRCYLQASAGENEXFVMRLXVAEG

SEQ ID NO: 5394 - protein, 127 aa, Homo sapiens
  MOD_RES (5)..(5): Selenocysteine
  MOD_RES (25)..(25): Selenocysteine
  MOD_RES (46)..(46): Selenocysteine
  MOD_RES (55)..(55): Selenocysteine
  MOD_RES (66)..(66): Selenocysteine
  MOD_RES (85)..(85): Selenocysteine
  MOD_RES (92)..(92): Selenocysteine
  MOD_RES (112)..(112): Selenocysteine
  MOD_RES (117)..(117): Selenocysteine
MDYPXLLLALLHVYRALCEEVLWHXSVPFAENMSLECVYPSMGILXQVEWFKIGXQQDSIAIFSPXHGMVIRKPYAERVYFLNSXMASNNMXLFFRNASEDDVGYYSCSLYXYPQGXWQKVIQVVQS

SEQ ID NO: 5395 - protein, 132 aa, Homo sapiens
  MOD_RES (5)..(5): Selenocysteine
  MOD_RES (25)..(25): Selenocysteine
  MOD_RES (46)..(46): Selenocysteine
  MOD_RES (55)..(55): Selenocysteine
  MOD_RES (66)..(66): Selenocysteine
  MOD_RES (85)..(85): Selenocysteine
  MOD_RES (92)..(92): Selenocysteine
  MOD_RES (112)..(112): Selenocysteine
  MOD_RES (117)..(117): Selenocysteine
MDYPXLLLALLHVYRALCEEVLWHXSVPFAENMSLECVYPSMGILXQVEWFKIGXQQDSIAIFSPXHGMVIRKPYAERVYFLNSXMASNNMXLFFRNASEDDVGYYSCSLYXYPQGXWQKVIQVVQSDSFEA

SEQ ID NO: 5396 - protein, 276 aa, Homo sapiens
  MOD_RES (5)..(5): Selenocysteine
  MOD_RES (25)..(25): Selenocysteine
  MOD_RES (46)..(46): Selenocysteine
  MOD_RES (55)..(55): Selenocysteine
  MOD_RES (66)..(66): Selenocysteine
  MOD_RES (85)..(85): Selenocysteine
  MOD_RES (92)..(92): Selenocysteine
  MOD_RES (112)..(112): Selenocysteine
  MOD_RES (117)..(117): Selenocysteine
  MOD_RES (149)..(149): Selenocysteine
  MOD_RES (151)..(151): Selenocysteine
  MOD_RES (157)..(157): Selenocysteine
  MOD_RES (177)..(177): Selenocysteine
  MOD_RES (188)..(188): Selenocysteine
  MOD_RES (213)..(213): Selenocysteine
  MOD_RES (233)..(233): Selenocysteine
  MOD_RES (239)..(239): Selenocysteine
  MOD_RES (245)..(245): Selenocysteine
  MOD_RES (250)..(250): Selenocysteine
  MOD_RES (257)..(257): Selenocysteine
  MOD_RES (268)..(269): Selenocysteine
MDYPXLLLALLHVYRALCEEVLWHXSVPFAENMSLECVYPSMGILXQVEWFKIGXQQDSIAIFSPXHGMVIRKPYAERVYFLNSXMASNNMXLFFRNASEDDVGYYSCSLYXYPQGXWQKVIQVVQSDSFEAAVPSNSHIVSEPGKNVXLXCQPQMXWPVQAVRWEKIQPRQIDLLXYCNLVHGRNFXSKFPRQIVSNCSHGRWSVIVIPDVXVSDSGLYRCYLQASAGENEXFVMRLXVAEGKXDNQYXLFVAGGXVLLLLFVISIXXIIVIFLN

SEQ ID NO: 5397 - protein, 336 aa, Homo sapiens
  MOD_RES (5)..(5): Selenocysteine
  MOD_RES (25)..(25): Selenocysteine
  MOD_RES (46)..(46): Selenocysteine
  MOD_RES (55)..(55): Selenocysteine
  MOD_RES (66)..(66): Selenocysteine
  MOD_RES (85)..(85): Selenocysteine
  MOD_RES (92)..(92): Selenocysteine
  MOD_RES (112)..(112): Selenocysteine
  MOD_RES (117)..(117): Selenocysteine
  MOD_RES (149)..(149): Selenocysteine
  MOD_RES (151)..(151): Selenocysteine
  MOD_RES (157)..(157): Selenocysteine
  MOD_RES (177)..(177): Selenocysteine
  MOD_RES (188)..(188): Selenocysteine
  MOD_RES (213)..(213): Selenocysteine
  MOD_RES (233)..(233): Selenocysteine
  MOD_RES (239)..(239): Selenocysteine
  MOD_RES (245)..(245): Selenocysteine
  MOD_RES (250)..(250): Selenocysteine
  MOD_RES (257)..(257): Selenocysteine
  MOD_RES (268)..(269): Selenocysteine
  MOD_RES (288)..(288): Selenocysteine
  MOD_RES (293)..(293): Selenocysteine
  MOD_RES (306)..(306): Selenocysteine
  MOD_RES (310)..(310): Selenocysteine
  MOD_RES (317)..(317): Selenocysteine
  MOD_RES (327)..(327): Selenocysteine
  MOD_RES (334)..(334): Selenocysteine
MDYPXLLLALLHVYRALCEEVLWHXSVPFAENMSLECVYPSMGILXQVEWFKIGXQQDSIAIFSPXHGMVIRKPYAERVYFLNSXMASNNMXLFFRNASEDDVGYYSCSLYXYPQGXWQKVIQVVQSDSFEAAVPSNSHIVSEPGKNVXLXCQPQMXWPVQAVRWEKIQPRQIDLLXYCNLVHGRNFXSKFPRQIVSNCSHGRWSVIVIPDVXVSDSGLYRCYLQASAGENEXFVMRLXVAEGKXDNQYXLFVAGGXVLLLLFVISIXXIIVIFLNRRRRRERRDLFXESWDXQKAPNNYRSPISXSQPXNQSMDDXREDIYVNYPXFSRRPKXRV

SEQ ID NO: 5398 - protein, 181 aa, Homo sapiens
  MOD_RES (2)..(2): Selenocysteine
  MOD_RES (22)..(22): Selenocysteine
  MOD_RES (33)..(33): Selenocysteine
  MOD_RES (58)..(58): Selenocysteine
  MOD_RES (78)..(78): Selenocysteine
  MOD_RES (84)..(84): Selenocysteine
  MOD_RES (90)..(90): Selenocysteine
  MOD_RES (95)..(95): Selenocysteine
  MOD_RES (102)..(102): Selenocysteine
  MOD_RES (113)..(114): Selenocysteine
  MOD_RES (133)..(133): Selenocysteine
  MOD_RES (138)..(138): Selenocysteine
  MOD_RES (151)..(151): Selenocysteine
  MOD_RES (155)..(155): Selenocysteine
  MOD_RES (162)..(162): Selenocysteine
  MOD_RES (172)..(172): Selenocysteine
  MOD_RES (179)..(179): Selenocysteine
MXWPVQAVRWEKIQPRQIDLLXYCNLVHGRNFXSKFPRQIVSNCSHGRWSVIVIPDVXVSDSGLYRCYLQASAGENEXFVMRLXVAEGKXDNQYXLFVAGGXVLLLLFVISIXXIIVIFLNRRRRRERRDLFXESWDXQKAPNNYRSPISXSQPXNQSMDDXREDIYVNYPXFSRRPKXRV

SEQ ID NO: 5399 - protein, 329 aa, Homo sapiens
  MOD_RES (7)..(7): Selenocysteine
  MOD_RES (46)..(46): Selenocysteine
  MOD_RES (78)..(78): Selenocysteine
  MOD_RES (110)..(110): Selenocysteine
  MOD_RES (118)..(118): Selenocysteine
  MOD_RES (120)..(120): Selenocysteine
  MOD_RES (173)..(173): Selenocysteine
  MOD_RES (178)..(178): Selenocysteine
  MOD_RES (189)..(189): Selenocysteine
  MOD_RES (191)..(191): Selenocysteine
  MOD_RES (193)..(193): Selenocysteine
  MOD_RES (206)..(206): Selenocysteine
  MOD_RES (210)..(210): Selenocysteine
  MOD_RES (239)..(239): Selenocysteine
  MOD_RES (257)..(257): Selenocysteine
  MOD_RES (264)..(264): Selenocysteine
  MOD_RES (274)..(274): Selenocysteine
  MOD_RES (283)..(283): Selenocysteine
  MOD_RES (290)..(290): Selenocysteine
  MOD_RES (303)..(303): Selenocysteine
  MOD_RES (310)..(310): Selenocysteine
MLGQVVXLILLLLLKVYQGKGCQGSADHVVSISGVPLQLQPNSIQXKVDSIAWKKLLPSQNGFHHILKWENGSLPSNXSNDRFSFIVKNLSLLIKAAQQQDSGLYCLEVXSISGKVQXAXFQVFVFDKVEKPRLQGQGKILDRGRCQVALSCLVSRDGNVSYAWYRGSKLIQXAGNLXYLDEEVDINGXHXYXCNVSNPVSWESHXLNLXQDCQNAHQEFRFWPFLVIIVILSALFLGXLACFCVWRRKRKEKQSEXSPKEFLXIYEDVKDLKXRRNHEQEQXFPGGGSXIYSMIQSQSSAPXSQEPAYXLYSLIQPSRKGDRFYSFSG

SEQ ID NO: 5400 - protein, 365 aa, Homo sapiens
  MOD_RES (7)..(7): Selenocysteine
  MOD_RES (46)..(46): Selenocysteine
  MOD_RES (78)..(78): Selenocysteine
  MOD_RES (110)..(110): Selenocysteine
  MOD_RES (118)..(118): Selenocysteine
  MOD_RES (120)..(120): Selenocysteine
  MOD_RES (173)..(173): Selenocysteine
  MOD_RES (178)..(178): Selenocysteine
  MOD_RES (189)..(189): Selenocysteine
  MOD_RES (191)..(191): Selenocysteine
  MOD_RES (193)..(193): Selenocysteine
  MOD_RES (206)..(206): Selenocysteine
  MOD_RES (210)..(210): Selenocysteine
  MOD_RES (239)..(239): Selenocysteine
  MOD_RES (257)..(257): Selenocysteine
  MOD_RES (264)..(264): Selenocysteine
  MOD_RES (274)..(274): Selenocysteine
  MOD_RES (283)..(283): Selenocysteine
  MOD_RES (290)..(290): Selenocysteine
  MOD_RES (303)..(303): Selenocysteine
  MOD_RES (310)..(310): Selenocysteine
  MOD_RES (335)..(335): Selenocysteine
MLGQVVXLILLLLLKVYQGKGCQGSADHVVSISGVPLQLQPNSIQXKVDSIAWKKLLPSQNGFHHILKWENGSLPSNXSNDRFSFIVKNLSLLIKAAQQQDSGLYCLEVXSISGKVQXAXFQVFVFDKVEKPRLQGQGKILDRGRCQVALSCLVSRDGNVSYAWYRGSKLIQXAGNLXYLDEEVDINGXHXYXCNVSNPVSWESHXLNLXQDCQNAHQEFRFWPFLVIIVILSALFLGXLACFCVWRRKRKEKQSEXSPKEFLXIYEDVKDLKXRRNHEQEQXFPGGGSXIYSMIQSQSSAPXSQEPAYXLYSLIQPSRKSGSRKRNHSPSFNSXIYEVIGKSQPKAQNPARLSRKELENFDVYS

SEQ ID NO: 5401 - protein, 273 aa, Homo sapiens
  MOD_RES (7)..(7): Selenocysteine
  MOD_RES (46)..(46): Selenocysteine
  MOD_RES (78)..(78): Selenocysteine
  MOD_RES (110)..(110): Selenocysteine
  MOD_RES (118)..(118): Selenocysteine
  MOD_RES (120)..(120): Selenocysteine
  MOD_RES (147)..(147): Selenocysteine
  MOD_RES (165)..(165): Selenocysteine
  MOD_RES (172)..(172): Selenocysteine
  MOD_RES (182)..(182): Selenocysteine
  MOD_RES (191)..(191): Selenocysteine
  MOD_RES (198)..(198): Selenocysteine
  MOD_RES (211)..(211): Selenocysteine
  MOD_RES (218)..(218): Selenocysteine
  MOD_RES (243)..(243): Selenocysteine
MLGQVVXLILLLLLKVYQGKGCQGSADHVVSISGVPLQLQPNSIQXKVDSIAWKKLLPSQNGFHHILKWENGSLPSNXSNDRFSFIVKNLSLLIKAAQQQDSGLYCLEVXSISGKVQXAXFQVFVFEFRFWPFLVIIVILSALFLGXLACFCVWRRKRKEKQSEXSPKEFLXIYEDVKDLKXRRNHEQEQXFPGGGSXIYSMIQSQSSAPXSQEPAYXLYSLIQPSRKSGSRKRNHSPSFNSXIYEVIGKSQPKAQNPARLSRKELENFDVYS

SEQ ID NO: 5402 - protein, 370 aa, Homo sapiens
  MOD_RES (7)..(7): Selenocysteine
  MOD_RES (46)..(46): Selenocysteine
  MOD_RES (78)..(78): Selenocysteine
  MOD_RES (110)..(110): Selenocysteine
  MOD_RES (118)..(118): Selenocysteine
  MOD_RES (120)..(120): Selenocysteine
  MOD_RES (178)..(178): Selenocysteine
  MOD_RES (183)..(183): Selenocysteine
  MOD_RES (194)..(194): Selenocysteine
  MOD_RES (196)..(196): Selenocysteine
  MOD_RES (198)..(198): Selenocysteine
  MOD_RES (211)..(211): Selenocysteine
  MOD_RES (215)..(215): Selenocysteine
  MOD_RES (244)..(244): Selenocysteine
  MOD_RES (262)..(262): Selenocysteine
  MOD_RES (269)..(269): Selenocysteine
  MOD_RES (279)..(279): Selenocysteine
  MOD_RES (288)..(288): Selenocysteine
  MOD_RES (295)..(295): Selenocysteine
  MOD_RES (308)..(308): Selenocysteine
  MOD_RES (315)..(315): Selenocysteine
  MOD_RES (340)..(340): Selenocysteine
MLGQVVXLILLLLLKVYQGKGCQGSADHVVSISGVPLQLQPNSIQXKVDSIAWKKLLPSQNGFHHILKWENGSLPSNXSNDRFSFIVKNLSLLIKAAQQQDSGLYCLEVXSISGKVQXAXFQVFVFESLLPDKVEKPRLQGQGKILDRGRCQVALSCLVSRDGNVSYAWYRGSKLIQXAGNLXYLDEEVDINGXHXYXCNVSNPVSWESHXLNLXQDCQNAHQEFRFWPFLVIIVILSALFLGXLACFCVWRRKRKEKQSEXSPKEFLXIYEDVKDLKXRRNHEQEQXFPGGGSXIYSMIQSQSSAPXSQEPAYXLYSLIQPSRKSGSRKRNHSPSFNSXIYEVIGKSQPKAQNPARLSRKELENFDVYS

SEQ ID NO: 5403 - protein, 164 aa, Homo sapiens
  MOD_RES (8)..(8): Selenocysteine
  MOD_RES (19)..(19): Selenocysteine
  MOD_RES (47)..(47): Selenocysteine
  MOD_RES (147)..(147): Selenocysteine
  MOD_RES (149)..(149): Selenocysteine
  MOD_RES (152)..(152): Selenocysteine
MKWKALFXAAILQAQLPIXEAQSFGLLDPKLCYLLDGILFIYGVILXALFLRVKFSRSADAPAYQQGQNQLYNELNLGRREEYDVLDKRRGRDPEMGGKPQRRKNPQEGLYNELQKDKMAEAYSEIGMKGERRRGKGHDGLYQGLSXAXKDXYDALHMQALPPR

SEQ ID NO: 5404 - protein, 163 aa, Homo sapiens
  MOD_RES (8)..(8): Selenocysteine
  MOD_RES (19)..(19): Selenocysteine
  MOD_RES (47)..(47): Selenocysteine
  MOD_RES (146)..(146): Selenocysteine
  MOD_RES (148)..(148): Selenocysteine
  MOD_RES (151)..(151): Selenocysteine
MKWKALFXAAILQAQLPIXEAQSFGLLDPKLCYLLDGILFIYGVILXALFLRVKFSRSADAPAYQQGQNQLYNELNLGRREEYDVLDKRRGRDPEMGGKPRRKNPQEGLYNELQKDKMAEAYSEIGMKGERRRGKGHDGLYQGLSXAXKDXYDALHMQALPPR

SEQ ID NO: 5405 - protein, 260 aa, Homo sapiens
  MOD_RES (14)..(14): Selenocysteine
  MOD_RES (21)..(21): Selenocysteine
  MOD_RES (47)..(47): Selenocysteine
  MOD_RES (77)..(77): Selenocysteine
  MOD_RES (97)..(97): Selenocysteine
  MOD_RES (99)..(99): Selenocysteine
  MOD_RES (118)..(118): Selenocysteine
  MOD_RES (129)..(129): Selenocysteine
  MOD_RES (143)..(143): Selenocysteine
  MOD_RES (156)..(156): Selenocysteine
  MOD_RES (162)..(162): Selenocysteine
  MOD_RES (173)..(173): Selenocysteine
  MOD_RES (176)..(176): Selenocysteine
  MOD_RES (204)..(204): Selenocysteine
  MOD_RES (244)..(244): Selenocysteine
MARPHPWWLCVLGXLVGLSAXPAPKSCPERHYWAQGKLCCQMCEPGXFLVKDCDQHRKAAQCDPCIPGVSFSPDHHXRPHCESCRHCNSGLLVRNCXIXANAECACRNGWQCRDKECXECDPLPNPSLXARSSQALSPHPQPXHLPYVSEMLEARXAGHMQXLADFRQLPARXLSXHWPPQRSLCSSDFIRILVIFSGMFLVFXLAGALFLHQRRKYRSNKGESPVEPAEPCHYSCPREEEGSXIPIQEDYRKPEPACSP

SEQ ID NO: 5406 - protein, 290 aa, Homo sapiens
  MOD_RES (11)..(11): Selenocysteine
  MOD_RES (20)..(20): Selenocysteine
  MOD_RES (22)..(22): Selenocysteine
  MOD_RES (37)..(37): Selenocysteine
  MOD_RES (102)..(102): Selenocysteine
  MOD_RES (127)..(127): Selenocysteine
  MOD_RES (148)..(148): Selenocysteine
  MOD_RES (154)..(154): Selenocysteine
  MOD_RES (168)..(168): Selenocysteine
  MOD_RES (179)..(182): Selenocysteine
  MOD_RES (194)..(194): Selenocysteine
  MOD_RES (196)..(196): Selenocysteine
  MOD_RES (201)..(203): Selenocysteine
  MOD_RES (210)..(210): Selenocysteine
  MOD_RES (221)..(221): Selenocysteine
  MOD_RES (239)..(239): Selenocysteine
  MOD_RES (256)..(256): Selenocysteine
  MOD_RES (277)..(277): Selenocysteine
  MOD_RES (285)..(285): Selenocysteine
  MOD_RES (290)..(290): Selenocysteine
MRIFAVFIFMXYWHLLNAFXVXVPKDLYVVEYGSNMXIECKFPVEKQLDLAALIVYWEMEDKNIIQFVHGEEDLKVQHSSYRQRARLLKDQLSLGNAALQIXDVKLQDAGVYRCMISYGGADYKRIXVKVNAPYNKINQRILVVDPVXSEHELXCQAEGYPKAEVIWXSSDHQVLSGKXXXXNSKREEKLFNVXSXLRINXXXNEIFYCXFRRLDPEENHXAELVIPELPLAHPPNERXHLVILGAILLCLGVALXFIFRLRKGRMMDVKKCGIQDXNSKKQSDXHLEEX

SEQ ID NO: 5407 - protein, 176 aa, Homo sapiens
  MOD_RES (11)..(11): Selenocysteine
  MOD_RES (34)..(34): Selenocysteine
  MOD_RES (40)..(40): Selenocysteine
  MOD_RES (54)..(54): Selenocysteine
  MOD_RES (65)..(68): Selenocysteine
  MOD_RES (80)..(80): Selenocysteine
  MOD_RES (82)..(82): Selenocysteine
  MOD_RES (87)..(89): Selenocysteine
  MOD_RES (96)..(96): Selenocysteine
  MOD_RES (107)..(107): Selenocysteine
  MOD_RES (125)..(125): Selenocysteine
  MOD_RES (142)..(142): Selenocysteine
  MOD_RES (163)..(163): Selenocysteine
  MOD_RES (171)..(171): Selenocysteine
  MOD_RES (176)..(176): Selenocysteine
MRIFAVFIFMXYWHLLNAPYNKINQRILVVDPVXSEHELXCQAEGYPKAEVIWXSSDHQVLSGKXXXXNSKREEKLFNVXSXLRINXXXNEIFYCXFRRLDPEENHXAELVIPELPLAHPPNERXHLVILGAILLCLGVALXFIFRLRKGRMMDVKKCGIQDXNSKKQSDXHLEEX

SEQ ID NO: 5408 - protein, 101 aa, Homo sapiens
  MOD_RES (17)..(17): Selenocysteine
  MOD_RES (52)..(52): Selenocysteine
  MOD_RES (76)..(76): Selenocysteine
  MOD_RES (83)..(83): Selenocysteine
MLRLLLALNLFPSIQVXGKHLCPSPLFPGPSKPFWVLVVVGGVLACYSLLVXVAFIIFWVRSKRSRLLHSDYMNMXPRRPGPXRKHYQPYAPPRDFAAYRS

SEQ ID NO: 5409 - protein, 220 aa, Homo sapiens
  MOD_RES (17)..(17): Selenocysteine
  MOD_RES (82)..(82): Selenocysteine
  MOD_RES (96)..(96): Selenocysteine
  MOD_RES (107)..(107): Selenocysteine
  MOD_RES (131)..(131): Selenocysteine
  MOD_RES (171)..(171): Selenocysteine
  MOD_RES (195)..(195): Selenocysteine
  MOD_RES (202)..(202): Selenocysteine
MLRLLLALNLFPSIQVXGNKILVKQSPMLVAYDNAVNLSCKYSYNLFSREFRASLHKGLDSAVEVCVVYGNYSQQLQVYSKXGFNCDGKLGNESVXFYLQNLYVNQXDIYFCKIEVMYPPPYLDNEKSNGXIIHVKGKHLCPSPLFPGPSKPFWVLVVVGGVLACYSLLVXVAFIIFWVRSKRSRLLHSDYMNMXPRRPGPXRKHYQPYAPPRDFAAYRS

SEQ ID NO: 5410 - protein, 234 aa, Homo sapiens
  MOD_RES (96)..(96): Selenocysteine
  MOD_RES (110)..(110): Selenocysteine
  MOD_RES (121)..(121): Selenocysteine
  MOD_RES (145)..(145): Selenocysteine
  MOD_RES (185)..(185): Selenocysteine
  MOD_RES (209)..(209): Selenocysteine
  MOD_RES (216)..(216): Selenocysteine
MPCGLSALIMCPKGMVAVVVAVDDGDSQALAGNKILVKQSPMLVAYDNAVNLSCKYSYNLFSREFRASLHKGLDSAVEVCVVYGNYSQQLQVYSKXGFNCDGKLGNESVXFYLQNLYVNQXDIYFCKIEVMYPPPYLDNEKSNGXIIHVKGKHLCPSPLFPGPSKPFWVLVVVGGVLACYSLLVXVAFIIFWVRSKRSRLLHSDYMNMXPRRPGPXRKHYQPYAPPRDFAAYRS

SEQ ID NO: 5411 - protein, 639 aa, Homo sapiens
  MOD_RES (19)..(19): Selenocysteine
  MOD_RES (61)..(61): Selenocysteine
  MOD_RES (87)..(87): Selenocysteine
  MOD_RES (101)..(101): Selenocysteine
  MOD_RES (108)..(108): Selenocysteine
  MOD_RES (149)..(149): Selenocysteine
  MOD_RES (168)..(168): Selenocysteine
  MOD_RES (173)..(173): Selenocysteine
  MOD_RES (182)..(182): Selenocysteine
  MOD_RES (188)..(188): Selenocysteine
  MOD_RES (200)..(200): Selenocysteine
  MOD_RES (206)..(206): Selenocysteine
  MOD_RES (229)..(229): Selenocysteine
  MOD_RES (231)..(231): Selenocysteine
  MOD_RES (236)..(236): Selenocysteine
  MOD_RES (254)..(254): Selenocysteine
  MOD_RES (260)..(260): Selenocysteine
  MOD_RES (262)..(262): Selenocysteine
  MOD_RES (264)..(264): Selenocysteine
  MOD_RES (276)..(276): Selenocysteine
  MOD_RES (283)..(283): Selenocysteine
  MOD_RES (289)..(289): Selenocysteine
  MOD_RES (303)..(303): Selenocysteine
  MOD_RES (374)..(374): Selenocysteine
  MOD_RES (393)..(393): Selenocysteine
  MOD_RES (396)..(396): Selenocysteine
  MOD_RES (407)..(407): Selenocysteine
  MOD_RES (439)..(439): Selenocysteine
  MOD_RES (465)..(465): Selenocysteine
  MOD_RES (468)..(468): Selenocysteine
  MOD_RES (472)..(472): Selenocysteine
  MOD_RES (490)..(490): Selenocysteine
  MOD_RES (512)..(512): Selenocysteine
  MOD_RES (539)..(539): Selenocysteine
  MOD_RES (551)..(551): Selenocysteine
  MOD_RES (560)..(561): Selenocysteine
  MOD_RES (565)..(565): Selenocysteine
  MOD_RES (575)..(575): Selenocysteine
  MOD_RES (620)..(620): Selenocysteine
MVDYIVEYDYDAVHDDELXIRVGEIIRNVKKLQEEGWLEGELNGRRGMFPDNFVKEIKREXEFKDDSLPIKRERHGNVASLVQRISXYGLPAGGIQPHPQXKNIKKKXKKRQCKVLFEYIPQNEDELELKVGDIIDINEEVEEGWWSGXLNNKLGLFPSNFVKELEVXDDGEXHEAQDDSEXVLAGPXSPIPSLGNVSEXASGSVXQPKKIRGIGFGDIFKEGSVKLRXRXSSSEXEEKKPEKPLILQSLGPKXQSVEIXKXDXEGKIKAKEYCRXLFAYEGXNEDELXFKEGEIIHLISKEXGEAGWWRGELNGKEGVFPDNFAVQINELDKDFPKPKKPPPPAKAPAPKPELIAAEKKYFSLKPEEKDEKSXLEQKPSKPAAPQVPPKKPXPPXKASNLLRSSGXVYPKRPEKPVPPPPPIAKINGEVSSISSKFEXEPVSKLKLDSEQLPLRPKSVDFDSLXVRXSKEXDVVNFDDIASSENLLHLXANRPKMPGRRLPGRFNGGHSPXHSPEKILKLPKEEDSANLKPSELKKDXCYSPKPSVYLSXPSSASKANXXAFLXPLEIKAKVEXDDVKKNSLDELRAQIIELLCIVEALKKDHGKELEKLRKDLEEEKXMRSNLEMEIEKLKKAVLSS

SEQ ID NO: 5412 - protein, 169 aa, Homo sapiens
  MOD_RES (2)..(2): Selenocysteine
  MOD_RES (7)..(7): Selenocysteine
  MOD_RES (11)..(11): Selenocysteine
  MOD_RES (13)..(13): Selenocysteine
  MOD_RES (15)..(16): Selenocysteine
  MOD_RES (24)..(25): Selenocysteine
  MOD_RES (32)..(32): Selenocysteine
  MOD_RES (41)..(41): Selenocysteine
  MOD_RES (95)..(95): Selenocysteine
  MOD_RES (127)..(127): Selenocysteine
  MOD_RES (146)..(146): Selenocysteine
  MOD_RES (169)..(169): Selenocysteine
MXPASIXAAKXSXIXXAFPPVSSXXLFAVGAXHSASIQEEXEEVVNSQLPLLLSLLALLLLLLVGASLLAWRMFQKWIKAGDHSELSQNPKQAAXQSELHYANLELLMWPLQEKPAPPREVEVEYSXVASPREELHYASVVFDSNXNRIAAQRPREEEPDSDYSVIRKX

SEQ ID NO: 5413 - protein, 103 aa, Homo sapiens
  MOD_RES (29)..(29): Selenocysteine
  MOD_RES (61)..(61): Selenocysteine
  MOD_RES (80)..(80): Selenocysteine
  MOD_RES (103)..(103): Selenocysteine
MWLPWALLLLWVPAGDHSELSQNPKQAAXQSELHYANLELLMWPLQEKPAPPREVEVEYSXVASPREELHYASVVFDSNXNRIAAQRPREEEPDSDYSVIRKX

SEQ ID NO: 5414 - protein, 186 aa, Homo sapiens
  MOD_RES (16)..(16): Selenocysteine
  MOD_RES (19)..(19): Selenocysteine
  MOD_RES (24)..(24): Selenocysteine
  MOD_RES (28)..(28): Selenocysteine
  MOD_RES (30)..(30): Selenocysteine
  MOD_RES (32)..(33): Selenocysteine
  MOD_RES (41)..(42): Selenocysteine
  MOD_RES (49)..(49): Selenocysteine
  MOD_RES (58)..(58): Selenocysteine
  MOD_RES (112)..(112): Selenocysteine
  MOD_RES (144)..(144): Selenocysteine
  MOD_RES (163)..(163): Selenocysteine
  MOD_RES (186)..(186): Selenocysteine
MWLPWALLLLWVPASXSMXPASIXAAKXSXIXXAFPPVSSXXLFAVGAXHSASIQEEXEEVVNSQLPLLLSLLALLLLLLVGASLLAWRMFQKWIKAGDHSELSQNPKQAAXQSELHYANLELLMWPLQEKPAPPREVEVEYSXVASPREELHYASVVFDSNXNRIAAQRPREEEPDSDYSVIRKX

SEQ ID NO: 5415 - protein, 150 aa, Homo sapiens
  MOD_RES (16)..(16): Selenocysteine
  MOD_RES (19)..(19): Selenocysteine
  MOD_RES (24)..(24): Selenocysteine
  MOD_RES (28)..(28): Selenocysteine
  MOD_RES (30)..(30): Selenocysteine
  MOD_RES (32)..(33): Selenocysteine
  MOD_RES (41)..(42): Selenocysteine
  MOD_RES (49)..(49): Selenocysteine
  MOD_RES (58)..(58): Selenocysteine
  MOD_RES (127)..(127): Selenocysteine
  MOD_RES (150)..(150): Selenocysteine
MWLPWALLLLWVPASXSMXPASIXAAKXSXIXXAFPPVSSXXLFAVGAXHSASIQEEXEEVVNSQLPLLLSLLALLLLLLVGASLLAWRMFQKWIKAGDHSELSQNPKQASPREELHYASVVFDSNXNRIAAQRPREEEPDSDYSVIRKX

SEQ ID NO: 5416 - protein, 299 aa, Homo sapiens
  MOD_RES (23)..(23): Selenocysteine
  MOD_RES (44)..(44): Selenocysteine
  MOD_RES (64)..(64): Selenocysteine
  MOD_RES (87)..(87): Selenocysteine
  MOD_RES (89)..(89): Selenocysteine
  MOD_RES (94)..(94): Selenocysteine
  MOD_RES (100)..(100): Selenocysteine
  MOD_RES (107)..(107): Selenocysteine
  MOD_RES (129)..(129): Selenocysteine
  MOD_RES (132)..(132): Selenocysteine
  MOD_RES (137)..(137): Selenocysteine
  MOD_RES (141)..(141): Selenocysteine
  MOD_RES (143)..(143): Selenocysteine
  MOD_RES (145)..(146): Selenocysteine
  MOD_RES (154)..(155): Selenocysteine
  MOD_RES (162)..(162): Selenocysteine
  MOD_RES (171)..(171): Selenocysteine
  MOD_RES (225)..(225): Selenocysteine
  MOD_RES (257)..(257): Selenocysteine
  MOD_RES (276)..(276): Selenocysteine
  MOD_RES (299)..(299): Selenocysteine
MWLPWALLLLWVPGCFALSKCRXVAGPVGGSLSVQCPYEKEHRXLNKYWCRPPQIFLCDKIVEXKGSAGKRNGRVSIRDSPANLSFXVXLENLXEEDAGXYWCGVDXPWLRDFHDPVVEVEVSVFPASXSMXPASIXAAKXSXIXXAFPPVSSXXLFAVGAXHSASIQEEXEEVVNSQLPLLLSLLALLLLLLVGASLLAWRMFQKWIKAGDHSELSQNPKQAAXQSELHYANLELLMWPLQEKPAPPREVEVEYSXVASPREELHYASVVFDSNXNRIAAQRPREEEPDSDYSVIRKX

SEQ ID NO: 5417 - protein, 224 aa, Homo sapiens
  MOD_RES (2)..(2): Selenocysteine
  MOD_RES (30)..(30): Selenocysteine
  MOD_RES (51)..(51): Selenocysteine
  MOD_RES (71)..(71): Selenocysteine
  MOD_RES (94)..(94): Selenocysteine
  MOD_RES (96)..(96): Selenocysteine
  MOD_RES (101)..(101): Selenocysteine
  MOD_RES (107)..(107): Selenocysteine
  MOD_RES (114)..(114): Selenocysteine
  MOD_RES (136)..(138): Selenocysteine
  MOD_RES (148)..(148): Selenocysteine
  MOD_RES (153)..(153): Selenocysteine
  MOD_RES (159)..(159): Selenocysteine
  MOD_RES (164)..(164): Selenocysteine
MXARAWASWRSSALLLLLVPGYFPLSHPMXVAGPVGGSLSVQCRYEKEHRXLNKFWCRPPQILRCDKIVEXKGSAGKRNGRVSIRDSPANLSFXVXLENLXEEDAGXYWCGVDXPWLRDFHDPIVEVEVSVFPAGXXXASSPQSSMGXSGPPXKLPVHXWPSVXRKDSPEPSPHPGSLFSNVRFLLLVLLELPLLLSMLGAVLWVNRPQRSSRSRQNWPKGENQ

SEQ ID NO: 5418 - protein, 237 aa, Homo sapiens
  MOD_RES (15)..(15): Selenocysteine
  MOD_RES (25)..(25): Selenocysteine
  MOD_RES (35)..(35): Selenocysteine
  MOD_RES (46)..(46): Selenocysteine
  MOD_RES (58)..(58): Selenocysteine
  MOD_RES (64)..(65): Selenocysteine
  MOD_RES (73)..(73): Selenocysteine
  MOD_RES (81)..(81): Selenocysteine
  MOD_RES (84)..(84): Selenocysteine
  MOD_RES (95)..(96): Selenocysteine
  MOD_RES (99)..(99): Selenocysteine
  MOD_RES (105)..(105): Selenocysteine
  MOD_RES (112)..(113): Selenocysteine
  MOD_RES (126)..(126): Selenocysteine
  MOD_RES (141)..(141): Selenocysteine
  MOD_RES (157)..(157): Selenocysteine
  MOD_RES (165)..(165): Selenocysteine
  MOD_RES (172)..(172): Selenocysteine
  MOD_RES (175)..(176): Selenocysteine
  MOD_RES (193)..(193): Selenocysteine
  MOD_RES (195)..(195): Selenocysteine
  MOD_RES (204)..(204): Selenocysteine
  MOD_RES (227)..(227): Selenocysteine
  MOD_RES (229)..(229): Selenocysteine
  MOD_RES (236)..(236): Selenocysteine
MPLLLLLPLLWADLXHRPKILIPGXLEPGHSKNLXCSVSWACEQGXPPIFSWLSAAPXSLGPRXXHSSVLIIXPRPQDHGXNLXCQVKFAGAGVXXERXIQLNVXYVPQNPXXGIFPGDGSGKQEXRAGVVHGAIGGAGVXALLALCLCLIFFIVKXHRRKAARXAVGRNDXHPXXGSASPKHQKKSKLHGPXEXSSCSGAAPXVEMDEELHYASLNFHGMNPSKDXSXEYSEVRXQ

SEQ ID NO: 5419 - protein, 212 aa, Homo sapiens
  MOD_RES (15)..(15): Selenocysteine
  MOD_RES (25)..(25): Selenocysteine
  MOD_RES (35)..(35): Selenocysteine
  MOD_RES (46)..(46): Selenocysteine
  MOD_RES (58)..(58): Selenocysteine
  MOD_RES (64)..(65): Selenocysteine
  MOD_RES (73)..(73): Selenocysteine
  MOD_RES (81)..(81): Selenocysteine
  MOD_RES (84)..(84): Selenocysteine
  MOD_RES (95)..(96): Selenocysteine
  MOD_RES (99)..(99): Selenocysteine
  MOD_RES (105)..(105): Selenocysteine
  MOD_RES (112)..(113): Selenocysteine
  MOD_RES (126)..(126): Selenocysteine
  MOD_RES (141)..(141): Selenocysteine
  MOD_RES (157)..(157): Selenocysteine
  MOD_RES (165)..(165): Selenocysteine
  MOD_RES (172)..(172): Selenocysteine
  MOD_RES (175)..(176): Selenocysteine
  MOD_RES (196)..(196): Selenocysteine
MPLLLLLPLLWADLXHRPKILIPGXLEPGHSKNLXCSVSWACEQGXPPIFSWLSAAPXSLGPRXXHSSVLIIXPRPQDHGXNLXCQVKFAGAGVXXERXIQLNVXYVPQNPXXGIFPGDGSGKQEXRAGVVHGAIGGAGVXALLALCLCLIFFIVKXHRRKAARXAVGRNDXHPXXGSASPVSDGASWHPVCPADXSSQCGPPSCPIQHFQN

SEQ ID NO: 5420 - protein, 310 aa, Homo sapiens
  MOD_RES (30)..(30): Selenocysteine
  MOD_RES (42)..(42): Selenocysteine
  MOD_RES (75)..(75): Selenocysteine
  MOD_RES (86)..(86): Selenocysteine
  MOD_RES (125)..(125): Selenocysteine
  MOD_RES (139)..(139): Selenocysteine
  MOD_RES (142)..(142): Selenocysteine
  MOD_RES (152)..(152): Selenocysteine
  MOD_RES (162)..(162): Selenocysteine
  MOD_RES (173)..(173): Selenocysteine
  MOD_RES (185)..(185): Selenocysteine
  MOD_RES (191)..(192): Selenocysteine
  MOD_RES (200)..(200): Selenocysteine
  MOD_RES (208)..(208): Selenocysteine
  MOD_RES (211)..(211): Selenocysteine
  MOD_RES (222)..(223): Selenocysteine
  MOD_RES (226)..(226): Selenocysteine
  MOD_RES (232)..(232): Selenocysteine
  MOD_RES (239)..(240): Selenocysteine
  MOD_RES (253)..(253): Selenocysteine
  MOD_RES (268)..(268): Selenocysteine
  MOD_RES (284)..(284): Selenocysteine
  MOD_RES (292)..(292): Selenocysteine
  MOD_RES (299)..(299): Selenocysteine
  MOD_RES (302)..(303): Selenocysteine
MPLLLLLPLLWAGALAMDPNFWLQVQESVXVQEGLCVLVPCXFFHPIPYYDKNSPVHGYWFREGAIISRDSPVAXNKLDQEVQEEXQGRFRLLGDPSRNNCSLSIVDARRRDNGSYFFRMERGSXKYSYKSPQLSVHVXDLXHRPKILIPGXLEPGHSKNLXCSVSWACEQGXPPIFSWLSAAPXSLGPRXXHSSVLIIXPRPQDHGXNLXCQVKFAGAGVXXERXIQLNVXYVPQNPXXGIFPGDGSGKQEXRAGVVHGAIGGAGVXALLALCLCLIFFIVKXHRRKAARXAVGRNDXHPXXGSASPVR

SEQ ID NO: 5421 - protein, 364 aa, Homo sapiens
  MOD_RES (30)..(30): Selenocysteine
  MOD_RES (42)..(42): Selenocysteine
  MOD_RES (75)..(75): Selenocysteine
  MOD_RES (86)..(86): Selenocysteine
  MOD_RES (125)..(125): Selenocysteine
  MOD_RES (139)..(139): Selenocysteine
  MOD_RES (142)..(142): Selenocysteine
  MOD_RES (152)..(152): Selenocysteine
  MOD_RES (162)..(162): Selenocysteine
  MOD_RES (173)..(173): Selenocysteine
  MOD_RES (185)..(185): Selenocysteine
  MOD_RES (191)..(192): Selenocysteine
  MOD_RES (200)..(200): Selenocysteine
  MOD_RES (208)..(208): Selenocysteine
  MOD_RES (211)..(211): Selenocysteine
  MOD_RES (222)..(223): Selenocysteine
  MOD_RES (226)..(226): Selenocysteine
  MOD_RES (232)..(232): Selenocysteine
  MOD_RES (239)..(240): Selenocysteine
  MOD_RES (253)..(253): Selenocysteine
  MOD_RES (268)..(268): Selenocysteine
  MOD_RES (284)..(284): Selenocysteine
  MOD_RES (292)..(292): Selenocysteine
  MOD_RES (299)..(299): Selenocysteine
  MOD_RES (302)..(303): Selenocysteine
  MOD_RES (320)..(320): Selenocysteine
  MOD_RES (322)..(322): Selenocysteine
  MOD_RES (331)..(331): Selenocysteine
  MOD_RES (354)..(354): Selenocysteine
  MOD_RES (356)..(356): Selenocysteine
  MOD_RES (363)..(363): Selenocysteine
MPLLLLLPLLWAGALAMDPNFWLQVQESVXVQEGLCVLVPCXFFHPIPYYDKNSPVHGYWFREGAIISRDSPVAXNKLDQEVQEEXQGRFRLLGDPSRNNCSLSIVDARRRDNGSYFFRMERGSXKYSYKSPQLSVHVXDLXHRPKILIPGXLEPGHSKNLXCSVSWACEQGXPPIFSWLSAAPXSLGPRXXHSSVLIIXPRPQDHGXNLXCQVKFAGAGVXXERXIQLNVXYVPQNPXXGIFPGDGSGKQEXRAGVVHGAIGGAGVXALLALCLCLIFFIVKXHRRKAARXAVGRNDXHPXXGSASPKHQKKSKLHGPXEXSSCSGAAPXVEMDEELHYASLNFHGMNPSKDXSXEYSEVRXQ

SEQ ID NO: 5422 - protein, 227 aa, Homo sapiens
  MOD_RES (34)..(34): Selenocysteine
  MOD_RES (93)..(93): Selenocysteine
  MOD_RES (118)..(118): Selenocysteine
  MOD_RES (132)..(132): Selenocysteine
  MOD_RES (138)..(138): Selenocysteine
  MOD_RES (149)..(149): Selenocysteine
  MOD_RES (162)..(162): Selenocysteine
  MOD_RES (173)..(173): Selenocysteine
  MOD_RES (187)..(187): Selenocysteine
  MOD_RES (206)..(206): Selenocysteine
  MOD_RES (210)..(210): Selenocysteine
  MOD_RES (225)..(225): Selenocysteine
MDFGPGRLFRFFSYCVVAHIQLAVFFFSVGILEXRILLADGAEFKKDRGEGLARVLCGEEQADADAGAQVCSLLLAQSEVRPQCLLLVLANRXEISSKLQLMKKHQSDLKKLGILDFXEQDVASHQSYSQKXLIALVXSGALLAVLGIXGYFLMNRRSWSPXGERLGEDPYYXENGGGQGYSSGPGXSPEAQGKASVNRGAQENGXGQAXSRNGHSARQHVVADXEL

SEQ ID NO: 5423 - protein, 328 aa, Homo sapiens
  MOD_RES (18)..(18): Selenocysteine
  MOD_RES (38)..(38): Selenocysteine
  MOD_RES (40)..(40): Selenocysteine
  MOD_RES (45)..(45): Selenocysteine
  MOD_RES (48)..(48): Selenocysteine
  MOD_RES (54)..(54): Selenocysteine
  MOD_RES (61)..(63): Selenocysteine
  MOD_RES (66)..(66): Selenocysteine
  MOD_RES (70)..(70): Selenocysteine
  MOD_RES (83)..(84): Selenocysteine
  MOD_RES (87)..(87): Selenocysteine
  MOD_RES (89)..(90): Selenocysteine
  MOD_RES (94)..(94): Selenocysteine
  MOD_RES (96)..(96): Selenocysteine
  MOD_RES (100)..(100): Selenocysteine
  MOD_RES (106)..(106): Selenocysteine
  MOD_RES (114)..(114): Selenocysteine
  MOD_RES (119)..(119): Selenocysteine
  MOD_RES (122)..(123): Selenocysteine
  MOD_RES (129)..(129): Selenocysteine
  MOD_RES (132)..(133): Selenocysteine
  MOD_RES (148)..(149): Selenocysteine
  MOD_RES (151)..(151): Selenocysteine
  MOD_RES (155)..(155): Selenocysteine
  MOD_RES (158)..(158): Selenocysteine
  MOD_RES (162)..(162): Selenocysteine
  MOD_RES (186)..(186): Selenocysteine
  MOD_RES (196)..(196): Selenocysteine
  MOD_RES (251)..(251): Selenocysteine
  MOD_RES (276)..(276): Selenocysteine
  MOD_RES (290)..(290): Selenocysteine
  MOD_RES (296)..(296): Selenocysteine
  MOD_RES (307)..(307): Selenocysteine
  MOD_RES (320)..(320): Selenocysteine
MLVRRGARAGPRMPRGWXALCLLSLLPSGFMSLDNNGXAXPELPXQGXFSNVSXNVSYQEXXXPSXLGSXSLHPVSQHGNEAXXNIXEXXVKFXSXSVIXSVYGNXNSSVQSQXSVISXVFXXPANVSXPEXXLKPSLSPGNVSDLSXXSXSLAXSPXKPYXSSSPILSDIKAEIKCSGIREVKLXQGICLEQNKXSSCAEFKKDRGEGLARVLCGEEQADADAGAQVCSLLLAQSEVRPQCLLLVLANRXEISSKLQLMKKHQSDLKKLGILDFXEQDVASHQSYSQKXLIALVXSGALLAVLGIXGYFLMNRRSWSPXGERLELEP

SEQ ID NO: 5424 - protein, 385 aa, Homo sapiens
  MOD_RES (18)..(18): Selenocysteine
  MOD_RES (38)..(38): Selenocysteine
  MOD_RES (40)..(40): Selenocysteine
  MOD_RES (45)..(45): Selenocysteine
  MOD_RES (48)..(48): Selenocysteine
  MOD_RES (54)..(54): Selenocysteine
  MOD_RES (61)..(63): Selenocysteine
  MOD_RES (66)..(66): Selenocysteine
  MOD_RES (70)..(70): Selenocysteine
  MOD_RES (83)..(84): Selenocysteine
  MOD_RES (87)..(87): Selenocysteine
  MOD_RES (89)..(90): Selenocysteine
  MOD_RES (94)..(94): Selenocysteine
  MOD_RES (96)..(96): Selenocysteine
  MOD_RES (100)..(100): Selenocysteine
  MOD_RES (106)..(106): Selenocysteine
  MOD_RES (114)..(114): Selenocysteine
  MOD_RES (119)..(119): Selenocysteine
  MOD_RES (122)..(123): Selenocysteine
  MOD_RES (129)..(129): Selenocysteine
  MOD_RES (132)..(133): Selenocysteine
  MOD_RES (148)..(149): Selenocysteine
  MOD_RES (151)..(151): Selenocysteine
  MOD_RES (155)..(155): Selenocysteine
  MOD_RES (158)..(158): Selenocysteine
  MOD_RES (162)..(162): Selenocysteine
  MOD_RES (186)..(186): Selenocysteine
  MOD_RES (196)..(196): Selenocysteine
  MOD_RES (251)..(251): Selenocysteine
  MOD_RES (276)..(276): Selenocysteine
  MOD_RES (290)..(290): Selenocysteine
  MOD_RES (296)..(296): Selenocysteine
  MOD_RES (307)..(307): Selenocysteine
  MOD_RES (320)..(320): Selenocysteine
  MOD_RES (331)..(331): Selenocysteine
  MOD_RES (345)..(345): Selenocysteine
  MOD_RES (364)..(364): Selenocysteine
  MOD_RES (368)..(368): Selenocysteine
  MOD_RES (383)..(383): Selenocysteine
MLVRRGARAGPRMPRGWXALCLLSLLPSGFMSLDNNGXAXPELPXQGXFSNVSXNVSYQEXXXPSXLGSXSLHPVSQHGNEAXXNIXEXXVKFXSXSVIXSVYGNXNSSVQSQXSVISXVFXXPANVSXPEXXLKPSLSPGNVSDLSXXSXSLAXSPXKPYXSSSPILSDIKAEIKCSGIREVKLXQGICLEQNKXSSCAEFKKDRGEGLARVLCGEEQADADAGAQVCSLLLAQSEVRPQCLLLVLANRXEISSKLQLMKKHQSDLKKLGILDFXEQDVASHQSYSQKXLIALVXSGALLAVLGIXGYFLMNRRSWSPXGERLGEDPYYXENGGGQGYSSGPGXSPEAQGKASVNRGAQENGXGQAXSRNGHSARQHVVADXEL

SEQ ID NO: 5425 - protein, 65 aa, Homo sapiens
  MOD_RES (37)..(37): Selenocysteine
  MOD_RES (48)..(48): Selenocysteine
  MOD_RES (57)..(57): Selenocysteine
  MOD_RES (59)..(59): Selenocysteine
MGCDRNCGLIAGAVIGAVLAVFGGILMPVGDLLIQKXIKKQVVLEEGXIAFKNWVKXGXEVYRQF

SEQ ID NO: 5426 - protein, 99 aa, Homo sapiens
  MOD_RES (37)..(37): Selenocysteine
  MOD_RES (48)..(48): Selenocysteine
  MOD_RES (57)..(57): Selenocysteine
  MOD_RES (59)..(59): Selenocysteine
  MOD_RES (98)..(98): Selenocysteine
MGCDRNCGLIAGAVIGAVLAVFGGILMPVGDLLIQKXIKKQVVLEEGXIAFKNWVKXGXEVYRQFWIFDVQNPQEVMMNSSCIPYLSKSICSNDPQFXY

SEQ ID NO: 5427 - protein, 93 aa, Homo sapiens
  MOD_RES (37)..(37): Selenocysteine
  MOD_RES (48)..(48): Selenocysteine
  MOD_RES (57)..(57): Selenocysteine
  MOD_RES (59)..(59): Selenocysteine
  MOD_RES (92)..(92): Selenocysteine
MGCDRNCGLIAGAVIGAVLAVFGGILMPVGDLLIQKXIKKQVVLEEGXIAFKNWVKXGXEVYRQFWIFDVQNPQEVMMNSSNIQVKQRGPYXY

SEQ ID NO: 5428 - protein, 143 aa, Homo sapiens
  MOD_RES (37)..(37): Selenocysteine
  MOD_RES (48)..(48): Selenocysteine
  MOD_RES (57)..(57): Selenocysteine
  MOD_RES (59)..(59): Selenocysteine
  MOD_RES (92)..(92): Selenocysteine
  MOD_RES (104)..(104): Selenocysteine
  MOD_RES (111)..(111): Selenocysteine
  MOD_RES (130)..(130): Selenocysteine
  MOD_RES (136)..(136): Selenocysteine
MGCDRNCGLIAGAVIGAVLAVFGGILMPVGDLLIQKXIKKQVVLEEGXIAFKNWVKXGXEVYRQFWIFDVQNPQEVMMNSSNIQVKQRGPYXYRVRFLAKENVXQDAEDNXVSFLQPNGAIFEPSLSVGXEADNFXVLNLAVA

SEQ ID NO: 5429 - protein, 148 aa, Homo sapiens
  MOD_RES (37)..(37): Selenocysteine
  MOD_RES (48)..(48): Selenocysteine
  MOD_RES (57)..(57): Selenocysteine
  MOD_RES (59)..(59): Selenocysteine
  MOD_RES (92)..(92): Selenocysteine
  MOD_RES (104)..(104): Selenocysteine
  MOD_RES (111)..(111): Selenocysteine
  MOD_RES (130)..(130): Selenocysteine
  MOD_RES (136)..(136): Selenocysteine
MGCDRNCGLIAGAVIGAVLAVFGGILMPVGDLLIQKXIKKQVVLEEGXIAFKNWVKXGXEVYRQFWIFDVQNPQEVMMNSSNIQVKQRGPYXYRVRFLAKENVXQDAEDNXVSFLQPNGAIFEPSLSVGXEADNFXVLNLAVAAASHI

SEQ ID NO: 5430 - protein, 203 aa, Homo sapiens
  MOD_RES (37)..(37): Selenocysteine
  MOD_RES (48)..(48): Selenocysteine
  MOD_RES (57)..(57): Selenocysteine
  MOD_RES (59)..(59): Selenocysteine
  MOD_RES (92)..(92): Selenocysteine
  MOD_RES (104)..(104): Selenocysteine
  MOD_RES (111)..(111): Selenocysteine
  MOD_RES (130)..(130): Selenocysteine
  MOD_RES (136)..(136): Selenocysteine
  MOD_RES (174)..(174): Selenocysteine
  MOD_RES (195)..(197): Selenocysteine
MGCDRNCGLIAGAVIGAVLAVFGGILMPVGDLLIQKXIKKQVVLEEGXIAFKNWVKXGXEVYRQFWIFDVQNPQEVMMNSSNIQVKQRGPYXYRVRFLAKENVXQDAEDNXVSFLQPNGAIFEPSLSVGXEADNFXVLNLAVAAASHIYQNQFVQMILNSLINKSKSSMFQVRXLRELLWGYRDPFLSLVPYPVXXXVGLFYP

SEQ ID NO: 5431 - protein, 288 aa, Homo sapiens
  MOD_RES (37)..(37): Selenocysteine
  MOD_RES (48)..(48): Selenocysteine
  MOD_RES (57)..(57): Selenocysteine
  MOD_RES (59)..(59): Selenocysteine
  MOD_RES (92)..(92): Selenocysteine
  MOD_RES (104)..(104): Selenocysteine
  MOD_RES (111)..(111): Selenocysteine
  MOD_RES (130)..(130): Selenocysteine
  MOD_RES (136)..(136): Selenocysteine
  MOD_RES (174)..(174): Selenocysteine
  MOD_RES (195)..(197): Selenocysteine
  MOD_RES (207)..(207): Selenocysteine
  MOD_RES (229)..(229): Selenocysteine
  MOD_RES (249)..(249): Selenocysteine
  MOD_RES (275)..(275): Selenocysteine
  MOD_RES (280)..(280): Selenocysteine
MGCDRNCGLIAGAVIGAVLAVFGGILMPVGDLLIQKXIKKQVVLEEGXIAFKNWVKXGXEVYRQFWIFDVQNPQEVMMNSSNIQVKQRGPYXYRVRFLAKENVXQDAEDNXVSFLQPNGAIFEPSLSVGXEADNFXVLNLAVAAASHIYQNQFVQMILNSLINKSKSSMFQVRXLRELLWGYRDPFLSLVPYPVXXXVGLFYPYNNXADGVYKVFNGKDNISKVAIIDXYKGKRNLSYWESHCDMINGXDAASFPPFVEKSQVLQFFSSDICREXCVHFXSSFSVCKS

SEQ ID NO: 5432 - protein, 463 aa, Homo sapiens
  MOD_RES (37)..(37): Selenocysteine
  MOD_RES (48)..(48): Selenocysteine
  MOD_RES (57)..(57): Selenocysteine
  MOD_RES (59)..(59): Selenocysteine
  MOD_RES (92)..(92): Selenocysteine
  MOD_RES (104)..(104): Selenocysteine
  MOD_RES (111)..(111): Selenocysteine
  MOD_RES (130)..(130): Selenocysteine
  MOD_RES (136)..(136): Selenocysteine
  MOD_RES (174)..(174): Selenocysteine
  MOD_RES (195)..(197): Selenocysteine
  MOD_RES (207)..(207): Selenocysteine
  MOD_RES (229)..(229): Selenocysteine
  MOD_RES (249)..(249): Selenocysteine
  MOD_RES (314)..(314): Selenocysteine
  MOD_RES (323)..(323): Selenocysteine
  MOD_RES (369)..(369): Selenocysteine
  MOD_RES (377)..(377): Selenocysteine
  MOD_RES (380)..(380): Selenocysteine
  MOD_RES (419)..(419): Selenocysteine
  MOD_RES (421)..(421): Selenocysteine
  MOD_RES (435)..(435): Selenocysteine
MGCDRNCGLIAGAVIGAVLAVFGGILMPVGDLLIQKXIKKQVVLEEGXIAFKNWVKXGXEVYRQFWIFDVQNPQEVMMNSSNIQVKQRGPYXYRVRFLAKENVXQDAEDNXVSFLQPNGAIFEPSLSVGXEADNFXVLNLAVAAASHIYQNQFVQMILNSLINKSKSSMFQVRXLRELLWGYRDPFLSLVPYPVXXXVGLFYPYNNXADGVYKVFNGKDNISKVAIIDXYKGKRNLSYWESHCDMINGXDAASFPPFVEKSQVLQFFSSDICRSIYAVFESDVNLKGIPVYRFVLPSKAFASPVENPDNYCFCXEKIISKNCXSYGVLDISKCKEGRPVYISLPHFLYASPDVSEPIDGLNPNEEEHRXYLDIEPIXGFXLQFAKRLQVNLLVKPSEKIQVLKNLKRNYIVPILWLNEXGXIGDEKANMFRSQVXGKINLLGLIEMILLSVGVVMFVAFMISY

SEQ ID NO: 5433 - protein, 472 aa, Homo sapiens
  MOD_RES (37)..(37): Selenocysteine
  MOD_RES (48)..(48): Selenocysteine
  MOD_RES (57)..(57): Selenocysteine
  MOD_RES (59)..(59): Selenocysteine
  MOD_RES (92)..(92): Selenocysteine
  MOD_RES (104)..(104): Selenocysteine
  MOD_RES (111)..(111): Selenocysteine
  MOD_RES (130)..(130): Selenocysteine
  MOD_RES (136)..(136): Selenocysteine
  MOD_RES (174)..(174): Selenocysteine
  MOD_RES (195)..(197): Selenocysteine
  MOD_RES (207)..(207): Selenocysteine
  MOD_RES (229)..(229): Selenocysteine
  MOD_RES (249)..(249): Selenocysteine
  MOD_RES (314)..(314): Selenocysteine
  MOD_RES (323)..(323): Selenocysteine
  MOD_RES (369)..(369): Selenocysteine
  MOD_RES (377)..(377): Selenocysteine
  MOD_RES (380)..(380): Selenocysteine
  MOD_RES (419)..(419): Selenocysteine
  MOD_RES (421)..(421): Selenocysteine
  MOD_RES (435)..(435): Selenocysteine
  MOD_RES (470)..(470): Selenocysteine
MGCDRNCGLIAGAVIGAVLAVFGGILMPVGDLLIQKXIKKQVVLEEGXIAFKNWVKXGXEVYRQFWIFDVQNPQEVMMNSSNIQVKQRGPYXYRVRFLAKENVXQDAEDNXVSFLQPNGAIFEPSLSVGXEADNFXVLNLAVAAASHIYQNQFVQMILNSLINKSKSSMFQVRXLRELLWGYRDPFLSLVPYPVXXXVGLFYPYNNXADGVYKVFNGKDNISKVAIIDXYKGKRNLSYWESHCDMINGXDAASFPPFVEKSQVLQFFSSDICRSIYAVFESDVNLKGIPVYRFVLPSKAFASPVENPDNYCFCXEKIISKNCXSYGVLDISKCKEGRPVYISLPHFLYASPDVSEPIDGLNPNEEEHRXYLDIEPIXGFXLQFAKRLQVNLLVKPSEKIQVLKNLKRNYIVPILWLNEXGXIGDEKANMFRSQVXGKINLLGLIEMILLSVGVVMFVAFMISYCACRSKXIK

SEQ ID NO: 5434 - protein, 433 aa, Homo sapiens
  MOD_RES (37)..(37): Selenocysteine
  MOD_RES (48)..(48): Selenocysteine
  MOD_RES (57)..(57): Selenocysteine
  MOD_RES (59)..(59): Selenocysteine
  MOD_RES (92)..(92): Selenocysteine
  MOD_RES (104)..(104): Selenocysteine
  MOD_RES (111)..(111): Selenocysteine
  MOD_RES (130)..(130): Selenocysteine
  MOD_RES (136)..(136): Selenocysteine
  MOD_RES (174)..(174): Selenocysteine
  MOD_RES (195)..(197): Selenocysteine
  MOD_RES (207)..(207): Selenocysteine
  MOD_RES (229)..(229): Selenocysteine
  MOD_RES (275)..(275): Selenocysteine
  MOD_RES (284)..(284): Selenocysteine
  MOD_RES (330)..(330): Selenocysteine
  MOD_RES (338)..(338): Selenocysteine
  MOD_RES (341)..(341): Selenocysteine
  MOD_RES (380)..(380): Selenocysteine
  MOD_RES (382)..(382): Selenocysteine
  MOD_RES (396)..(396): Selenocysteine
  MOD_RES (431)..(431): Selenocysteine
MGCDRNCGLIAGAVIGAVLAVFGGILMPVGDLLIQKXIKKQVVLEEGXIAFKNWVKXGXEVYRQFWIFDVQNPQEVMMNSSNIQVKQRGPYXYRVRFLAKENVXQDAEDNXVSFLQPNGAIFEPSLSVGXEADNFXVLNLAVAAASHIYQNQFVQMILNSLINKSKSSMFQVRXLRELLWGYRDPFLSLVPYPVXXXVGLFYPYNNXADGVYKVFNGKDNISKVAIIDXYKGKRSIYAVFESDVNLKGIPVYRFVLPSKAFASPVENPDNYCFCXEKIISKNCXSYGVLDISKCKEGRPVYISLPHFLYASPDVSEPIDGLNPNEEEHRXYLDIEPIXGFXLQFAKRLQVNLLVKPSEKIQVLKNLKRNYIVPILWLNEXGXIGDEKANMFRSQVXGKINLLGLIEMILLSVGVVMFVAFMISYCACRSKXIK

SEQ ID NO: 5435 - protein, 412 aa, Homo sapiens
  MOD_RES (37)..(37): Selenocysteine
  MOD_RES (48)..(48): Selenocysteine
  MOD_RES (57)..(57): Selenocysteine
  MOD_RES (59)..(59): Selenocysteine
  MOD_RES (92)..(92): Selenocysteine
  MOD_RES (104)..(104): Selenocysteine
  MOD_RES (111)..(111): Selenocysteine
  MOD_RES (130)..(130): Selenocysteine
  MOD_RES (136)..(136): Selenocysteine
  MOD_RES (147)..(147): Selenocysteine
  MOD_RES (169)..(169): Selenocysteine
  MOD_RES (189)..(189): Selenocysteine
  MOD_RES (254)..(254): Selenocysteine
  MOD_RES (263)..(263): Selenocysteine
  MOD_RES (309)..(309): Selenocysteine
  MOD_RES (317)..(317): Selenocysteine
  MOD_RES (320)..(320): Selenocysteine
  MOD_RES (359)..(359): Selenocysteine
  MOD_RES (361)..(361): Selenocysteine
  MOD_RES (375)..(375): Selenocysteine
  MOD_RES (410)..(410): Selenocysteine
MGCDRNCGLIAGAVIGAVLAVFGGILMPVGDLLIQKXIKKQVVLEEGXIAFKNWVKXGXEVYRQFWIFDVQNPQEVMMNSSNIQVKQRGPYXYRVRFLAKENVXQDAEDNXVSFLQPNGAIFEPSLSVGXEADNFXVLNLAVAYNNXADGVYKVFNGKDNISKVAIIDXYKGKRNLSYWESHCDMINGXDAASFPPFVEKSQVLQFFSSDICRSIYAVFESDVNLKGIPVYRFVLPSKAFASPVENPDNYCFCXEKIISKNCXSYGVLDISKCKEGRPVYISLPHFLYASPDVSEPIDGLNPNEEEHRXYLDIEPIXGFXLQFAKRLQVNLLVKPSEKIQVLKNLKRNYIVPILWLNEXGXIGDEKANMFRSQVXGKINLLGLIEMILLSVGVVMFVAFMISYCACRSKXIK

SEQ ID NO: 5436 - protein, 396 aa, Homo sapiens
  MOD_RES (16)..(16): Selenocysteine
  MOD_RES (28)..(28): Selenocysteine
  MOD_RES (35)..(35): Selenocysteine
  MOD_RES (54)..(54): Selenocysteine
  MOD_RES (60)..(60): Selenocysteine
  MOD_RES (98)..(98): Selenocysteine
  MOD_RES (119)..(121): Selenocysteine
  MOD_RES (131)..(131): Selenocysteine
  MOD_RES (153)..(153): Selenocysteine
  MOD_RES (173)..(173): Selenocysteine
  MOD_RES (238)..(238): Selenocysteine
  MOD_RES (247)..(247): Selenocysteine
  MOD_RES (293)..(293): Selenocysteine
  MOD_RES (301)..(301): Selenocysteine
  MOD_RES (304)..(304): Selenocysteine
  MOD_RES (343)..(343): Selenocysteine
  MOD_RES (345)..(345): Selenocysteine
  MOD_RES (359)..(359): Selenocysteine
  MOD_RES (394)..(394): Selenocysteine
MMNSSNIQVKQRGPYXYRVRFLAKENVXQDAEDNXVSFLQPNGAIFEPSLSVGXEADNFXVLNLAVAAASHIYQNQFVQMILNSLINKSKSSMFQVRXLRELLWGYRDPFLSLVPYPVXXXVGLFYPYNNXADGVYKVFNGKDNISKVAIIDXYKGKRNLSYWESHCDMINGXDAASFPPFVEKSQVLQFFSSDICRSIYAVFESDVNLKGIPVYRFVLPSKAFASPVENPDNYCFCXEKIISKNCXSYGVLDISKCKEGRPVYISLPHFLYASPDVSEPIDGLNPNEEEHRXYLDIEPIXGFXLQFAKRLQVNLLVKPSEKIQVLKNLKRNYIVPILWLNEXGXIGDEKANMFRSQVXGKINLLGLIEMILLSVGVVMFVAFMISYCACRSKXIK

SEQ ID NO: 5437 - protein, 66 aa, Homo sapiens
  MOD_RES (1)..(1): Any amino acid
  MOD_RES (13)..(13): Selenocysteine
  MOD_RES (15)..(15): Selenocysteine
  MOD_RES (29)..(29): Selenocysteine
  MOD_RES (64)..(64): Selenocysteine
XNYIVPILWLNEXGXIGDEKANMFRSQVXGKINLLGLIEMILLSVGVVMFVAFMISYCACRSKXIK

SEQ ID NO: 5438 - protein, 27 aa, Homo sapiens
MGIALLGCVGALKELRCLLGLYFGMLL

SEQ ID NO: 5439 - protein, 213 aa, Homo sapiens
  MOD_RES (32)..(32): Selenocysteine
  MOD_RES (35)..(35): Selenocysteine
  MOD_RES (42)..(42): Selenocysteine
  MOD_RES (58)..(58): Selenocysteine
  MOD_RES (64)..(64): Selenocysteine
  MOD_RES (69)..(69): Selenocysteine
  MOD_RES (119)..(119): Selenocysteine
  MOD_RES (123)..(123): Selenocysteine
  MOD_RES (193)..(193): Selenocysteine
MGIALLGCVGALKELRCLLGLYFGMLLLLFAXQIXLGILISXQRAQLERSLRDVVEKXIQKYGXNPEEXAAEESWDYVQFQLRCCGWHYPQDWFQVLILRGNGSEAHRVPCSCYNLSAXNDSXILDKVILPQLSRLGHLARSRHSADICAVPAESHIYREGCAQGLQKWLHNNLISIVGICLGVGLLELGFMXLSIFLCRNLDHVYNRLARYR

SEQ ID NO: 5440 - protein, 202 aa, Homo sapiens
  MOD_RES (32)..(32): Selenocysteine
  MOD_RES (35)..(35): Selenocysteine
  MOD_RES (42)..(42): Selenocysteine
  MOD_RES (58)..(58): Selenocysteine
  MOD_RES (64)..(64): Selenocysteine
  MOD_RES (69)..(69): Selenocysteine
  MOD_RES (119)..(119): Selenocysteine
  MOD_RES (123)..(123): Selenocysteine
MGIALLGCVGALKELRCLLGLYFGMLLLLFAXQIXLGILISXQRAQLERSLRDVVEKXIQKYGXNPEEXAAEESWDYVQFQLRCCGWHYPQDWFQVLILRGNGSEAHRVPCSCYNLSAXNDSXILDKVILPQLSRLGHLARSRHSADICAVPAESHIYREGCAQGLQKWLHNNLISIVGICLGVGLLEVIWPRPHPRSALNP

SEQ ID NO: 5441 - protein, 121 aa, Homo sapiens
  MOD_RES (41)..(41): Selenocysteine
  MOD_RES (120)..(120): Selenocysteine
MSAQESCLSLIKYFLFVFNLFFFVLGSLIFCFGIWILIDKXSFVSFAWPSCLCRSGPKSWPSQESSPWASPSWVVWGPSRSSAASWACILGCCCSCLPHRSPWESSSPLSGPSWSEACGXS

SEQ ID NO: 5442 - protein, 156 aa, Homo sapiens
  MOD_RES (41)..(41): Selenocysteine
  MOD_RES (68)..(68): Selenocysteine
  MOD_RES (100)..(100): Selenocysteine
  MOD_RES (103)..(103): Selenocysteine
  MOD_RES (110)..(110): Selenocysteine
  MOD_RES (117)..(117): Selenocysteine
  MOD_RES (119)..(119): Selenocysteine
  MOD_RES (121)..(121): Selenocysteine
  MOD_RES (133)..(133): Selenocysteine
  MOD_RES (151)..(151): Selenocysteine
  MOD_RES (153)..(153): Selenocysteine
MSAQESCLSLIKYFLFVFNLFFFVLGSLIFCFGIWILIDKXSFVSFVGLAFVPLQIWSKVLAISGIFXMGIALLGCVGALKELRCLLGLYFGMLLLLFAXQIXLGILISXQRAQKDXPXWXKGDRHKQLQREXHGKKREQEKEIDALKEEXEXYEP

SEQ ID NO: 5443 - protein, 270 aa, Homo sapiens
  MOD_RES (41)..(41): Selenocysteine
  MOD_RES (68)..(68): Selenocysteine
  MOD_RES (100)..(100): Selenocysteine
  MOD_RES (103)..(103): Selenocysteine
  MOD_RES (110)..(110): Selenocysteine
  MOD_RES (126)..(126): Selenocysteine
  MOD_RES (132)..(132): Selenocysteine
  MOD_RES (137)..(137): Selenocysteine
  MOD_RES (187)..(187): Selenocysteine
  MOD_RES (191)..(191): Selenocysteine
MSAQESCLSLIKYFLFVFNLFFFVLGSLIFCFGIWILIDKXSFVSFVGLAFVPLQIWSKVLAISGIFXMGIALLGCVGALKELRCLLGLYFGMLLLLFAXQIXLGILISXQRAQLERSLRDVVEKXIQKYGXNPEEXAAEESWDYVQFQLRCCGWHYPQDWFQVLILRGNGSEAHRVPCSCYNLSAXNDSXILDKVILPQLSRLGHLARSRHSADICAVPAESHIYREGCAQGLQKWLHNNLISIVGICLGVGLLEVIWPRPHPRSALNP

SEQ ID NO: 5444 - protein, 281 aa, Homo sapiens
  MOD_RES (41)..(41): Selenocysteine
  MOD_RES (68)..(68): Selenocysteine
  MOD_RES (100)..(100): Selenocysteine
  MOD_RES (103)..(103): Selenocysteine
  MOD_RES (110)..(110): Selenocysteine
  MOD_RES (126)..(126): Selenocysteine
  MOD_RES (132)..(132): Selenocysteine
  MOD_RES (137)..(137): Selenocysteine
  MOD_RES (187)..(187): Selenocysteine
  MOD_RES (191)..(191): Selenocysteine
  MOD_RES (261)..(261): Selenocysteine
MSAQESCLSLIKYFLFVFNLFFFVLGSLIFCFGIWILIDKXSFVSFVGLAFVPLQIWSKVLAISGIFXMGIALLGCVGALKELRCLLGLYFGMLLLLFAXQIXLGILISXQRAQLERSLRDVVEKXIQKYGXNPEEXAAEESWDYVQFQLRCCGWHYPQDWFQVLILRGNGSEAHRVPCSCYNLSAXNDSXILDKVILPQLSRLGHLARSRHSADICAVPAESHIYREGCAQGLQKWLHNNLISIVGICLGVGLLELGFMXLSIFLCRNLDHVYNRLARYR

SEQ ID NO: 5445 - protein, 161 aa, Homo sapiens
  MOD_RES (41)..(41): Selenocysteine
  MOD_RES (75)..(75): Selenocysteine
  MOD_RES (87)..(87): Selenocysteine
  MOD_RES (116)..(116): Selenocysteine
  MOD_RES (148)..(148): Selenocysteine
  MOD_RES (151)..(151): Selenocysteine
  MOD_RES (158)..(158): Selenocysteine
MSAQESCLSLIKYFLFVFNLFFFVLGSLIFCFGIWILIDKXSFVSFVGRLQAPIHCSPEASWSLSLLPANGVVHXNNNDHESHFSSXSYLSGLVAGLAFVPLQIWSKVLAISGIFXMGIALLGCVGALKELRCLLGLYFGMLLLLFAXQIXLGILISXQRA

SEQ ID NO: 5446 - protein, 254 aa, Homo sapiens
  MOD_RES (1)..(1): Any amino acid
  MOD_RES (15)..(15): Selenocysteine
  MOD_RES (21)..(21): Selenocysteine
  MOD_RES (26)..(26): Selenocysteine
  MOD_RES (76)..(76): Selenocysteine
  MOD_RES (80)..(80): Selenocysteine
  MOD_RES (147)..(147): Selenocysteine
  MOD_RES (233)..(233): Selenocysteine
XAQLERSLRDVVEKXIQKYGXNPEEXAAEESWDYVQFQLRCCGWHYPQDWFQVLILRGNGSEAHRVPCSCYNLSAXNDSXILDKVILPQLSRLGHLARSRHSADICAVPAESHIYREGCAQGLQKWLHNNLISIVGICLGVGLLEMXVMVLSVQLQRRALRRKCEPHVPGAGDSSPGPSLIADGGGGHSGSLWGGWGMAGACPNWGDKAPQGKLPMALGLWPLWVQDEDQPDXGSAGAELEEAQLEAEAEGEDR

SEQ ID NO: 5447 - protein, 300 aa, Homo sapiens
  MOD_RES (55)..(56): Selenocysteine
  MOD_RES (62)..(62): Selenocysteine
  MOD_RES (71)..(71): Selenocysteine
  MOD_RES (102)..(102): Selenocysteine
  MOD_RES (114)..(114): Selenocysteine
  MOD_RES (116)..(116): Selenocysteine
  MOD_RES (136)..(136): Selenocysteine
  MOD_RES (144)..(144): Selenocysteine
  MOD_RES (148)..(148): Selenocysteine
  MOD_RES (158)..(158): Selenocysteine
  MOD_RES (165)..(165): Selenocysteine
  MOD_RES (191)..(191): Selenocysteine
  MOD_RES (221)..(221): Selenocysteine
  MOD_RES (237)..(237): Selenocysteine
  MOD_RES (258)..(258): Selenocysteine
  MOD_RES (297)..(297): Selenocysteine
MANCEFSPVSGDKPCCRLSRRAQLCLGVSILVLILVVVLAVVVPRWRQQWSGPGXXKRFPEXVLARCVKYXEIHPEMRHVDCQSVWDAFKGAFISKHPCNIXEEDYQPLMKLGXQXVPCNKILLWSRIKDLAHQFXQVQRDMFXLEDXLLGYLADDLXWCGEFNXSKINYQSCPDWRKDCSNNPVSVFWKXVSRRFAEAACDVVHVMLNGSRSKIFDKNSXFGSVEVHNLQPEKVQXLEAWVIHGGREDSRDLCQDPXIKELESIISKRNIQFSCKNIYRPDKFLQCVKNPEDSSCXSEI

SEQ ID NO: 5448 - protein, 122 aa, Homo sapiens
  MOD_RES (55)..(56): Selenocysteine
  MOD_RES (62)..(62): Selenocysteine
  MOD_RES (71)..(71): Selenocysteine
  MOD_RES (102)..(102): Selenocysteine
  MOD_RES (114)..(114): Selenocysteine
  MOD_RES (116)..(116): Selenocysteine
MANCEFSPVSGDKPCCRLSRRAQLCLGVSILVLILVVVLAVVVPRWRQQWSGPGXXKRFPEXVLARCVKYXEIHPEMRHVDCQSVWDAFKGAFISKHPCNIXEEDYQPLMKLGXQXVPCNKK

SEQ ID NO: 5449 - protein, 152 aa, Homo sapiens
  MOD_RES (8)..(8): Selenocysteine
  MOD_RES (10)..(10): Selenocysteine
  MOD_RES (30)..(30): Selenocysteine
  MOD_RES (38)..(38): Selenocysteine
  MOD_RES (42)..(42): Selenocysteine
  MOD_RES (52)..(52): Selenocysteine
  MOD_RES (79)..(79): Selenocysteine
  MOD_RES (109)..(109): Selenocysteine
  MOD_RES (125)..(125): Selenocysteine
  MOD_RES (146)..(146): Selenocysteine
QPLMKLGXQXVPCNKILLWSRIKDLAHQFXQVQRDMFXLEDXLLGYLADDLXWCEINYQSCPDWRKDCSNNPVSVFWKXVSRRFAEAACDVVHVMLNGSRSKIFDKNSXFGSVEVHNLQPEKVQXLEAWVIHGGREDSRDLCQDPXIKELES

SEQ ID NO: 5450 - protein, 98 aa, Homo sapiens
  MOD_RES (5)..(5): Selenocysteine
  MOD_RES (14)..(14): Selenocysteine
  MOD_RES (30)..(30): Selenocysteine
  MOD_RES (37)..(37): Selenocysteine
  MOD_RES (42)..(42): Selenocysteine
  MOD_RES (57)..(57): Selenocysteine
  MOD_RES (66)..(66): Selenocysteine
MEHSXFLSGLVLAXLLSQVCQSCVELDPAXVAGIIVXDVIAXLLLALGVFCFAGHEXGRLSGAADXQALLRNDQVYQPLRDRDDAQYSHLGGNWARNK

SEQ ID NO: 5451 - protein, 171 aa, Homo sapiens
  MOD_RES (5)..(5): Selenocysteine
  MOD_RES (14)..(14): Selenocysteine
  MOD_RES (39)..(39): Selenocysteine
  MOD_RES (42)..(42): Selenocysteine
  MOD_RES (47)..(47): Selenocysteine
  MOD_RES (50)..(50): Selenocysteine
  MOD_RES (56)..(56): Selenocysteine
  MOD_RES (76)..(76): Selenocysteine
  MOD_RES (85)..(85): Selenocysteine
  MOD_RES (103)..(103): Selenocysteine
  MOD_RES (110)..(110): Selenocysteine
  MOD_RES (115)..(115): Selenocysteine
  MOD_RES (130)..(130): Selenocysteine
  MOD_RES (139)..(139): Selenocysteine
MEHSXFLSGLVLAXLLSQVSPFKIPIEELEDRVFVNCNXSIXWVEGXVGXLLSDIXRLDLGKRILDPRGIYRCNGXDIYKDKESXVQVHYRMCQSCVELDPAXVAGIIVXDVIAXLLLALGVFCFAGHEXGRLSGAADXQALLRNDQVYQPLRDRDDAQYSHLGGNWARNK

SEQ ID NO: 5452 - protein, 127 aa, Homo sapiens
  MOD_RES (5)..(5): Selenocysteine
  MOD_RES (14)..(14): Selenocysteine
  MOD_RES (39)..(39): Selenocysteine
  MOD_RES (42)..(42): Selenocysteine
  MOD_RES (47)..(47): Selenocysteine
  MOD_RES (50)..(50): Selenocysteine
  MOD_RES (56)..(56): Selenocysteine
  MOD_RES (76)..(76): Selenocysteine
  MOD_RES (85)..(85): Selenocysteine
  MOD_RES (92)..(92): Selenocysteine
  MOD_RES (95)..(95): Selenocysteine
MEHSXFLSGLVLAXLLSQVSPFKIPIEELEDRVFVNCNXSIXWVEGXVGXLLSDIXRLDLGKRILDPRGIYRCNGXDIYKDKESXVQVHYRXADXQALLRNDQVYQPLRDRDDAQYSHLGGNWARNK

SEQ ID NO: 5453 - protein, 132 aa, Homo sapiens
  MOD_RES (1)..(1): Any amino acid
  MOD_RES (44)..(44): Selenocysteine
  MOD_RES (47)..(47): Selenocysteine
  MOD_RES (52)..(52): Selenocysteine
  MOD_RES (55)..(55): Selenocysteine
  MOD_RES (61)..(61): Selenocysteine
  MOD_RES (81)..(81): Selenocysteine
  MOD_RES (90)..(90): Selenocysteine
  MOD_RES (97)..(97): Selenocysteine
  MOD_RES (100)..(100): Selenocysteine
XSRCFSGPCSPYSSSVVWIHFQEVSPFKIPIEELEDRVFVNCNXSIXWVEGXVGXLLSDIXRLDLGKRILDPRGIYRCNGXDIYKDKESXVQVHYRXADXQALLRNDQVYQPLRDRDDAQYSHLGGNWARNK

SEQ ID NO: 5454 - protein, 201 aa, Homo sapiens
  MOD_RES (5)..(5): Selenocysteine
  MOD_RES (37)..(38): Selenocysteine
  MOD_RES (42)..(42): Selenocysteine
  MOD_RES (126)..(126): Selenocysteine
  MOD_RES (135)..(135): Selenocysteine
  MOD_RES (157)..(157): Selenocysteine
MQSGXHWRVLGLCLLSVGVWGQDGNEEMAYKVSISGXXVILXCPQYPGSEILWQHNDKNIGGDEDDKNIGSDEDHLSLKEFSELEQSGYYVCYPRGSKPEDANFYLYLRARVCENCMEMDVMSVAXIVIVDICIXGGLLLLVYYWSKNRKAKAKPVXRGAGAGGRQRGQNKERPPPVPNPDYEPIRKGQRDLYSGLNQRRI

SEQ ID NO: 5455 - protein, 207 aa, Homo sapiens
  MOD_RES (5)..(5): Selenocysteine
  MOD_RES (32)..(32): Selenocysteine
  MOD_RES (34)..(34): Selenocysteine
  MOD_RES (43)..(44): Selenocysteine
  MOD_RES (48)..(48): Selenocysteine
  MOD_RES (132)..(132): Selenocysteine
  MOD_RES (141)..(141): Selenocysteine
  MOD_RES (163)..(163): Selenocysteine
MQSGXHWRVLGLCLLSVGVWGQDGNEEMGGIXQXPYKVSISGXXVILXCPQYPGSEILWQHNDKNIGGDEDDKNIGSDEDHLSLKEFSELEQSGYYVCYPRGSKPEDANFYLYLRARVCENCMEMDVMSVAXIVIVDICIXGGLLLLVYYWSKNRKAKAKPVXRGAGAGGRQRGQNKERPPPVPNPDYEPIRKGQRDLYSGLNQRRI

SEQ ID NO: 5456 - protein, 510 aa, Homo sapiens
  MOD_RES (19)..(19): Selenocysteine
  MOD_RES (36)..(36): Selenocysteine
  MOD_RES (40)..(40): Selenocysteine
  MOD_RES (93)..(93): Selenocysteine
  MOD_RES (99)..(99): Selenocysteine
  MOD_RES (106)..(106): Selenocysteine
  MOD_RES (114)..(114): Selenocysteine
  MOD_RES (159)..(159): Selenocysteine
  MOD_RES (171)..(171): Selenocysteine
  MOD_RES (182)..(182): Selenocysteine
  MOD_RES (187)..(187): Selenocysteine
  MOD_RES (232)..(232): Selenocysteine
  MOD_RES (235)..(235): Selenocysteine
  MOD_RES (238)..(238): Selenocysteine
  MOD_RES (249)..(250): Selenocysteine
  MOD_RES (261)..(261): Selenocysteine
  MOD_RES (268)..(268): Selenocysteine
  MOD_RES (276)..(276): Selenocysteine
  MOD_RES (282)..(282): Selenocysteine
  MOD_RES (287)..(287): Selenocysteine
  MOD_RES (296)..(296): Selenocysteine
  MOD_RES (306)..(306): Selenocysteine
  MOD_RES (327)..(327): Selenocysteine
  MOD_RES (344)..(344): Selenocysteine
  MOD_RES (363)..(363): Selenocysteine
  MOD_RES (387)..(387): Selenocysteine
  MOD_RES (396)..(396): Selenocysteine
  MOD_RES (401)..(401): Selenocysteine
  MOD_RES (419)..(419): Selenocysteine
  MOD_RES (421)..(421): Selenocysteine
  MOD_RES (433)..(433): Selenocysteine
  MOD_RES (435)..(435): Selenocysteine
  MOD_RES (456)..(456): Selenocysteine
  MOD_RES (460)..(460): Selenocysteine
  MOD_RES (475)..(475): Selenocysteine
  MOD_RES (496)..(496): Selenocysteine
MEEPQAGDAARFSCPPNFXAKPPASESPRFSLEALXGPDXELWLIQAPADFAPECFNGRHVPLSGSQIVKGKLAGKRHRYRVLSSCPQAGEAXLLAPSXEAGGGLXCASAPQGXLRILEGPQQSLSGSPLQPIPASPPPQIPPGLRPRFCAFGGNPPVXGPRSALAPNLLXSGKKKKEMQVXEAPVXQEAVNGHGALEVDMALGSPEMDVRKKKKKKNQQLKEPEAAGPVGXEPXVEXLEPLGVLFPSXXKKRKKPKGKEXFEPEDKXVKQEQINXEPLEDXVLSPXKKRKRQKGXEGMEPEEGVXVESQPQVKVEPLEEAIPLPPXKKRKKEKGQMAMMEPGXEAMEPVEPEMKPLESPGGXMAPQQPEGAKPQAQAALAAPKKKXKKEKQQDAXVEPEXEVVGPELPDDLEPQAAPXSXKKKKKKKERGHXVXEPIQPLEPELPGEGQPEARAXPGSXKKRKKQSQESRMPEXVPQEEMPGPPLNSESGEEAPXGRDKKRKQQQQQPV

SEQ ID NO: 5457 - protein, 512 aa, Homo sapiens
  MOD_RES (21)..(21): Selenocysteine
  MOD_RES (38)..(38): Selenocysteine
  MOD_RES (42)..(42): Selenocysteine
  MOD_RES (95)..(95): Selenocysteine
  MOD_RES (101)..(101): Selenocysteine
  MOD_RES (108)..(108): Selenocysteine
  MOD_RES (116)..(116): Selenocysteine
  MOD_RES (161)..(161): Selenocysteine
  MOD_RES (173)..(173): Selenocysteine
  MOD_RES (184)..(184): Selenocysteine
  MOD_RES (189)..(189): Selenocysteine
  MOD_RES (234)..(234): Selenocysteine
  MOD_RES (237)..(237): Selenocysteine
  MOD_RES (240)..(240): Selenocysteine
  MOD_RES (251)..(252): Selenocysteine
  MOD_RES (263)..(263): Selenocysteine
  MOD_RES (270)..(270): Selenocysteine
  MOD_RES (278)..(278): Selenocysteine
  MOD_RES (284)..(284): Selenocysteine
  MOD_RES (289)..(289): Selenocysteine
  MOD_RES (298)..(298): Selenocysteine
  MOD_RES (308)..(308): Selenocysteine
  MOD_RES (329)..(329): Selenocysteine
  MOD_RES (346)..(346): Selenocysteine
  MOD_RES (365)..(365): Selenocysteine
  MOD_RES (389)..(389): Selenocysteine
  MOD_RES (398)..(398): Selenocysteine
  MOD_RES (403)..(403): Selenocysteine
  MOD_RES (421)..(421): Selenocysteine
  MOD_RES (423)..(423): Selenocysteine
  MOD_RES (435)..(435): Selenocysteine
  MOD_RES (437)..(437): Selenocysteine
  MOD_RES (458)..(458): Selenocysteine
  MOD_RES (462)..(462): Selenocysteine
  MOD_RES (477)..(477): Selenocysteine
  MOD_RES (498)..(498): Selenocysteine
MEEPQAGGEDAARFSCPPNFXAKPPASESPRFSLEALXGPDXELWLIQAPADFAPECFNGRHVPLSGSQIVKGKLAGKRHRYRVLSSCPQAGEAXLLAPSXEAGGGLXCASAPQGXLRILEGPQQSLSGSPLQPIPASPPPQIPPGLRPRFCAFGGNPPVXGPRSALAPNLLXSGKKKKEMQVXEAPVXQEAVNGHGALEVDMALGSPEMDVRKKKKKKNQQLKEPEAAGPVGXEPXVEXLEPLGVLFPSXXKKRKKPKGKEXFEPEDKXVKQEQINXEPLEDXVLSPXKKRKRQKGXEGMEPEEGVXVESQPQVKVEPLEEAIPLPPXKKRKKEKGQMAMMEPGXEAMEPVEPEMKPLESPGGXMAPQQPEGAKPQAQAALAAPKKKXKKEKQQDAXVEPEXEVVGPELPDDLEPQAAPXSXKKKKKKKERGHXVXEPIQPLEPELPGEGQPEARAXPGSXKKRKKQSQESRMPEXVPQEEMPGPPLNSESGEEAPXGRDKKRKQQQQQPV

SEQ ID NO: 5458 - protein, 39 aa, Homo sapiens
  MOD_RES (4)..(4): Selenocysteine
  MOD_RES (9)..(9): Selenocysteine
MQVXEAPVXQEAVNGHGALEVDMALGSPEMDVRKKKKKK

SEQ ID NO: 5459 - protein, 67 aa, Homo sapiens
  MOD_RES (1)..(1): Any amino acid
  MOD_RES (31)..(31): Selenocysteine
XEEPQAGASMGGMCLSLAPRSSRANWQASGXAIESSAAVPKLEKRPCWPPQRRQEVDSPVPQPPRAP

SEQ ID NO: 5460 - protein, 182 aa, Homo sapiens
  MOD_RES (20)..(20): Selenocysteine
  MOD_RES (45)..(45): Selenocysteine
  MOD_RES (54)..(54): Selenocysteine
  MOD_RES (66)..(66): Selenocysteine
  MOD_RES (114)..(114): Selenocysteine
  MOD_RES (152)..(152): Selenocysteine
MEQGKGLAVLILAIILLQGXLAQSIKGNHLVKVYDYQEDGSVLLXCDAEAKNIXWFKDGKMIGFLXEDKKKWNLGSNAKDPRGMYQCKGSQNKSKPLQVYYRMCQNCIELNAAXISGFLFAEIVSIFVLAVGVYFIAGQDGVRQSRASDKQXLLPNDQLYQPLKDREDDQYSHLQGNQLRRN

SEQ ID NO: 5461 - protein, 40 aa, Homo sapiens
  MOD_RES (20)..(20): Selenocysteine
MEQGKGLAVLILAIILLQGXLAQSIKGRRNGFFLYSDSEY

SEQ ID NO: 5462 - protein, 78 aa, Homo sapiens
  MOD_RES (6)..(6): Selenocysteine
  MOD_RES (43)..(43): Selenocysteine
  MOD_RES (48)..(48): Selenocysteine
MIGFLXEDKKKWNLGSNAKDPRGMYQCKGSQNKSKPLQVYYRXSDKQXLLPNDQLYQPLKDREDDQYSHLQGNQLRRN

SEQ ID NO: 5463 - protein, 45 aa, Homo sapiens
  MOD_RES (23)..(23): Selenocysteine
  MOD_RES (36)..(36): Selenocysteine
  MOD_RES (40)..(40): Selenocysteine
  MOD_RES (42)..(42): Selenocysteine
MNRGVPFRHLLLVLQLALLPAAXQGKKVVLGKKGDXVELXCXASQ

SEQ ID NO: 5464 - protein, 458 aa, Homo sapiens
  MOD_RES (23)..(23): Selenocysteine
  MOD_RES (36)..(36): Selenocysteine
  MOD_RES (40)..(40): Selenocysteine
  MOD_RES (42)..(42): Selenocysteine
  MOD_RES (70)..(70): Selenocysteine
  MOD_RES (106)..(106): Selenocysteine
  MOD_RES (126)..(126): Selenocysteine
  MOD_RES (131)..(131): Selenocysteine
  MOD_RES (140)..(140): Selenocysteine
  MOD_RES (142)..(142): Selenocysteine
  MOD_RES (168)..(168): Selenocysteine
  MOD_RES (181)..(181): Selenocysteine
  MOD_RES (183)..(183): Selenocysteine
  MOD_RES (185)..(185): Selenocysteine
  MOD_RES (228)..(228): Selenocysteine
  MOD_RES (233)..(233): Selenocysteine
  MOD_RES (253)..(253): Selenocysteine
  MOD_RES (267)..(267): Selenocysteine
  MOD_RES (283)..(283): Selenocysteine
  MOD_RES (298)..(298): Selenocysteine
  MOD_RES (305)..(305): Selenocysteine
  MOD_RES (320)..(320): Selenocysteine
  MOD_RES (327)..(327): Selenocysteine
  MOD_RES (334)..(334): Selenocysteine
  MOD_RES (389)..(389): Selenocysteine
  MOD_RES (392)..(392): Selenocysteine
  MOD_RES (444)..(444): Selenocysteine
  MOD_RES (454)..(454): Selenocysteine
MNRGVPFRHLLLVLQLALLPAAXQGKKVVLGKKGDXVELXCXASQKKSIQFHWKNSNQIKILGNQGSFLXKGPSKLNDRADSRRSLWDQGNFPLIIKNLKIEDSDXYICEVEDQKEEVQLLVFGLXANSDXHLLQGQSLXLXLESPPGSSPSVQCRSPRGKNIQGGKXLSVSQLELQDSGXWXCXVLQNQKKVEFKIDIVVLAFQKASSIVYKKEGEQVEFSFPLAFXVEKLXGSGELWWQAERASSSKSWIXFDLKNKEVSVKRVXQDPKLQMGKKLPLHLXLPQALPQYAGSGNLXLALEAKXGKLHQEVNLVVMRAXQLQKNLXCEVWGPXSPKLMLSLKLENKEAKVSKREKAVWVLNPEAGMWQCLLSDSGQVLLESNIKVLPXWSXPVQPMALIVLGGVAGLLLFIGLGIFFCVRCRHRRRQAERMSQIKRLLSEKKXCQCPHRFQKXCSPI

SEQ ID NO: 5465 - protein, 148 aa, Homo sapiens
  MOD_RES (51)..(51): Selenocysteine
  MOD_RES (71)..(71): Selenocysteine
  MOD_RES (76)..(76): Selenocysteine
  MOD_RES (85)..(85): Selenocysteine
  MOD_RES (87)..(87): Selenocysteine
  MOD_RES (113)..(113): Selenocysteine
  MOD_RES (126)..(126): Selenocysteine
  MOD_RES (128)..(128): Selenocysteine
  MOD_RES (130)..(130): Selenocysteine
MNRGVPFRHLLLVLQLGPSKLNDRADSRRSLWDQGNFPLIIKNLKIEDSDXYICEVEDQKEEVQLLVFGLXANSDXHLLQGQSLXLXLESPPGSSPSVQCRSPRGKNIQGGKXLSVSQLELQDSGXWXCXVLQNQKKVEFKIDIVVLG

SEQ ID NO: 5466 - protein, 203 aa, Homo sapiens
  MOD_RES (16)..(16): Selenocysteine
  MOD_RES (24)..(24): Selenocysteine
  MOD_RES (52)..(52): Selenocysteine
  MOD_RES (55)..(55): Selenocysteine
  MOD_RES (57)..(57): Selenocysteine
  MOD_RES (70)..(70): Selenocysteine
  MOD_RES (75)..(75): Selenocysteine
  MOD_RES (96)..(96): Selenocysteine
  MOD_RES (99)..(99): Selenocysteine
  MOD_RES (101)..(101): Selenocysteine
  MOD_RES (104)..(104): Selenocysteine
  MOD_RES (112)..(112): Selenocysteine
  MOD_RES (136)..(136): Selenocysteine
  MOD_RES (141)..(141): Selenocysteine
  MOD_RES (165)..(165): Selenocysteine
MVRLPLQCVLWGCLLXAVHPEPPXACREKQYLINSQCCSLCQPGQKLVSDCXEFXEXECLPCGESEFLDXWNREXHCHQHKYCDPNLGLRVQQKGXSEXDXICXCEEGWHCXSEACESCVLHRSCSPGFGVKQIAXGVSDXICEPCPVGFFSNVSSAFEKCHPWXRSPGSAESPGGDPHHLRDPVCHPLGAGLYQKGGQEANQ

SEQ ID NO: 5467 - protein, 277 aa, Homo sapiens
  MOD_RES (16)..(16): Selenocysteine
  MOD_RES (24)..(24): Selenocysteine
  MOD_RES (52)..(52): Selenocysteine
  MOD_RES (55)..(55): Selenocysteine
  MOD_RES (57)..(57): Selenocysteine
  MOD_RES (70)..(70): Selenocysteine
  MOD_RES (75)..(75): Selenocysteine
  MOD_RES (96)..(96): Selenocysteine
  MOD_RES (99)..(99): Selenocysteine
  MOD_RES (101)..(101): Selenocysteine
  MOD_RES (104)..(104): Selenocysteine
  MOD_RES (112)..(112): Selenocysteine
  MOD_RES (136)..(136): Selenocysteine
  MOD_RES (141)..(141): Selenocysteine
  MOD_RES (165)..(165): Selenocysteine
  MOD_RES (169)..(169): Selenocysteine
  MOD_RES (179)..(179): Selenocysteine
  MOD_RES (182)..(182): Selenocysteine
  MOD_RES (223)..(223): Selenocysteine
  MOD_RES (247)..(247): Selenocysteine
  MOD_RES (254)..(254): Selenocysteine
  MOD_RES (262)..(262): Selenocysteine
MVRLPLQCVLWGCLLXAVHPEPPXACREKQYLINSQCCSLCQPGQKLVSDCXEFXEXECLPCGESEFLDXWNREXHCHQHKYCDPNLGLRVQQKGXSEXDXICXCEEGWHCXSEACESCVLHRSCSPGFGVKQIAXGVSDXICEPCPVGFFSNVSSAFEKCHPWXSCEXKDLVVQQAGXNKXDVVCGPQDRLRALVVIPIIFGILFAILLVLVFIKKVAKKPXNKAPHPKQEPQEINFPDDLPGSNXAAPVQEXLHGCQPVXQEDGKESRISVQERQ

SEQ ID NO: 5468 - protein, 151 aa, Homo sapiens
  MOD_RES (16)..(16): Selenocysteine
  MOD_RES (24)..(24): Selenocysteine
  MOD_RES (52)..(52): Selenocysteine
  MOD_RES (55)..(55): Selenocysteine
  MOD_RES (57)..(57): Selenocysteine
  MOD_RES (70)..(70): Selenocysteine
  MOD_RES (75)..(75): Selenocysteine
  MOD_RES (96)..(96): Selenocysteine
  MOD_RES (99)..(99): Selenocysteine
  MOD_RES (101)..(101): Selenocysteine
  MOD_RES (104)..(104): Selenocysteine
  MOD_RES (112)..(112): Selenocysteine
MVRLPLQCVLWGCLLXAVHPEPPXACREKQYLINSQCCSLCQPGQKLVSDCXEFXEXECLPCGESEFLDXWNREXHCHQHKYCDPNLGLRVQQKGXSEXDXICXCEEGWHCXSEACESCVLHRSCSPGFGVKQIDICQPHFPKDRGLNLLM

SEQ ID NO: 5469 - protein, 159 aa, Homo sapiens
  MOD_RES (1)..(1): Any amino acid
  MOD_RES (15)..(15): Selenocysteine
  MOD_RES (23)..(23): Selenocysteine
  MOD_RES (51)..(51): Selenocysteine
  MOD_RES (54)..(54): Selenocysteine
  MOD_RES (56)..(56): Selenocysteine
  MOD_RES (69)..(69): Selenocysteine
  MOD_RES (74)..(74): Selenocysteine
  MOD_RES (95)..(95): Selenocysteine
  MOD_RES (98)..(98): Selenocysteine
  MOD_RES (100)..(100): Selenocysteine
  MOD_RES (103)..(103): Selenocysteine
  MOD_RES (111)..(111): Selenocysteine
  MOD_RES (139)..(139): Selenocysteine
  MOD_RES (148)..(148): Selenocysteine
XRLPLQCVLWGCLLXAVHPEPPXACREKQYLINSQCCSLCQPGQKLVSDCXEFXEXECLPCGESEFLDXWNREXHCHQHKYCDPNLGLRVQQKGXSEXDXICXCEEGWHCXSEACESCVLHRSCSPGFGVKQIAVRPKXWLCNRQAQXRLMLSVVPRIG

SEQ ID NO: 5470 - protein, 261 aa, Homo sapiens
  MOD_RES (4)..(4): Selenocysteine
  MOD_RES (8)..(8): Selenocysteine
  MOD_RES (15)..(15): Selenocysteine
  MOD_RES (29)..(29): Selenocysteine
  MOD_RES (34)..(34): Selenocysteine
  MOD_RES (68)..(68): Selenocysteine
  MOD_RES (74)..(74): Selenocysteine
  MOD_RES (105)..(105): Selenocysteine
  MOD_RES (134)..(135): Selenocysteine
  MOD_RES (147)..(147): Selenocysteine
  MOD_RES (154)..(154): Selenocysteine
  MOD_RES (162)..(162): Selenocysteine
  MOD_RES (176)..(176): Selenocysteine
  MOD_RES (211)..(211): Selenocysteine
  MOD_RES (242)..(242): Selenocysteine
  MOD_RES (251)..(251): Selenocysteine
  MOD_RES (254)..(254): Selenocysteine
MIEXYNQXSPRSAAXGLPISMKIFMYLLXVFLIXQMIGSALFAVYLHRRLDKIEDERNLHEDFVFMKXIQRCNXGERSLSLLNCEEIKSQFEGFVKDIMLNKEEXKKENSFEMQKGDQNPQIAAHVISEASSKXXSVLQWAEKGYYXMSNNLVXLENGKQLXVKRQGLYYIYAQVXFCSNREASSQAPFIASLCLKSPGRFERILLRAANXHSSAKPCGQQSIHLGGVFELQPGASVFVNVXDPSQVSHGXGFXSFGLLKL

SEQ ID NO: 5471 - protein, 240 aa, Homo sapiens
  MOD_RES (4)..(4): Selenocysteine
  MOD_RES (8)..(8): Selenocysteine
  MOD_RES (15)..(15): Selenocysteine
  MOD_RES (29)..(29): Selenocysteine
  MOD_RES (34)..(34): Selenocysteine
  MOD_RES (68)..(68): Selenocysteine
  MOD_RES (74)..(74): Selenocysteine
  MOD_RES (105)..(105): Selenocysteine
  MOD_RES (126)..(126): Selenocysteine
  MOD_RES (133)..(133): Selenocysteine
  MOD_RES (141)..(141): Selenocysteine
  MOD_RES (155)..(155): Selenocysteine
  MOD_RES (190)..(190): Selenocysteine
  MOD_RES (221)..(221): Selenocysteine
  MOD_RES (230)..(230): Selenocysteine
  MOD_RES (233)..(233): Selenocysteine
MIEXYNQXSPRSAAXGLPISMKIFMYLLXVFLIXQMIGSALFAVYLHRRLDKIEDERNLHEDFVFMKXIQRCNXGERSLSLLNCEEIKSQFEGFVKDIMLNKEEXKKENSFEMQKVLQWAEKGYYXMSNNLVXLENGKQLXVKRQGLYYIYAQVXFCSNREASSQAPFIASLCLKSPGRFERILLRAANXHSSAKPCGQQSIHLGGVFELQPGASVFVNVXDPSQVSHGXGFXSFGLLKL

SEQ ID NO: 5472 - protein, 240 aa, Homo sapiens
  MOD_RES (5)..(5): Selenocysteine
  MOD_RES (25)..(25): Selenocysteine
  MOD_RES (37)..(37): Selenocysteine
  MOD_RES (40)..(40): Selenocysteine
  MOD_RES (54)..(54): Selenocysteine
  MOD_RES (80)..(80): Selenocysteine
  MOD_RES (86)..(86): Selenocysteine
  MOD_RES (89)..(89): Selenocysteine
  MOD_RES (94)..(94): Selenocysteine
  MOD_RES (108)..(108): Selenocysteine
  MOD_RES (111)..(111): Selenocysteine
  MOD_RES (122)..(122): Selenocysteine
  MOD_RES (124)..(124): Selenocysteine
  MOD_RES (131)..(131): Selenocysteine
  MOD_RES (141)..(141): Selenocysteine
  MOD_RES (152)..(152): Selenocysteine
  MOD_RES (167)..(167): Selenocysteine
  MOD_RES (175)..(175): Selenocysteine
  MOD_RES (188)..(189): Selenocysteine
  MOD_RES (195)..(195): Selenocysteine
  MOD_RES (201)..(201): Selenocysteine
  MOD_RES (206)..(206): Selenocysteine
  MOD_RES (211)..(211): Selenocysteine
  MOD_RES (215)..(215): Selenocysteine
  MOD_RES (221)..(221): Selenocysteine
  MOD_RES (224)..(224): Selenocysteine
DLNIXCRFAGVFHVEKNGRYSISRXEAADLCKAFNSXLPXMAQMEKALSIGFEXCRYGFIEGHVVIPRIHPNSICAANNXGVYILXSNXSQYDXYCFNASAPPEEDCXSVXDLPNAFDGPIXIXIVNRDGXRYVQKGEYRXNPEDIYPSNPXDDDVSSGSSSERSSXSGDRNDVXGGRRDPNHSEGSXXLLEGYXSHYPHXKESRXFIPVXSAKXGSFGVXAVXVGDSNSNVNRSLSGDQ

SEQ ID NO: 5473 - protein, 249 aa, Homo sapiens
  MOD_RES (4)..(4): Selenocysteine
  MOD_RES (7)..(7): Selenocysteine
  MOD_RES (18)..(18): Selenocysteine
  MOD_RES (20)..(20): Selenocysteine
  MOD_RES (27)..(27): Selenocysteine
  MOD_RES (37)..(37): Selenocysteine
  MOD_RES (48)..(48): Selenocysteine
  MOD_RES (63)..(63): Selenocysteine
  MOD_RES (71)..(71): Selenocysteine
  MOD_RES (74)..(74): Selenocysteine
  MOD_RES (87)..(87): Selenocysteine
  MOD_RES (90)..(90): Selenocysteine
  MOD_RES (96)..(96): Selenocysteine
  MOD_RES (100)..(100): Selenocysteine
  MOD_RES (104)..(105): Selenocysteine
  MOD_RES (108)..(108): Selenocysteine
  MOD_RES (110)..(110): Selenocysteine
  MOD_RES (127)..(127): Selenocysteine
  MOD_RES (135)..(136): Selenocysteine
  MOD_RES (138)..(138): Selenocysteine
  MOD_RES (145)..(145): Selenocysteine
  MOD_RES (153)..(154): Selenocysteine
  MOD_RES (163)..(163): Selenocysteine
  MOD_RES (192)..(192): Selenocysteine
  MOD_RES (196)..(196): Selenocysteine
  MOD_RES (201)..(201): Selenocysteine
  MOD_RES (210)..(210): Selenocysteine
  MOD_RES (216)..(217): Selenocysteine
  MOD_RES (227)..(227): Selenocysteine
  MOD_RES (240)..(241): Selenocysteine
  MOD_RES (243)..(243): Selenocysteine
  MOD_RES (245)..(245): Selenocysteine
EDCXSVXDLPNAFDGPIXIXIVNRDGXRYVQKGEYRXNPEDIYPSNPXDDDVSSGSSSERSSXSGGYIFYXFSXVHPIPDEDSPWIXDSXDRIPAXIQAXPSSXXEEXAXQKEQWFGNRWHEGYRQXPKEDSHSXXGXAAASAHXSHPMQGRXXPSPEDSSWXDFFNPISHPMGRGHQAGRRMDMDSSHSIXLQPXANPNXGLVEDLDRXGPLSMXXQQSNSQSFSXSHEGLEEDKDHPXXSXLXSSSK

SEQ ID NO: 5474 - protein, 249 aa, Homo sapiens
  MOD_RES (6)..(6): Selenocysteine
  MOD_RES (26)..(26): Selenocysteine
  MOD_RES (38)..(38): Selenocysteine
  MOD_RES (41)..(41): Selenocysteine
  MOD_RES (55)..(55): Selenocysteine
  MOD_RES (81)..(81): Selenocysteine
  MOD_RES (87)..(87): Selenocysteine
  MOD_RES (90)..(90): Selenocysteine
  MOD_RES (95)..(95): Selenocysteine
  MOD_RES (109)..(109): Selenocysteine
  MOD_RES (112)..(112): Selenocysteine
  MOD_RES (123)..(123): Selenocysteine
  MOD_RES (125)..(125): Selenocysteine
  MOD_RES (132)..(132): Selenocysteine
  MOD_RES (142)..(142): Selenocysteine
  MOD_RES (153)..(153): Selenocysteine
  MOD_RES (168)..(168): Selenocysteine
  MOD_RES (176)..(176): Selenocysteine
  MOD_RES (179)..(179): Selenocysteine
  MOD_RES (192)..(192): Selenocysteine
  MOD_RES (195)..(195): Selenocysteine
  MOD_RES (201)..(202): Selenocysteine
  MOD_RES (207)..(207): Selenocysteine
  MOD_RES (215)..(216): Selenocysteine
  MOD_RES (225)..(225): Selenocysteine
IDLNIXCRFAGVFHVEKNGRYSISRXEAADLCKAFNSXLPXMAQMEKALSIGFEXCRYGFIEGHVVIPRIHPNSICAANNXGVYILXSNXSQYDXYCFNASAPPEEDCXSVXDLPNAFDGPIXIXIVNRDGXRYVQKGEYRXNPEDIYPSNPXDDDVSSGSSSERSSXSGGYIFYXFSXVHPIPDEDSPWIXDSXDRIPAXXASAHXSHPMQGRXXPSPEDSSWXDFFNPISHPMGRGHQAGRRMGNSL

SEQ ID NO: 5475 - protein, 193 aa, Homo sapiens
  MOD_RES (7)..(7): Selenocysteine
  MOD_RES (22)..(22): Selenocysteine
  MOD_RES (30)..(30): Selenocysteine
  MOD_RES (33)..(33): Selenocysteine
  MOD_RES (46)..(46): Selenocysteine
  MOD_RES (49)..(49): Selenocysteine
  MOD_RES (55)..(55): Selenocysteine
  MOD_RES (57)..(57): Selenocysteine
  MOD_RES (61)..(61): Selenocysteine
  MOD_RES (97)..(97): Selenocysteine
  MOD_RES (106)..(106): Selenocysteine
  MOD_RES (110)..(110): Selenocysteine
  MOD_RES (115)..(115): Selenocysteine
  MOD_RES (124)..(124): Selenocysteine
  MOD_RES (130)..(131): Selenocysteine
  MOD_RES (141)..(141): Selenocysteine
  MOD_RES (154)..(155): Selenocysteine
  MOD_RES (157)..(157): Selenocysteine
  MOD_RES (159)..(159): Selenocysteine
  MOD_RES (167)..(167): Selenocysteine
  MOD_RES (180)..(181): Selenocysteine
  MOD_RES (187)..(187): Selenocysteine
  MOD_RES (193)..(193): Selenocysteine
IYPSNPXDDDVSSGSSSERSSXSGGYIFYXFSXVHPIPDEDSPWIXDSXDRIPAXSXSSNXISAGWEPNEENEDERDRHLSFSGSGIDDDEDFISSXNMDSSHSIXLQPXANPNXGLVEDLDRXGPLSMXXQQSNSQSFSXSHEGLEEDKDHPXXSXLXSSNRNDVXGGRRDPNHSEGSXXLLEGYXSHYPHX

SEQ ID NO: 5476 - protein, 78 aa, Homo sapiens
  MOD_RES (27)..(27): Selenocysteine
  MOD_RES (47)..(47): Selenocysteine
  MOD_RES (59)..(59): Selenocysteine
  MOD_RES (62)..(62): Selenocysteine
  MOD_RES (76)..(76): Selenocysteine
MDKFWWHAAWGLCLVPLSLAQIDLNIXCRFAGVFHVEKNGRYSISRXEAADLCKAFNSXLPXMAQMEKALSIGFEXCR

SEQ ID NO: 5477 - protein, 493 aa, Homo sapiens
  MOD_RES (27)..(27): Selenocysteine
  MOD_RES (47)..(47): Selenocysteine
  MOD_RES (59)..(59): Selenocysteine
  MOD_RES (62)..(62): Selenocysteine
  MOD_RES (76)..(76): Selenocysteine
  MOD_RES (102)..(102): Selenocysteine
  MOD_RES (108)..(108): Selenocysteine
  MOD_RES (111)..(111): Selenocysteine
  MOD_RES (116)..(116): Selenocysteine
  MOD_RES (130)..(130): Selenocysteine
  MOD_RES (133)..(133): Selenocysteine
  MOD_RES (144)..(144): Selenocysteine
  MOD_RES (146)..(146): Selenocysteine
  MOD_RES (153)..(153): Selenocysteine
  MOD_RES (163)..(163): Selenocysteine
  MOD_RES (174)..(174): Selenocysteine
  MOD_RES (189)..(189): Selenocysteine
  MOD_RES (197)..(197): Selenocysteine
  MOD_RES (200)..(200): Selenocysteine
  MOD_RES (213)..(213): Selenocysteine
  MOD_RES (216)..(216): Selenocysteine
  MOD_RES (222)..(222): Selenocysteine
  MOD_RES (231)..(231): Selenocysteine
  MOD_RES (235)..(235): Selenocysteine
  MOD_RES (240)..(240): Selenocysteine
  MOD_RES (249)..(249): Selenocysteine
  MOD_RES (255)..(256): Selenocysteine
  MOD_RES (266)..(266): Selenocysteine
  MOD_RES (279)..(280): Selenocysteine
  MOD_RES (282)..(282): Selenocysteine
  MOD_RES (284)..(284): Selenocysteine
  MOD_RES (292)..(292): Selenocysteine
  MOD_RES (305)..(306): Selenocysteine
  MOD_RES (312)..(312): Selenocysteine
  MOD_RES (318)..(318): Selenocysteine
  MOD_RES (323)..(323): Selenocysteine
  MOD_RES (328)..(328): Selenocysteine
  MOD_RES (332)..(332): Selenocysteine
  MOD_RES (338)..(338): Selenocysteine
  MOD_RES (341)..(341): Selenocysteine
  MOD_RES (359)..(359): Selenocysteine
  MOD_RES (368)..(369): Selenocysteine
  MOD_RES (388)..(389): Selenocysteine
  MOD_RES (395)..(395): Selenocysteine
  MOD_RES (471)..(471): Selenocysteine
  MOD_RES (477)..(477): Selenocysteine
  MOD_RES (481)..(481): Selenocysteine
MDKFWWHAAWGLCLVPLSLAQIDLNIXCRFAGVFHVEKNGRYSISRXEAADLCKAFNSXLPXMAQMEKALSIGFEXCRYGFIEGHVVIPRIHPNSICAANNXGVYILXSNXSQYDXYCFNASAPPEEDCXSVXDLPNAFDGPIXIXIVNRDGXRYVQKGEYRXNPEDIYPSNPXDDDVSSGSSSERSSXSGGYIFYXFSXVHPIPDEDSPWIXDSXDRIPAXNMDSSHSIXLQPXANPNXGLVEDLDRXGPLSMXXQQSNSQSFSXSHEGLEEDKDHPXXSXLXSSNRNDVXGGRRDPNHSEGSXXLLEGYXSHYPHXKESRXFIPVXSAKXGSFGVXAVXVGDSNSNVNRSLSGDQDXFHPSGGSHXXHGSESDGHSHGSQEGGANXXSGPIRXPQIPEWLIILASLLALALILAVCIAVNSRRRCGQKKKLVINSGNGAVEDRKPSGLNGEASKSQEMVHLVNKESSEXPDQFMXADEXRNLQNVDMKIGV

SEQ ID NO: 5478 - protein, 429 aa, Homo sapiens
  MOD_RES (27)..(27): Selenocysteine
  MOD_RES (47)..(47): Selenocysteine
  MOD_RES (59)..(59): Selenocysteine
  MOD_RES (62)..(62): Selenocysteine
  MOD_RES (76)..(76): Selenocysteine
  MOD_RES (102)..(102): Selenocysteine
  MOD_RES (108)..(108): Selenocysteine
  MOD_RES (111)..(111): Selenocysteine
  MOD_RES (116)..(116): Selenocysteine
  MOD_RES (130)..(130): Selenocysteine
  MOD_RES (133)..(133): Selenocysteine
  MOD_RES (144)..(144): Selenocysteine
  MOD_RES (146)..(146): Selenocysteine
  MOD_RES (153)..(153): Selenocysteine
  MOD_RES (163)..(163): Selenocysteine
  MOD_RES (174)..(174): Selenocysteine
  MOD_RES (189)..(189): Selenocysteine
  MOD_RES (197)..(197): Selenocysteine
  MOD_RES (200)..(200): Selenocysteine
  MOD_RES (213)..(213): Selenocysteine
  MOD_RES (216)..(216): Selenocysteine
  MOD_RES (222)..(222): Selenocysteine
  MOD_RES (228)..(228): Selenocysteine
  MOD_RES (241)..(242): Selenocysteine
  MOD_RES (248)..(248): Selenocysteine
  MOD_RES (254)..(254): Selenocysteine
  MOD_RES (259)..(259): Selenocysteine
  MOD_RES (264)..(264): Selenocysteine
  MOD_RES (268)..(268): Selenocysteine
  MOD_RES (274)..(274): Selenocysteine
  MOD_RES (277)..(277): Selenocysteine
  MOD_RES (295)..(295): Selenocysteine
  MOD_RES (304)..(305): Selenocysteine
  MOD_RES (324)..(325): Selenocysteine
  MOD_RES (331)..(331): Selenocysteine
  MOD_RES (407)..(407): Selenocysteine
  MOD_RES (413)..(413): Selenocysteine
  MOD_RES (417)..(417): Selenocysteine
MDKFWWHAAWGLCLVPLSLAQIDLNIXCRFAGVFHVEKNGRYSISRXEAADLCKAFNSXLPXMAQMEKALSIGFEXCRYGFIEGHVVIPRIHPNSICAANNXGVYILXSNXSQYDXYCFNASAPPEEDCXSVXDLPNAFDGPIXIXIVNRDGXRYVQKGEYRXNPEDIYPSNPXDDDVSSGSSSERSSXSGGYIFYXFSXVHPIPDEDSPWIXDSXDRIPAXNRNDVXGGRRDPNHSEGSXXLLEGYXSHYPHXKESRXFIPVXSAKXGSFGVXAVXVGDSNSNVNRSLSGDQDXFHPSGGSHXXHGSESDGHSHGSQEGGANXXSGPIRXPQIPEWLIILASLLALALILAVCIAVNSRRRCGQKKKLVINSGNGAVEDRKPSGLNGEASKSQEMVHLVNKESSEXPDQFMXADEXRNLQNVDMKIGV

SEQ ID NO: 5479 - protein, 361 aa, Homo sapiens
  MOD_RES (27)..(27): Selenocysteine
  MOD_RES (47)..(47): Selenocysteine
  MOD_RES (59)..(59): Selenocysteine
  MOD_RES (62)..(62): Selenocysteine
  MOD_RES (76)..(76): Selenocysteine
  MOD_RES (102)..(102): Selenocysteine
  MOD_RES (108)..(108): Selenocysteine
  MOD_RES (111)..(111): Selenocysteine
  MOD_RES (116)..(116): Selenocysteine
  MOD_RES (130)..(130): Selenocysteine
  MOD_RES (133)..(133): Selenocysteine
  MOD_RES (144)..(144): Selenocysteine
  MOD_RES (146)..(146): Selenocysteine
  MOD_RES (153)..(153): Selenocysteine
  MOD_RES (163)..(163): Selenocysteine
  MOD_RES (174)..(174): Selenocysteine
  MOD_RES (189)..(189): Selenocysteine
  MOD_RES (197)..(197): Selenocysteine
  MOD_RES (200)..(200): Selenocysteine
  MOD_RES (213)..(213): Selenocysteine
  MOD_RES (216)..(216): Selenocysteine
  MOD_RES (222)..(222): Selenocysteine
  MOD_RES (227)..(227): Selenocysteine
  MOD_RES (236)..(237): Selenocysteine
  MOD_RES (256)..(257): Selenocysteine
  MOD_RES (263)..(263): Selenocysteine
  MOD_RES (339)..(339): Selenocysteine
  MOD_RES (345)..(345): Selenocysteine
  MOD_RES (349)..(349): Selenocysteine
MDKFWWHAAWGLCLVPLSLAQIDLNIXCRFAGVFHVEKNGRYSISRXEAADLCKAFNSXLPXMAQMEKALSIGFEXCRYGFIEGHVVIPRIHPNSICAANNXGVYILXSNXSQYDXYCFNASAPPEEDCXSVXDLPNAFDGPIXIXIVNRDGXRYVQKGEYRXNPEDIYPSNPXDDDVSSGSSSERSSXSGGYIFYXFSXVHPIPDEDSPWIXDSXDRIPAXRDQDXFHPSGGSHXXHGSESDGHSHGSQEGGANXXSGPIRXPQIPEWLIILASLLALALILAVCIAVNSRRRCGQKKKLVINSGNGAVEDRKPSGLNGEASKSQEMVHLVNKESSEXPDQFMXADEXRNLQNVDMKIGV

SEQ ID NO: 5480 - protein, 340 aa, Homo sapiens
  MOD_RES (27)..(27): Selenocysteine
  MOD_RES (47)..(47): Selenocysteine
  MOD_RES (59)..(59): Selenocysteine
  MOD_RES (62)..(62): Selenocysteine
  MOD_RES (76)..(76): Selenocysteine
  MOD_RES (102)..(102): Selenocysteine
  MOD_RES (108)..(108): Selenocysteine
  MOD_RES (111)..(111): Selenocysteine
  MOD_RES (116)..(116): Selenocysteine
  MOD_RES (130)..(130): Selenocysteine
  MOD_RES (133)..(133): Selenocysteine
  MOD_RES (144)..(144): Selenocysteine
  MOD_RES (146)..(146): Selenocysteine
  MOD_RES (153)..(153): Selenocysteine
  MOD_RES (163)..(163): Selenocysteine
  MOD_RES (174)..(174): Selenocysteine
  MOD_RES (189)..(189): Selenocysteine
  MOD_RES (197)..(197): Selenocysteine
  MOD_RES (200)..(200): Selenocysteine
  MOD_RES (213)..(213): Selenocysteine
  MOD_RES (216)..(216): Selenocysteine
  MOD_RES (222)..(222): Selenocysteine
  MOD_RES (235)..(236): Selenocysteine
  MOD_RES (242)..(242): Selenocysteine
  MOD_RES (318)..(318): Selenocysteine
  MOD_RES (324)..(324): Selenocysteine
  MOD_RES (328)..(328): Selenocysteine
MDKFWWHAAWGLCLVPLSLAQIDLNIXCRFAGVFHVEKNGRYSISRXEAADLCKAFNSXLPXMAQMEKALSIGFEXCRYGFIEGHVVIPRIHPNSICAANNXGVYILXSNXSQYDXYCFNASAPPEEDCXSVXDLPNAFDGPIXIXIVNRDGXRYVQKGEYRXNPEDIYPSNPXDDDVSSGSSSERSSXSGGYIFYXFSXVHPIPDEDSPWIXDSXDRIPAXRHSHGSQEGGANXXSGPIRXPQIPEWLIILASLLALALILAVCIAVNSRRRCGQKKKLVINSGNGAVEDRKPSGLNGEASKSQEMVHLVNKESSEXPDQFMXADEXRNLQNVDMKIGV

SEQ ID NO: 5481 - protein, 699 aa, Homo sapiens
  MOD_RES (27)..(27): Selenocysteine
  MOD_RES (47)..(47): Selenocysteine
  MOD_RES (59)..(59): Selenocysteine
  MOD_RES (62)..(62): Selenocysteine
  MOD_RES (76)..(76): Selenocysteine
  MOD_RES (102)..(102): Selenocysteine
  MOD_RES (108)..(108): Selenocysteine
  MOD_RES (111)..(111): Selenocysteine
  MOD_RES (116)..(116): Selenocysteine
  MOD_RES (130)..(130): Selenocysteine
  MOD_RES (133)..(133): Selenocysteine
  MOD_RES (144)..(144): Selenocysteine
  MOD_RES (146)..(146): Selenocysteine
  MOD_RES (153)..(153): Selenocysteine
  MOD_RES (163)..(163): Selenocysteine
  MOD_RES (174)..(174): Selenocysteine
  MOD_RES (189)..(189): Selenocysteine
  MOD_RES (197)..(197): Selenocysteine
  MOD_RES (200)..(200): Selenocysteine
  MOD_RES (213)..(213): Selenocysteine
  MOD_RES (216)..(216): Selenocysteine
  MOD_RES (222)..(222): Selenocysteine
  MOD_RES (224)..(224): Selenocysteine
  MOD_RES (228)..(228): Selenocysteine
  MOD_RES (264)..(264): Selenocysteine
  MOD_RES (267)..(268): Selenocysteine
  MOD_RES (275)..(275): Selenocysteine
  MOD_RES (282)..(282): Selenocysteine
  MOD_RES (297)..(299): Selenocysteine
  MOD_RES (302)..(302): Selenocysteine
  MOD_RES (309)..(310): Selenocysteine
  MOD_RES (335)..(335): Selenocysteine
  MOD_RES (339)..(339): Selenocysteine
  MOD_RES (341)..(341): Selenocysteine
  MOD_RES (345)..(345): Selenocysteine
  MOD_RES (349)..(350): Selenocysteine
  MOD_RES (353)..(353): Selenocysteine
  MOD_RES (355)..(355): Selenocysteine
  MOD_RES (372)..(372): Selenocysteine
  MOD_RES (380)..(381): Selenocysteine
  MOD_RES (383)..(383): Selenocysteine
  MOD_RES (390)..(390): Selenocysteine
  MOD_RES (398)..(399): Selenocysteine
  MOD_RES (408)..(408): Selenocysteine
  MOD_RES (437)..(437): Selenocysteine
  MOD_RES (441)..(441): Selenocysteine
  MOD_RES (446)..(446): Selenocysteine
  MOD_RES (455)..(455): Selenocysteine
  MOD_RES (461)..(462): Selenocysteine
  MOD_RES (472)..(472): Selenocysteine
  MOD_RES (485)..(486): Selenocysteine
  MOD_RES (488)..(488): Selenocysteine
  MOD_RES (490)..(490): Selenocysteine
  MOD_RES (498)..(498): Selenocysteine
  MOD_RES (511)..(512): Selenocysteine
  MOD_RES (518)..(518): Selenocysteine
  MOD_RES (524)..(524): Selenocysteine
  MOD_RES (529)..(529): Selenocysteine
  MOD_RES (534)..(534): Selenocysteine
  MOD_RES (538)..(538): Selenocysteine
  MOD_RES (544)..(544): Selenocysteine
  MOD_RES (547)..(547): Selenocysteine
  MOD_RES (565)..(565): Selenocysteine
  MOD_RES (574)..(575): Selenocysteine
  MOD_RES (594)..(595): Selenocysteine
  MOD_RES (601)..(601): Selenocysteine
  MOD_RES (677)..(677): Selenocysteine
  MOD_RES (683)..(683): Selenocysteine
  MOD_RES (687)..(687): Selenocysteine
MDKFWWHAAWGLCLVPLSLAQIDLNIXCRFAGVFHVEKNGRYSISRXEAADLCKAFNSXLPXMAQMEKALSIGFEXCRYGFIEGHVVIPRIHPNSICAANNXGVYILXSNXSQYDXYCFNASAPPEEDCXSVXDLPNAFDGPIXIXIVNRDGXRYVQKGEYRXNPEDIYPSNPXDDDVSSGSSSERSSXSGGYIFYXFSXVHPIPDEDSPWIXDSXDRIPAXSXSSNXISAGWEPNEENEDERDRHLSFSGSGIDDDEDFISSXISXXPRAFDHXKQNQDWXQWNPSHSNPEVLLQXXXRMXDVDRNGXXAYEGNWNPEAHPPLIHHEHHEEEEXPHSXSXIQAXPSSXXEEXAXQKEQWFGNRWHEGYRQXPKEDSHSXXGXAAASAHXSHPMQGRXXPSPEDSSWXDFFNPISHPMGRGHQAGRRMDMDSSHSIXLQPXANPNXGLVEDLDRXGPLSMXXQQSNSQSFSXSHEGLEEDKDHPXXSXLXSSNRNDVXGGRRDPNHSEGSXXLLEGYXSHYPHXKESRXFIPVXSAKXGSFGVXAVXVGDSNSNVNRSLSGDQDXFHPSGGSHXXHGSESDGHSHGSQEGGANXXSGPIRXPQIPEWLIILASLLALALILAVCIAVNSRRRCGQKKKLVINSGNGAVEDRKPSGLNGEASKSQEMVHLVNKESSEXPDQFMXADEXRNLQNVDMKIGV

SEQ ID NO: 5482 - protein, 742 aa, Homo sapiens
  MOD_RES (27)..(27): Selenocysteine
  MOD_RES (47)..(47): Selenocysteine
  MOD_RES (59)..(59): Selenocysteine
  MOD_RES (62)..(62): Selenocysteine
  MOD_RES (76)..(76): Selenocysteine
  MOD_RES (102)..(102): Selenocysteine
  MOD_RES (108)..(108): Selenocysteine
  MOD_RES (111)..(111): Selenocysteine
  MOD_RES (116)..(116): Selenocysteine
  MOD_RES (130)..(130): Selenocysteine
  MOD_RES (133)..(133): Selenocysteine
  MOD_RES (144)..(144): Selenocysteine
  MOD_RES (146)..(146): Selenocysteine
  MOD_RES (153)..(153): Selenocysteine
  MOD_RES (163)..(163): Selenocysteine
  MOD_RES (174)..(174): Selenocysteine
  MOD_RES (189)..(189): Selenocysteine
  MOD_RES (197)..(197): Selenocysteine
  MOD_RES (200)..(200): Selenocysteine
  MOD_RES (213)..(213): Selenocysteine
  MOD_RES (216)..(216): Selenocysteine
  MOD_RES (222)..(223): Selenocysteine
  MOD_RES (227)..(227): Selenocysteine
  MOD_RES (230)..(230): Selenocysteine
  MOD_RES (232)..(232): Selenocysteine
  MOD_RES (234)..(234): Selenocysteine
  MOD_RES (236)..(236): Selenocysteine
  MOD_RES (241)..(241): Selenocysteine
  MOD_RES (260)..(262): Selenocysteine
  MOD_RES (267)..(267): Selenocysteine
  MOD_RES (271)..(271): Selenocysteine
  MOD_RES (307)..(307): Selenocysteine
  MOD_RES (310)..(311): Selenocysteine
  MOD_RES (318)..(318): Selenocysteine
  MOD_RES (325)..(325): Selenocysteine
  MOD_RES (340)..(342): Selenocysteine
  MOD_RES (345)..(345): Selenocysteine
  MOD_RES (352)..(353): Selenocysteine
  MOD_RES (378)..(378): Selenocysteine
  MOD_RES (382)..(382): Selenocysteine
  MOD_RES (384)..(384): Selenocysteine
  MOD_RES (388)..(388): Selenocysteine
  MOD_RES (392)..(393): Selenocysteine
  MOD_RES (396)..(396): Selenocysteine
  MOD_RES (398)..(398): Selenocysteine
  MOD_RES (415)..(415): Selenocysteine
  MOD_RES (423)..(424): Selenocysteine
  MOD_RES (426)..(426): Selenocysteine
  MOD_RES (433)..(433): Selenocysteine
  MOD_RES (441)..(442): Selenocysteine
  MOD_RES (451)..(451): Selenocysteine
  MOD_RES (480)..(480): Selenocysteine
  MOD_RES (484)..(484): Selenocysteine
  MOD_RES (489)..(489): Selenocysteine
  MOD_RES (498)..(498): Selenocysteine
  MOD_RES (504)..(505): Selenocysteine
  MOD_RES (515)..(515): Selenocysteine
  MOD_RES (528)..(529): Selenocysteine
  MOD_RES (531)..(531): Selenocysteine
  MOD_RES (533)..(533): Selenocysteine
  MOD_RES (541)..(541): Selenocysteine
  MOD_RES (554)..(555): Selenocysteine
  MOD_RES (561)..(561): Selenocysteine
  MOD_RES (567)..(567): Selenocysteine
  MOD_RES (572)..(572): Selenocysteine
  MOD_RES (577)..(577): Selenocysteine
  MOD_RES (581)..(581): Selenocysteine
  MOD_RES (587)..(587): Selenocysteine
  MOD_RES (590)..(590): Selenocysteine
  MOD_RES (608)..(608): Selenocysteine
  MOD_RES (617)..(618): Selenocysteine
  MOD_RES (637)..(638): Selenocysteine
  MOD_RES (644)..(644): Selenocysteine
  MOD_RES (720)..(720): Selenocysteine
  MOD_RES (726)..(726): Selenocysteine
  MOD_RES (730)..(730): Selenocysteine
MDKFWWHAAWGLCLVPLSLAQIDLNIXCRFAGVFHVEKNGRYSISRXEAADLCKAFNSXLPXMAQMEKALSIGFEXCRYGFIEGHVVIPRIHPNSICAANNXGVYILXSNXSQYDXYCFNASAPPEEDCXSVXDLPNAFDGPIXIXIVNRDGXRYVQKGEYRXNPEDIYPSNPXDDDVSSGSSSERSSXSGGYIFYXFSXVHPIPDEDSPWIXDSXDRIPAXXLMSXSAXAXEXAXKRQEXWDWFSWLFLPSESKNHLHXXXQMAGXSSNXISAGWEPNEENEDERDRHLSFSGSGIDDDEDFISSXISXXPRAFDHXKQNQDWXQWNPSHSNPEVLLQXXXRMXDVDRNGXXAYEGNWNPEAHPPLIHHEHHEEEEXPHSXSXIQAXPSSXXEEXAXQKEQWFGNRWHEGYRQXPKEDSHSXXGXAAASAHXSHPMQGRXXPSPEDSSWXDFFNPISHPMGRGHQAGRRMDMDSSHSIXLQPXANPNXGLVEDLDRXGPLSMXXQQSNSQSFSXSHEGLEEDKDHPXXSXLXSSNRNDVXGGRRDPNHSEGSXXLLEGYXSHYPHXKESRXFIPVXSAKXGSFGVXAVXVGDSNSNVNRSLSGDQDXFHPSGGSHXXHGSESDGHSHGSQEGGANXXSGPIRXPQIPEWLIILASLLALALILAVCIAVNSRRRCGQKKKLVINSGNGAVEDRKPSGLNGEASKSQEMVHLVNKESSEXPDQFMXADEXRNLQNVDMKIGV

SEQ ID NO: 5483 - protein, 206 aa, Homo sapiens
  MOD_RES (27)..(27): Selenocysteine
  MOD_RES (47)..(47): Selenocysteine
  MOD_RES (59)..(59): Selenocysteine
  MOD_RES (62)..(62): Selenocysteine
  MOD_RES (76)..(76): Selenocysteine
  MOD_RES (101)..(102): Selenocysteine
  MOD_RES (108)..(108): Selenocysteine
  MOD_RES (184)..(184): Selenocysteine
  MOD_RES (190)..(190): Selenocysteine
  MOD_RES (194)..(194): Selenocysteine
MDKFWWHAAWGLCLVPLSLAQIDLNIXCRFAGVFHVEKNGRYSISRXEAADLCKAFNSXLPXMAQMEKALSIGFEXCRYGFIEGHVVIPRIHPNSICGANXXSGPIRXPQIPEWLIILASLLALALILAVCIAVNSRRRCGQKKKLVINSGNGAVEDRKPSGLNGEASKSQEMVHLVNKESSEXPDQFMXADEXRNLQNVDMKIGV

SEQ ID NO: 5484 - protein, 139 aa, Homo sapiens
  MOD_RES (27)..(27): Selenocysteine
  MOD_RES (47)..(47): Selenocysteine
  MOD_RES (59)..(59): Selenocysteine
  MOD_RES (62)..(62): Selenocysteine
  MOD_RES (76)..(76): Selenocysteine
  MOD_RES (111)..(111): Selenocysteine
MDKFWWHAAWGLCLVPLSLAQIDLNIXCRFAGVFHVEKNGRYSISRXEAADLCKAFNSXLPXMAQMEKALSIGFEXCSLHCSQQSKKVWAEEKASDQQWQWSCGGQKAKWXQRRGQQVSGNGAFGEQGVVRNSRPVYDS

SEQ ID NO: 5485 - protein, 80 aa, Homo sapiens
  MOD_RES (27)..(27): Selenocysteine
  MOD_RES (47)..(47): Selenocysteine
  MOD_RES (59)..(59): Selenocysteine
  MOD_RES (62)..(62): Selenocysteine
  MOD_RES (76)..(76): Selenocysteine
  MOD_RES (80)..(80): Selenocysteine
MDKFWWHAAWGLCLVPLSLAQIDLNIXCRFAGVFHVEKNGRYSISRXEAADLCKAFNSXLPXMAQMEKALSIGFEXCSSX

SEQ ID NO: 5486 - protein, 232 aa, Homo sapiens
  MOD_RES (10)..(10): Selenocysteine
  MOD_RES (25)..(25): Selenocysteine
  MOD_RES (33)..(33): Selenocysteine
  MOD_RES (36)..(36): Selenocysteine
  MOD_RES (49)..(49): Selenocysteine
  MOD_RES (52)..(52): Selenocysteine
  MOD_RES (58)..(58): Selenocysteine
  MOD_RES (67)..(67): Selenocysteine
  MOD_RES (71)..(71): Selenocysteine
  MOD_RES (76)..(76): Selenocysteine
  MOD_RES (85)..(85): Selenocysteine
  MOD_RES (91)..(92): Selenocysteine
  MOD_RES (102)..(102): Selenocysteine
  MOD_RES (115)..(116): Selenocysteine
  MOD_RES (118)..(118): Selenocysteine
  MOD_RES (120)..(120): Selenocysteine
  MOD_RES (127)..(127): Selenocysteine
  MOD_RES (136)..(137): Selenocysteine
  MOD_RES (156)..(157): Selenocysteine
  MOD_RES (163)..(163): Selenocysteine
PEDIYPSNPXDDDVSSGSSSERSSXSGGYIFYXFSXVHPIPDEDSPWIXDSXDRIPAXNMDSSHSIXLQPXANPNXGLVEDLDRXGPLSMXXQQSNSQSFSXSHEGLEEDKDHPXXSXLXSSRDQDXFHPSGGSHXXHGSESDGHSHGSQEGGANXXSGPIRXPQIPEWLIILASLLALALILAVCIAVNSRRRCGQKKKLVINSGNGAVEDRKPSGLNGEASKSQEMVHLV

SEQ ID NO: 5487 - protein, 195 aa, Homo sapiens
  MOD_RES (4)..(5): Selenocysteine
  MOD_RES (30)..(30): Selenocysteine
  MOD_RES (34)..(34): Selenocysteine
  MOD_RES (36)..(36): Selenocysteine
  MOD_RES (40)..(40): Selenocysteine
  MOD_RES (44)..(45): Selenocysteine
  MOD_RES (48)..(48): Selenocysteine
  MOD_RES (50)..(50): Selenocysteine
  MOD_RES (67)..(67): Selenocysteine
  MOD_RES (75)..(76): Selenocysteine
  MOD_RES (78)..(78): Selenocysteine
  MOD_RES (88)..(88): Selenocysteine
  MOD_RES (92)..(92): Selenocysteine
  MOD_RES (97)..(97): Selenocysteine
  MOD_RES (106)..(106): Selenocysteine
  MOD_RES (112)..(113): Selenocysteine
  MOD_RES (123)..(123): Selenocysteine
  MOD_RES (136)..(137): Selenocysteine
  MOD_RES (139)..(139): Selenocysteine
  MOD_RES (141)..(141): Selenocysteine
  MOD_RES (149)..(149): Selenocysteine
  MOD_RES (162)..(163): Selenocysteine
  MOD_RES (169)..(169): Selenocysteine
  MOD_RES (175)..(175): Selenocysteine
  MOD_RES (180)..(180): Selenocysteine
  MOD_RES (185)..(185): Selenocysteine
  MOD_RES (189)..(189): Selenocysteine
  MOD_RES (195)..(195): Selenocysteine
RNGXXAYEGNWNPEAHPPLIHHEHHEEEEXPHSXSXIQAXPSSXXEEXAXQKEQWFGNRWHEGYRQXPKEDSHSXXGXADMDSSHSIXLQPXANPNXGLVEDLDRXGPLSMXXQQSNSQSFSXSHEGLEEDKDHPXXSXLXSSNRNDVXGGRRDPNHSEGSXXLLEGYXSHYPHXKESRXFIPVXSAKXGSFGVX

SEQ ID NO: 5488 - protein, 187 aa, Homo sapiens
  MOD_RES (2)..(2): Selenocysteine
  MOD_RES (13)..(13): Selenocysteine
  MOD_RES (28)..(28): Selenocysteine
  MOD_RES (36)..(36): Selenocysteine
  MOD_RES (39)..(39): Selenocysteine
  MOD_RES (52)..(52): Selenocysteine
  MOD_RES (55)..(55): Selenocysteine
  MOD_RES (61)..(61): Selenocysteine
  MOD_RES (63)..(63): Selenocysteine
  MOD_RES (67)..(67): Selenocysteine
  MOD_RES (103)..(103): Selenocysteine
  MOD_RES (108)..(108): Selenocysteine
  MOD_RES (117)..(118): Selenocysteine
  MOD_RES (137)..(138): Selenocysteine
  MOD_RES (144)..(144): Selenocysteine
RXNPEDIYPSNPXDDDVSSGSSSERSSXSGGYIFYXFSXVHPIPDEDSPWIXDSXDRIPAXSXSSNXISAGWEPNEENEDERDRHLSFSGSGIDDDEDFISSXRDQDXFHPSGGSHXXHGSESDGHSHGSQEGGANXXSGPIRXPQIPEWLIILASLLALALILAVCIAVNSRRRCGQKKKLVINSG

SEQ ID NO: 5489 - protein, 287 aa, Homo sapiens
  MOD_RES (7)..(7): Selenocysteine
  MOD_RES (19)..(19): Selenocysteine
  MOD_RES (22)..(22): Selenocysteine
  MOD_RES (36)..(36): Selenocysteine
  MOD_RES (62)..(62): Selenocysteine
  MOD_RES (68)..(68): Selenocysteine
  MOD_RES (71)..(71): Selenocysteine
  MOD_RES (76)..(76): Selenocysteine
  MOD_RES (90)..(90): Selenocysteine
  MOD_RES (93)..(93): Selenocysteine
  MOD_RES (104)..(104): Selenocysteine
  MOD_RES (106)..(106): Selenocysteine
  MOD_RES (113)..(113): Selenocysteine
  MOD_RES (123)..(123): Selenocysteine
  MOD_RES (134)..(134): Selenocysteine
  MOD_RES (149)..(149): Selenocysteine
  MOD_RES (156)..(156): Selenocysteine
  MOD_RES (165)..(166): Selenocysteine
  MOD_RES (185)..(186): Selenocysteine
  MOD_RES (192)..(192): Selenocysteine
  MOD_RES (268)..(268): Selenocysteine
  MOD_RES (274)..(274): Selenocysteine
  MOD_RES (278)..(278): Selenocysteine
RYSISRXEAADLCKAFNSXLPXMAQMEKALSIGFEXCRYGFIEGHVVIPRIHPNSICAANNXGVYILXSNXSQYDXYCFNASAPPEEDCXSVXDLPNAFDGPIXIXIVNRDGXRYVQKGEYRXNPEDIYPSNPXDDDVSSGSSSERSSXSGGDQDXFHPSGGSHXXHGSESDGHSHGSQEGGANXXSGPIRXPQIPEWLIILASLLALALILAVCIAVNSRRRCGQKKKLVINSGNGAVEDRKPSGLNGEASKSQEMVHLVNKESSEXPDQFMXADEXRNLQNVDMK

SEQ ID NO: 5490 - protein, 82 aa, Homo sapiens
  MOD_RES (11)..(11): Selenocysteine
  MOD_RES (60)..(60): Selenocysteine
  MOD_RES (66)..(66): Selenocysteine
  MOD_RES (70)..(70): Selenocysteine
SKHNLWSYKDXPNSRCGQKKKLVINSGNGAVEDRKPSGLNGEASKSQEMVHLVNKESSEXPDQFMXADEXRNLQNVDMKIGV

SEQ ID NO: 5491 - protein, 294 aa, Homo sapiens
  MOD_RES (1)..(1): Any amino acid
  MOD_RES (27)..(27): Selenocysteine
  MOD_RES (47)..(47): Selenocysteine
  MOD_RES (59)..(59): Selenocysteine
  MOD_RES (62)..(62): Selenocysteine
  MOD_RES (76)..(76): Selenocysteine
  MOD_RES (102)..(102): Selenocysteine
  MOD_RES (108)..(108): Selenocysteine
  MOD_RES (111)..(111): Selenocysteine
  MOD_RES (116)..(116): Selenocysteine
  MOD_RES (130)..(130): Selenocysteine
  MOD_RES (133)..(133): Selenocysteine
  MOD_RES (144)..(144): Selenocysteine
  MOD_RES (146)..(146): Selenocysteine
  MOD_RES (153)..(153): Selenocysteine
  MOD_RES (163)..(163): Selenocysteine
  MOD_RES (174)..(174): Selenocysteine
  MOD_RES (189)..(189): Selenocysteine
  MOD_RES (197)..(197): Selenocysteine
  MOD_RES (200)..(200): Selenocysteine
  MOD_RES (213)..(213): Selenocysteine
  MOD_RES (216)..(216): Selenocysteine
  MOD_RES (222)..(222): Selenocysteine
  MOD_RES (227)..(227): Selenocysteine
  MOD_RES (236)..(237): Selenocysteine
  MOD_RES (256)..(257): Selenocysteine
  MOD_RES (263)..(263): Selenocysteine
XDKFWWHAAWGLCLVPLSLAQIDLNIXCRFAGVFHVEKNGRYSISRXEAADLCKAFNSXLPXMAQMEKALSIGFEXCRYGFIEGHVVIPRIHPNSICAANNXGVYILXSNXSQYDXYCFNASAPPEEDCXSVXDLPNAFDGPIXIXIVNRDGXRYVQKGEYRXNPEDIYPSNPXDDDVSSGSSSERSSXSGGYIFYXFSXVHPIPDEDSPWIXDSXDRIPAXRDQDXFHPSGGSHXXHGSESDGHSHGSQEGGANXXSGPIRXPQIPEWLIILASLLALALILAVCIAVNSRRS

SEQ ID NO: 5492 - protein, 243 aa, Homo sapiens
  MOD_RES (1)..(1): Any amino acid
  MOD_RES (12)..(12): Selenocysteine
  MOD_RES (14)..(14): Selenocysteine
  MOD_RES (21)..(21): Selenocysteine
  MOD_RES (31)..(31): Selenocysteine
  MOD_RES (42)..(42): Selenocysteine
  MOD_RES (57)..(57): Selenocysteine
  MOD_RES (65)..(65): Selenocysteine
  MOD_RES (68)..(68): Selenocysteine
  MOD_RES (81)..(81): Selenocysteine
  MOD_RES (84)..(84): Selenocysteine
  MOD_RES (90)..(91): Selenocysteine
  MOD_RES (95)..(95): Selenocysteine
  MOD_RES (98)..(98): Selenocysteine
  MOD_RES (100)..(100): Selenocysteine
  MOD_RES (102)..(102): Selenocysteine
  MOD_RES (104)..(104): Selenocysteine
  MOD_RES (109)..(109): Selenocysteine
  MOD_RES (128)..(130): Selenocysteine
  MOD_RES (135)..(135): Selenocysteine
  MOD_RES (139)..(139): Selenocysteine
  MOD_RES (175)..(175): Selenocysteine
  MOD_RES (184)..(184): Selenocysteine
  MOD_RES (188)..(188): Selenocysteine
  MOD_RES (193)..(193): Selenocysteine
  MOD_RES (202)..(202): Selenocysteine
  MOD_RES (208)..(209): Selenocysteine
  MOD_RES (219)..(219): Selenocysteine
  MOD_RES (232)..(233): Selenocysteine
  MOD_RES (235)..(235): Selenocysteine
  MOD_RES (237)..(237): Selenocysteine
XDLPNAFDGPIXIXIVNRDGXRYVQKGEYRXNPEDIYPSNPXDDDVSSGSSSERSSXSGGYIFYXFSXVHPIPDEDSPWIXDSXDRIPAXXLMSXSAXAXEXAXKRQEXWDWFSWLFLPSESKNHLHXXXQMAGXSSNXISAGWEPNEENEDERDRHLSFSGSGIDDDEDFISSXNMDSSHSIXLQPXANPNXGLVEDLDRXGPLSMXXQQSNSQSFSXSHEGLEEDKDHPXXSXLXSSSKDY

SEQ ID NO: 5493 - protein, 195 aa, Homo sapiens
  MOD_RES (1)..(1): Any amino acid
  MOD_RES (23)..(23): Selenocysteine
  MOD_RES (29)..(29): Selenocysteine
  MOD_RES (32)..(32): Selenocysteine
  MOD_RES (37)..(37): Selenocysteine
  MOD_RES (51)..(51): Selenocysteine
  MOD_RES (54)..(54): Selenocysteine
  MOD_RES (65)..(65): Selenocysteine
  MOD_RES (67)..(67): Selenocysteine
  MOD_RES (74)..(74): Selenocysteine
  MOD_RES (84)..(84): Selenocysteine
  MOD_RES (95)..(95): Selenocysteine
  MOD_RES (110)..(110): Selenocysteine
  MOD_RES (118)..(118): Selenocysteine
  MOD_RES (121)..(121): Selenocysteine
  MOD_RES (134)..(134): Selenocysteine
  MOD_RES (137)..(137): Selenocysteine
  MOD_RES (143)..(143): Selenocysteine
  MOD_RES (153)..(153): Selenocysteine
  MOD_RES (166)..(167): Selenocysteine
  MOD_RES (169)..(169): Selenocysteine
  MOD_RES (171)..(171): Selenocysteine
  MOD_RES (179)..(179): Selenocysteine
  MOD_RES (192)..(193): Selenocysteine
XFIEGHVVIPRIHPNSICAANNXGVYILXSNXSQYDXYCFNASAPPEEDCXSVXDLPNAFDGPIXIXIVNRDGXRYVQKGEYRXNPEDIYPSNPXDDDVSSGSSSERSSXSGGYIFYXFSXVHPIPDEDSPWIXDSXDRIPAXKQSNSQSFSXSHEGLEEDKDHPXXSXLXSSNRNDVXGGRRDPNHSEGSXXLL

SEQ ID NO: 5494 - protein, 118 aa, Homo sapiens
  MOD_RES (1)..(1): Any amino acid
  MOD_RES (10)..(10): Selenocysteine
  MOD_RES (13)..(13): Selenocysteine
  MOD_RES (19)..(19): Selenocysteine
  MOD_RES (52)..(52): Selenocysteine
  MOD_RES (55)..(56): Selenocysteine
  MOD_RES (63)..(63): Selenocysteine
  MOD_RES (70)..(70): Selenocysteine
  MOD_RES (85)..(87): Selenocysteine
  MOD_RES (90)..(90): Selenocysteine
  MOD_RES (97)..(98): Selenocysteine
XPDEDSPWIXDSXDRIPAXSWEPNEENEDERDRHLSFSGSGIDDDEDFISSXISXXPRAFDHXKQNQDWXQWNPSHSNPEVLLQXXXRMXDVDRNGXXAYEGNWNPEAHPPLIHHEHH

SEQ ID NO: 5495 - protein, 230 aa, Homo sapiens
  MOD_RES (1)..(1): Any amino acid
  MOD_RES (13)..(13): Selenocysteine
  MOD_RES (39)..(39): Selenocysteine
  MOD_RES (45)..(45): Selenocysteine
  MOD_RES (48)..(48): Selenocysteine
  MOD_RES (53)..(53): Selenocysteine
  MOD_RES (67)..(67): Selenocysteine
  MOD_RES (70)..(70): Selenocysteine
  MOD_RES (81)..(81): Selenocysteine
  MOD_RES (83)..(83): Selenocysteine
  MOD_RES (90)..(90): Selenocysteine
  MOD_RES (100)..(100): Selenocysteine
  MOD_RES (111)..(111): Selenocysteine
  MOD_RES (126)..(126): Selenocysteine
  MOD_RES (134)..(134): Selenocysteine
  MOD_RES (137)..(137): Selenocysteine
  MOD_RES (150)..(150): Selenocysteine
  MOD_RES (153)..(153): Selenocysteine
  MOD_RES (159)..(159): Selenocysteine
  MOD_RES (162)..(163): Selenocysteine
  MOD_RES (170)..(170): Selenocysteine
  MOD_RES (177)..(177): Selenocysteine
  MOD_RES (192)..(194): Selenocysteine
  MOD_RES (197)..(197): Selenocysteine
  MOD_RES (204)..(205): Selenocysteine
  MOD_RES (230)..(230): Selenocysteine
XQMEKALSIGFEXCRYGFIEGHVVIPRIHPNSICAANNXGVYILXSNXSQYDXYCFNASAPPEEDCXSVXDLPNAFDGPIXIXIVNRDGXRYVQKGEYRXNPEDIYPSNPXDDDVSSGSSSERSSXSGGYIFYXFSXVHPIPDEDSPWIXDSXDRIPAXISXXPRAFDHXKQNQDWXQWNPSHSNPEVLLQXXXRMXDVDRNGXXAYEGNWNPEAHPPLIHHEHHEEEEX

SEQ ID NO: 5496 - protein, 181 aa, Homo sapiens
  MOD_RES (1)..(1): Any amino acid
  MOD_RES (3)..(3): Selenocysteine
  MOD_RES (15)..(15): Selenocysteine
  MOD_RES (18)..(18): Selenocysteine
  MOD_RES (32)..(32): Selenocysteine
  MOD_RES (58)..(58): Selenocysteine
  MOD_RES (64)..(64): Selenocysteine
  MOD_RES (67)..(67): Selenocysteine
  MOD_RES (72)..(72): Selenocysteine
  MOD_RES (86)..(86): Selenocysteine
  MOD_RES (89)..(89): Selenocysteine
  MOD_RES (100)..(100): Selenocysteine
  MOD_RES (102)..(102): Selenocysteine
  MOD_RES (109)..(109): Selenocysteine
  MOD_RES (119)..(119): Selenocysteine
  MOD_RES (130)..(130): Selenocysteine
  MOD_RES (145)..(145): Selenocysteine
  MOD_RES (156)..(156): Selenocysteine
  MOD_RES (160)..(160): Selenocysteine
  MOD_RES (165)..(165): Selenocysteine
  MOD_RES (174)..(174): Selenocysteine
  MOD_RES (180)..(181): Selenocysteine
XRXEAADLCKAFNSXLPXMAQMEKALSIGFEXCRYGFIEGHVVIPRIHPNSICAANNXGVYILXSNXSQYDXYCFNASAPPEEDCXSVXDLPNAFDGPIXIXIVNRDGXRYVQKGEYRXNPEDIYPSNPXDDDVSSGSSSERSSXSGDMDSSHSIXLQPXANPNXGLVEDLDRXGPLSMXX

SEQ ID NO: 5497 - protein, 191 aa, Homo sapiens
  MOD_RES (1)..(1): Any amino acid
  MOD_RES (3)..(4): Selenocysteine
  MOD_RES (11)..(11): Selenocysteine
  MOD_RES (18)..(18): Selenocysteine
  MOD_RES (33)..(35): Selenocysteine
  MOD_RES (38)..(38): Selenocysteine
  MOD_RES (42)..(42): Selenocysteine
  MOD_RES (46)..(47): Selenocysteine
  MOD_RES (50)..(50): Selenocysteine
  MOD_RES (52)..(52): Selenocysteine
  MOD_RES (69)..(69): Selenocysteine
  MOD_RES (77)..(78): Selenocysteine
  MOD_RES (80)..(80): Selenocysteine
  MOD_RES (86)..(86): Selenocysteine
  MOD_RES (94)..(95): Selenocysteine
  MOD_RES (104)..(104): Selenocysteine
  MOD_RES (133)..(133): Selenocysteine
  MOD_RES (137)..(137): Selenocysteine
  MOD_RES (142)..(142): Selenocysteine
  MOD_RES (151)..(151): Selenocysteine
  MOD_RES (157)..(158): Selenocysteine
  MOD_RES (168)..(168): Selenocysteine
  MOD_RES (181)..(182): Selenocysteine
  MOD_RES (184)..(184): Selenocysteine
  MOD_RES (186)..(186): Selenocysteine
XSXXPRAFDHXKQNQDWXQWNPSHSNPEVLLQXXXRMXVQAXPSSXXEEXAXQKEQWFGNRWHEGYRQXPKEDSHSXXGXAASAHXSHPMQGRXXPSPEDSSWXDFFNPISHPMGRGHQAGRRMDMDSSHSIXLQPXANPNXGLVEDLDRXGPLSMXXQQSNSQSFSXSHEGLEEDKDHPXXSXLXSSSKD

SEQ ID NO: 5498 - protein, 349 aa, Homo sapiens
  MOD_RES (40)..(40): Selenocysteine
  MOD_RES (76)..(76): Selenocysteine
  MOD_RES (78)..(78): Selenocysteine
  MOD_RES (85)..(85): Selenocysteine
  MOD_RES (98)..(98): Selenocysteine
  MOD_RES (116)..(116): Selenocysteine
  MOD_RES (163)..(163): Selenocysteine
  MOD_RES (174)..(174): Selenocysteine
  MOD_RES (188)..(188): Selenocysteine
  MOD_RES (207)..(207): Selenocysteine
  MOD_RES (251)..(251): Selenocysteine
  MOD_RES (267)..(267): Selenocysteine
  MOD_RES (275)..(275): Selenocysteine
  MOD_RES (290)..(290): Selenocysteine
  MOD_RES (336)..(336): Selenocysteine
MEPPGRRECPFPSWRFPGLLLAAMVLLLYSFSDACEEPPXFEAMELIGKPKPYYEIGERVDYKCKKGYFYIPPLAXHXICDRNHXWLPVSDDACYREXCPYIRDPLNGQAVPANGXYEFGYQMHFICNEGYYLIGEEILYCELKGSVAIWSGKPPICEKVLCXPPPKIKNGKHXFSEVEVFEYLDAVXYSCDPAPGPDPFSLIGESXIYCGDNSVWSRAAPECKVVKCRFPVVENGKQISGFGKKFYYKAXVMFECDKGFYLDGSDXIVCDSNSXWDPPVPKCLKGPRPXYKPPVSNYPGYPKPEEGILDSLDVWVIAVIVIAIGKQMVELNMPLXRLNQPLQQSREAE

SEQ ID NO: 5499 - protein, 355 aa, Homo sapiens
  MOD_RES (40)..(40): Selenocysteine
  MOD_RES (76)..(76): Selenocysteine
  MOD_RES (78)..(78): Selenocysteine
  MOD_RES (85)..(85): Selenocysteine
  MOD_RES (98)..(98): Selenocysteine
  MOD_RES (116)..(116): Selenocysteine
  MOD_RES (163)..(163): Selenocysteine
  MOD_RES (174)..(174): Selenocysteine
  MOD_RES (188)..(188): Selenocysteine
  MOD_RES (207)..(207): Selenocysteine
  MOD_RES (251)..(251): Selenocysteine
  MOD_RES (267)..(267): Selenocysteine
  MOD_RES (275)..(275): Selenocysteine
  MOD_RES (342)..(342): Selenocysteine
  MOD_RES (345)..(345): Selenocysteine
  MOD_RES (348)..(349): Selenocysteine
MEPPGRRECPFPSWRFPGLLLAAMVLLLYSFSDACEEPPXFEAMELIGKPKPYYEIGERVDYKCKKGYFYIPPLAXHXICDRNHXWLPVSDDACYREXCPYIRDPLNGQAVPANGXYEFGYQMHFICNEGYYLIGEEILYCELKGSVAIWSGKPPICEKVLCXPPPKIKNGKHXFSEVEVFEYLDAVXYSCDPAPGPDPFSLIGESXIYCGDNSVWSRAAPECKVVKCRFPVVENGKQISGFGKKFYYKAXVMFECDKGFYLDGSDXIVCDSNSXWDPPVPKCLKGYPKPEEGILDSLDVWVIAVIVIAIVVGVAVICVVPYRYLQRRKKKGKADGGAEYAXYQXKSXXPAEQRG

SEQ ID NO: 5500 - protein, 362 aa, Homo sapiens
  MOD_RES (40)..(40): Selenocysteine
  MOD_RES (76)..(76): Selenocysteine
  MOD_RES (78)..(78): Selenocysteine
  MOD_RES (85)..(85): Selenocysteine
  MOD_RES (98)..(98): Selenocysteine
  MOD_RES (116)..(116): Selenocysteine
  MOD_RES (163)..(163): Selenocysteine
  MOD_RES (174)..(174): Selenocysteine
  MOD_RES (188)..(188): Selenocysteine
  MOD_RES (207)..(207): Selenocysteine
  MOD_RES (251)..(251): Selenocysteine
  MOD_RES (267)..(267): Selenocysteine
  MOD_RES (275)..(275): Selenocysteine
  MOD_RES (290)..(290): Selenocysteine
  MOD_RES (347)..(347): Selenocysteine
  MOD_RES (350)..(350): Selenocysteine
  MOD_RES (353)..(353): Selenocysteine
  MOD_RES (360)..(360): Selenocysteine
MEPPGRRECPFPSWRFPGLLLAAMVLLLYSFSDACEEPPXFEAMELIGKPKPYYEIGERVDYKCKKGYFYIPPLAXHXICDRNHXWLPVSDDACYREXCPYIRDPLNGQAVPANGXYEFGYQMHFICNEGYYLIGEEILYCELKGSVAIWSGKPPICEKVLCXPPPKIKNGKHXFSEVEVFEYLDAVXYSCDPAPGPDPFSLIGESXIYCGDNSVWSRAAPECKVVKCRFPVVENGKQISGFGKKFYYKAXVMFECDKGFYLDGSDXIVCDSNSXWDPPVPKCLKGPRPXYKPPVSNYPGYPKPEEGILDSLDVWVIAVIVIAIVVGVAVICVVPYRYLQRRKKKGXYLXDEXHREVKFXSL

SEQ ID NO: 5501 - protein, 369 aa, Homo sapiens
  MOD_RES (40)..(40): Selenocysteine
  MOD_RES (76)..(76): Selenocysteine
  MOD_RES (78)..(78): Selenocysteine
  MOD_RES (85)..(85): Selenocysteine
  MOD_RES (98)..(98): Selenocysteine
  MOD_RES (116)..(116): Selenocysteine
  MOD_RES (163)..(163): Selenocysteine
  MOD_RES (174)..(174): Selenocysteine
  MOD_RES (188)..(188): Selenocysteine
  MOD_RES (207)..(207): Selenocysteine
  MOD_RES (251)..(251): Selenocysteine
  MOD_RES (267)..(267): Selenocysteine
  MOD_RES (275)..(275): Selenocysteine
  MOD_RES (290)..(290): Selenocysteine
  MOD_RES (356)..(356): Selenocysteine
  MOD_RES (359)..(359): Selenocysteine
  MOD_RES (362)..(363): Selenocysteine
MEPPGRRECPFPSWRFPGLLLAAMVLLLYSFSDACEEPPXFEAMELIGKPKPYYEIGERVDYKCKKGYFYIPPLAXHXICDRNHXWLPVSDDACYREXCPYIRDPLNGQAVPANGXYEFGYQMHFICNEGYYLIGEEILYCELKGSVAIWSGKPPICEKVLCXPPPKIKNGKHXFSEVEVFEYLDAVXYSCDPAPGPDPFSLIGESXIYCGDNSVWSRAAPECKVVKCRFPVVENGKQISGFGKKFYYKAXVMFECDKGFYLDGSDXIVCDSNSXWDPPVPKCLKGPRPXYKPPVSNYPGYPKPEEGILDSLDVWVIAVIVIAIVVGVAVICVVPYRYLQRRKKKGKADGGAEYAXYQXKSXXPAEQRG

SEQ ID NO: 5502 - protein, 370 aa, Homo sapiens
  MOD_RES (40)..(40): Selenocysteine
  MOD_RES (76)..(76): Selenocysteine
  MOD_RES (78)..(78): Selenocysteine
  MOD_RES (85)..(85): Selenocysteine
  MOD_RES (98)..(98): Selenocysteine
  MOD_RES (116)..(116): Selenocysteine
  MOD_RES (163)..(163): Selenocysteine
  MOD_RES (174)..(174): Selenocysteine
  MOD_RES (188)..(188): Selenocysteine
  MOD_RES (207)..(207): Selenocysteine
  MOD_RES (251)..(251): Selenocysteine
  MOD_RES (267)..(267): Selenocysteine
  MOD_RES (275)..(275): Selenocysteine
  MOD_RES (288)..(288): Selenocysteine
  MOD_RES (291)..(292): Selenocysteine
  MOD_RES (357)..(357): Selenocysteine
  MOD_RES (360)..(360): Selenocysteine
  MOD_RES (363)..(364): Selenocysteine
MEPPGRRECPFPSWRFPGLLLAAMVLLLYSFSDACEEPPXFEAMELIGKPKPYYEIGERVDYKCKKGYFYIPPLAXHXICDRNHXWLPVSDDACYREXCPYIRDPLNGQAVPANGXYEFGYQMHFICNEGYYLIGEEILYCELKGSVAIWSGKPPICEKVLCXPPPKIKNGKHXFSEVEVFEYLDAVXYSCDPAPGPDPFSLIGESXIYCGDNSVWSRAAPECKVVKCRFPVVENGKQISGFGKKFYYKAXVMFECDKGFYLDGSDXIVCDSNSXWDPPVPKCLKVSXSSXXKSPASSASGYPKPEEGILDSLDVWVIAVIVIAIVVGVAVICVVPYRYLQRRKKKGKADGGAEYAXYQXKSXXPAEQRG

SEQ ID NO: 5503 - protein, 377 aa, Homo sapiens
  MOD_RES (40)..(40): Selenocysteine
  MOD_RES (76)..(76): Selenocysteine
  MOD_RES (78)..(78): Selenocysteine
  MOD_RES (85)..(85): Selenocysteine
  MOD_RES (98)..(98): Selenocysteine
  MOD_RES (116)..(116): Selenocysteine
  MOD_RES (163)..(163): Selenocysteine
  MOD_RES (174)..(174): Selenocysteine
  MOD_RES (188)..(188): Selenocysteine
  MOD_RES (207)..(207): Selenocysteine
  MOD_RES (251)..(251): Selenocysteine
  MOD_RES (267)..(267): Selenocysteine
  MOD_RES (275)..(275): Selenocysteine
  MOD_RES (288)..(288): Selenocysteine
  MOD_RES (291)..(292): Selenocysteine
  MOD_RES (305)..(305): Selenocysteine
  MOD_RES (362)..(362): Selenocysteine
  MOD_RES (365)..(365): Selenocysteine
  MOD_RES (368)..(368): Selenocysteine
  MOD_RES (375)..(375): Selenocysteine
MEPPGRRECPFPSWRFPGLLLAAMVLLLYSFSDACEEPPXFEAMELIGKPKPYYEIGERVDYKCKKGYFYIPPLAXHXICDRNHXWLPVSDDACYREXCPYIRDPLNGQAVPANGXYEFGYQMHFICNEGYYLIGEEILYCELKGSVAIWSGKPPICEKVLCXPPPKIKNGKHXFSEVEVFEYLDAVXYSCDPAPGPDPFSLIGESXIYCGDNSVWSRAAPECKVVKCRFPVVENGKQISGFGKKFYYKAXVMFECDKGFYLDGSDXIVCDSNSXWDPPVPKCLKVSXSSXXKSPASSASGPRPXYKPPVSNYPGYPKPEEGILDSLDVWVIAVIVIAIVVGVAVICVVPYRYLQRRKKKGXYLXDEXHREVKFXSL

SEQ ID NO: 5504 - protein, 384 aa, Homo sapiens
  MOD_RES (40)..(40): Selenocysteine
  MOD_RES (76)..(76): Selenocysteine
  MOD_RES (78)..(78): Selenocysteine
  MOD_RES (85)..(85): Selenocysteine
  MOD_RES (98)..(98): Selenocysteine
  MOD_RES (116)..(116): Selenocysteine
  MOD_RES (163)..(163): Selenocysteine
  MOD_RES (174)..(174): Selenocysteine
  MOD_RES (188)..(188): Selenocysteine
  MOD_RES (207)..(207): Selenocysteine
  MOD_RES (251)..(251): Selenocysteine
  MOD_RES (267)..(267): Selenocysteine
  MOD_RES (275)..(275): Selenocysteine
  MOD_RES (288)..(288): Selenocysteine
  MOD_RES (291)..(292): Selenocysteine
  MOD_RES (305)..(305): Selenocysteine
  MOD_RES (371)..(371): Selenocysteine
  MOD_RES (374)..(374): Selenocysteine
  MOD_RES (377)..(378): Selenocysteine
MEPPGRRECPFPSWRFPGLLLAAMVLLLYSFSDACEEPPXFEAMELIGKPKPYYEIGERVDYKCKKGYFYIPPLAXHXICDRNHXWLPVSDDACYREXCPYIRDPLNGQAVPANGXYEFGYQMHFICNEGYYLIGEEILYCELKGSVAIWSGKPPICEKVLCXPPPKIKNGKHXFSEVEVFEYLDAVXYSCDPAPGPDPFSLIGESXIYCGDNSVWSRAAPECKVVKCRFPVVENGKQISGFGKKFYYKAXVMFECDKGFYLDGSDXIVCDSNSXWDPPVPKCLKVSXSSXXKSPASSASGPRPXYKPPVSNYPGYPKPEEGILDSLDVWVIAVIVIAIVVGVAVICVVPYRYLQRRKKKGKADGGAEYAXYQXKSXXPAEQRG

SEQ ID NO: 5505 - protein, 392 aa, Homo sapiens
  MOD_RES (40)..(40): Selenocysteine
  MOD_RES (76)..(76): Selenocysteine
  MOD_RES (78)..(78): Selenocysteine
  MOD_RES (85)..(85): Selenocysteine
  MOD_RES (98)..(98): Selenocysteine
  MOD_RES (116)..(116): Selenocysteine
  MOD_RES (163)..(163): Selenocysteine
  MOD_RES (174)..(174): Selenocysteine
  MOD_RES (188)..(188): Selenocysteine
  MOD_RES (207)..(207): Selenocysteine
  MOD_RES (251)..(251): Selenocysteine
  MOD_RES (267)..(267): Selenocysteine
  MOD_RES (275)..(275): Selenocysteine
  MOD_RES (292)..(292): Selenocysteine
  MOD_RES (303)..(303): Selenocysteine
  MOD_RES (306)..(307): Selenocysteine
  MOD_RES (320)..(320): Selenocysteine
  MOD_RES (377)..(377): Selenocysteine
  MOD_RES (380)..(380): Selenocysteine
  MOD_RES (383)..(383): Selenocysteine
  MOD_RES (390)..(390): Selenocysteine
MEPPGRRECPFPSWRFPGLLLAAMVLLLYSFSDACEEPPXFEAMELIGKPKPYYEIGERVDYKCKKGYFYIPPLAXHXICDRNHXWLPVSDDACYREXCPYIRDPLNGQAVPANGXYEFGYQMHFICNEGYYLIGEEILYCELKGSVAIWSGKPPICEKVLCXPPPKIKNGKHXFSEVEVFEYLDAVXYSCDPAPGPDPFSLIGESXIYCGDNSVWSRAAPECKVVKCRFPVVENGKQISGFGKKFYYKAXVMFECDKGFYLDGSDXIVCDSNSXWDPPVPKCLKVLPPSSXKPPALSHSVSXSSXXKSPASSASGPRPXYKPPVSNYPGYPKPEEGILDSLDVWVIAVIVIAIVVGVAVICVVPYRYLQRRKKKGXYLXDEXHREVKFXSL

SEQ ID NO: 5506 - protein, 399 aa, Homo sapiens
  MOD_RES (40)..(40): Selenocysteine
  MOD_RES (76)..(76): Selenocysteine
  MOD_RES (78)..(78): Selenocysteine
  MOD_RES (85)..(85): Selenocysteine
  MOD_RES (98)..(98): Selenocysteine
  MOD_RES (116)..(116): Selenocysteine
  MOD_RES (163)..(163): Selenocysteine
  MOD_RES (174)..(174): Selenocysteine
  MOD_RES (188)..(188): Selenocysteine
  MOD_RES (207)..(207): Selenocysteine
  MOD_RES (251)..(251): Selenocysteine
  MOD_RES (267)..(267): Selenocysteine
  MOD_RES (275)..(275): Selenocysteine
  MOD_RES (292)..(292): Selenocysteine
  MOD_RES (303)..(303): Selenocysteine
  MOD_RES (306)..(307): Selenocysteine
  MOD_RES (320)..(320): Selenocysteine
  MOD_RES (386)..(386): Selenocysteine
  MOD_RES (389)..(389): Selenocysteine
  MOD_RES (392)..(393): Selenocysteine
MEPPGRRECPFPSWRFPGLLLAAMVLLLYSFSDACEEPPXFEAMELIGKPKPYYEIGERVDYKCKKGYFYIPPLAXHXICDRNHXWLPVSDDACYREXCPYIRDPLNGQAVPANGXYEFGYQMHFICNEGYYLIGEEILYCELKGSVAIWSGKPPICEKVLCXPPPKIKNGKHXFSEVEVFEYLDAVXYSCDPAPGPDPFSLIGESXIYCGDNSVWSRAAPECKVVKCRFPVVENGKQISGFGKKFYYKAXVMFECDKGFYLDGSDXIVCDSNSXWDPPVPKCLKVLPPSSXKPPALSHSVSXSSXXKSPASSASGPRPXYKPPVSNYPGYPKPEEGILDSLDVWVIAVIVIAIVVGVAVICVVPYRYLQRRKKKGKADGGAEYAXYQXKSXXPAEQRG

SEQ ID NO: 5507 - protein, 336 aa, Homo sapiens
  MOD_RES (35)..(35): Selenocysteine
  MOD_RES (53)..(53): Selenocysteine
  MOD_RES (100)..(100): Selenocysteine
  MOD_RES (111)..(111): Selenocysteine
  MOD_RES (125)..(125): Selenocysteine
  MOD_RES (144)..(144): Selenocysteine
  MOD_RES (188)..(188): Selenocysteine
  MOD_RES (204)..(204): Selenocysteine
  MOD_RES (212)..(212): Selenocysteine
  MOD_RES (229)..(229): Selenocysteine
  MOD_RES (240)..(240): Selenocysteine
  MOD_RES (243)..(244): Selenocysteine
  MOD_RES (257)..(257): Selenocysteine
  MOD_RES (323)..(323): Selenocysteine
  MOD_RES (326)..(326): Selenocysteine
  MOD_RES (329)..(330): Selenocysteine
MEPPGRRECPFPSWRFPGLLLAAMVLLLYSFSGEXCPYIRDPLNGQAVPANGXYEFGYQMHFICNEGYYLIGEEILYCELKGSVAIWSGKPPICEKVLCXPPPKIKNGKHXFSEVEVFEYLDAVXYSCDPAPGPDPFSLIGESXIYCGDNSVWSRAAPECKVVKCRFPVVENGKQISGFGKKFYYKAXVMFECDKGFYLDGSDXIVCDSNSXWDPPVPKCLKVLPPSSXKPPALSHSVSXSSXXKSPASSASGPRPXYKPPVSNYPGYPKPEEGILDSLDVWVIAVIVIAIVVGVAVICVVPYRYLQRRKKKGKADGGAEYAXYQXKSXXPAEQRG

SEQ ID NO: 5508 - protein, 78 aa, Homo sapiens
  MOD_RES (1)..(1): Any amino acid
  MOD_RES (65)..(65): Selenocysteine
  MOD_RES (68)..(68): Selenocysteine
  MOD_RES (71)..(72): Selenocysteine
XPPVSNYPGYPKPEEGILDSLDVWVIAVIVIAIVVGVAVICVVPYRYLQRRKKKGKADGGAEYAXYQXKSXXPAEQRG

SEQ ID NO: 5509 - protein, 305 aa, Homo sapiens
  MOD_RES (25)..(25): Selenocysteine
  MOD_RES (31)..(31): Selenocysteine
  MOD_RES (36)..(36): Selenocysteine
  MOD_RES (44)..(44): Selenocysteine
  MOD_RES (51)..(52): Selenocysteine
  MOD_RES (67)..(67): Selenocysteine
  MOD_RES (76)..(76): Selenocysteine
  MOD_RES (79)..(79): Selenocysteine
  MOD_RES (109)..(109): Selenocysteine
  MOD_RES (113)..(113): Selenocysteine
  MOD_RES (117)..(117): Selenocysteine
  MOD_RES (120)..(120): Selenocysteine
  MOD_RES (125)..(125): Selenocysteine
  MOD_RES (164)..(164): Selenocysteine
  MOD_RES (176)..(176): Selenocysteine
  MOD_RES (187)..(187): Selenocysteine
  MOD_RES (208)..(208): Selenocysteine
  MOD_RES (215)..(215): Selenocysteine
  MOD_RES (217)..(217): Selenocysteine
  MOD_RES (230)..(230): Selenocysteine
  MOD_RES (235)..(235): Selenocysteine
  MOD_RES (298)..(298): Selenocysteine
MWPLVAALLLGSACCGSAQLLFNKXKSVEFXFCNDXVVIPCFVXNMEAQNXXEVYVKWKFKGRDIYXFDGALNKSXVPXDFSSAKIEVSQLLKGDASLKMDKSDAVSHXGNYXCEVXELXREGEXIIELKYRVVSWFSPNENILIVIFPIFAILLFWGQFGIKXLKYRSGGMDEKXIALLVAGLVIXVIVIVGAILFVPGEYSLKNAXGLGLIVXSXGILILLHYYVFSXAIGLXSFVIAILVIQVIAYILAVVGLSLCIAACIPMHGPLLISGLSILALAQLLGLVYMKFVASNQKXIQPPRNN

SEQ ID NO: 5510 - protein, 323 aa, Homo sapiens
  MOD_RES (25)..(25): Selenocysteine
  MOD_RES (31)..(31): Selenocysteine
  MOD_RES (36)..(36): Selenocysteine
  MOD_RES (44)..(44): Selenocysteine
  MOD_RES (51)..(52): Selenocysteine
  MOD_RES (67)..(67): Selenocysteine
  MOD_RES (76)..(76): Selenocysteine
  MOD_RES (79)..(79): Selenocysteine
  MOD_RES (109)..(109): Selenocysteine
  MOD_RES (113)..(113): Selenocysteine
  MOD_RES (117)..(117): Selenocysteine
  MOD_RES (120)..(120): Selenocysteine
  MOD_RES (125)..(125): Selenocysteine
  MOD_RES (164)..(164): Selenocysteine
  MOD_RES (176)..(176): Selenocysteine
  MOD_RES (187)..(187): Selenocysteine
  MOD_RES (208)..(208): Selenocysteine
  MOD_RES (215)..(215): Selenocysteine
  MOD_RES (217)..(217): Selenocysteine
  MOD_RES (230)..(230): Selenocysteine
  MOD_RES (235)..(235): Selenocysteine
  MOD_RES (298)..(298): Selenocysteine
MWPLVAALLLGSACCGSAQLLFNKXKSVEFXFCNDXVVIPCFVXNMEAQNXXEVYVKWKFKGRDIYXFDGALNKSXVPXDFSSAKIEVSQLLKGDASLKMDKSDAVSHXGNYXCEVXELXREGEXIIELKYRVVSWFSPNENILIVIFPIFAILLFWGQFGIKXLKYRSGGMDEKXIALLVAGLVIXVIVIVGAILFVPGEYSLKNAXGLGLIVXSXGILILLHYYVFSXAIGLXSFVIAILVIQVIAYILAVVGLSLCIAACIPMHGPLLISGLSILALAQLLGLVYMKFVASNQKXIQPPRKAVEEPLNAFKESKGMMNDE

SEQ ID NO: 5511 - protein, 109 aa, Homo sapiens
  MOD_RES (1)..(1): Any amino acid
  MOD_RES (5)..(5): Selenocysteine
  MOD_RES (12)..(12): Selenocysteine
  MOD_RES (14)..(14): Selenocysteine
  MOD_RES (27)..(27): Selenocysteine
  MOD_RES (32)..(32): Selenocysteine
  MOD_RES (95)..(95): Selenocysteine
XKNAXGLGLIVXSXGILILLHYYVFSXAIGLXSFVIAILVIQVIAYILAVVGLSLCIAACIPMHGPLLISGLSILALAQLLGLVYMKFVASNQKXIQPPRKAVEEPLNE

SEQ ID NO: 5512 - protein, 86 aa, Homo sapiens
  MOD_RES (1)..(1): Any amino acid
  MOD_RES (3)..(3): Selenocysteine
  MOD_RES (12)..(12): Selenocysteine
  MOD_RES (29)..(29): Selenocysteine
  MOD_RES (31)..(31): Selenocysteine
  MOD_RES (33)..(33): Selenocysteine
  MOD_RES (45)..(45): Selenocysteine
  MOD_RES (61)..(61): Selenocysteine
XWXESLYCGVYXNAWPSSDFRFEYLSSSXIXWXSLYEICGVQRDXYSQLKGKKRQASNQKXIQPPRKAVEEPLNAFKESKGMMNDE

SEQ ID NO: 5513 - protein, 243 aa, Homo sapiens
  MOD_RES (24)..(24): Selenocysteine
  MOD_RES (34)..(34): Selenocysteine
  MOD_RES (42)..(42): Selenocysteine
  MOD_RES (57)..(57): Selenocysteine
  MOD_RES (61)..(61): Selenocysteine
  MOD_RES (106)..(106): Selenocysteine
  MOD_RES (115)..(115): Selenocysteine
  MOD_RES (164)..(164): Selenocysteine
  MOD_RES (183)..(184): Selenocysteine
  MOD_RES (195)..(195): Selenocysteine
  MOD_RES (208)..(208): Selenocysteine
  MOD_RES (216)..(216): Selenocysteine
  MOD_RES (233)..(233): Selenocysteine
  MOD_RES (236)..(236): Selenocysteine
  MOD_RES (243)..(243): Selenocysteine
MCSRGWDSCLALELLLLPLSLLVXSIQGHLVHMXVVSGSNVXLNISESLPENYKQLXWFYXFDQKIVEWDSRKSKYFESKFKGRVRLDPQSGALYISKVQKEDNSXYIMRVLKKXGNEQEWKIKLQVLDPVPKPVIKIEKIEDMDDNCYLKLSCVIPGESVNYXWYGDKRPFPKELQNSVLEXXLMPHNYSRCYXCQVSNSVSSKNGXVCLSPPCXLARSFGVEWIASWLVVXVPXILGLLLX

SEQ ID NO: 5514 - protein, 252 aa, Homo sapiens
  MOD_RES (24)..(24): Selenocysteine
  MOD_RES (34)..(34): Selenocysteine
  MOD_RES (42)..(42): Selenocysteine
  MOD_RES (57)..(57): Selenocysteine
  MOD_RES (61)..(61): Selenocysteine
  MOD_RES (106)..(106): Selenocysteine
  MOD_RES (115)..(115): Selenocysteine
  MOD_RES (164)..(164): Selenocysteine
  MOD_RES (183)..(184): Selenocysteine
  MOD_RES (195)..(195): Selenocysteine
  MOD_RES (208)..(208): Selenocysteine
  MOD_RES (216)..(216): Selenocysteine
  MOD_RES (249)..(249): Selenocysteine
MCSRGWDSCLALELLLLPLSLLVXSIQGHLVHMXVVSGSNVXLNISESLPENYKQLXWFYXFDQKIVEWDSRKSKYFESKFKGRVRLDPQSGALYISKVQKEDNSXYIMRVLKKXGNEQEWKIKLQVLDPVPKPVIKIEKIEDMDDNCYLKLSCVIPGESVNYXWYGDKRPFPKELQNSVLEXXLMPHNYSRCYXCQVSNSVSSKNGXVCLSPPCXLGKKDPWELRGAQGNWSCFEQRKAGGPIQPPCXVWW

SEQ ID NO: 5515 - protein, 169 aa, Homo sapiens
  MOD_RES (24)..(24): Selenocysteine
  MOD_RES (34)..(34): Selenocysteine
  MOD_RES (42)..(42): Selenocysteine
  MOD_RES (57)..(57): Selenocysteine
  MOD_RES (61)..(61): Selenocysteine
  MOD_RES (106)..(106): Selenocysteine
  MOD_RES (115)..(115): Selenocysteine
  MOD_RES (157)..(157): Selenocysteine
  MOD_RES (165)..(165): Selenocysteine
MCSRGWDSCLALELLLLPLSLLVXSIQGHLVHMXVVSGSNVXLNISESLPENYKQLXWFYXFDQKIVEWDSRKSKYFESKFKGRVRLDPQSGALYISKVQKEDNSXYIMRVLKKXGNEQEWKIKLQVLGESGEPKSKSPLQWPQMDHCRASWEAWGXLGEEERKXSGQV

SEQ ID NO: 5516 - protein, 165 aa, Homo sapiens
  MOD_RES (11)..(11): Selenocysteine
  MOD_RES (38)..(38): Selenocysteine
  MOD_RES (98)..(98): Selenocysteine
  MOD_RES (100)..(100): Selenocysteine
  MOD_RES (131)..(131): Selenocysteine
  MOD_RES (138)..(139): Selenocysteine
  MOD_RES (142)..(143): Selenocysteine
  MOD_RES (148)..(150): Selenocysteine
  MOD_RES (154)..(154): Selenocysteine
  MOD_RES (160)..(160): Selenocysteine
  MOD_RES (164)..(164): Selenocysteine
MPMGSLQPLAXLYLLGMLVASCLGRLSWYDPDFQARLXRSNSKCQGQLEVYLKDGWHMVCSQSWGRSSKQWEDPSQASKVCQRLNCGVPLSLGPFLVXYXPQSSIICYGQLGSFSNCSHSRNDMCHSLGLXCLEPQKXXPPXXRPPPXXXPEPXAMRPRXRPRXW

SEQ ID NO: 5517 - protein, 495 aa, Homo sapiens
  MOD_RES (11)..(11): Selenocysteine
  MOD_RES (38)..(38): Selenocysteine
  MOD_RES (98)..(98): Selenocysteine
  MOD_RES (100)..(100): Selenocysteine
  MOD_RES (131)..(131): Selenocysteine
  MOD_RES (138)..(139): Selenocysteine
  MOD_RES (142)..(143): Selenocysteine
  MOD_RES (148)..(150): Selenocysteine
  MOD_RES (154)..(154): Selenocysteine
  MOD_RES (184)..(184): Selenocysteine
  MOD_RES (193)..(193): Selenocysteine
  MOD_RES (216)..(216): Selenocysteine
  MOD_RES (245)..(245): Selenocysteine
  MOD_RES (288)..(288): Selenocysteine
  MOD_RES (336)..(336): Selenocysteine
  MOD_RES (366)..(366): Selenocysteine
  MOD_RES (379)..(379): Selenocysteine
  MOD_RES (421)..(421): Selenocysteine
  MOD_RES (434)..(434): Selenocysteine
  MOD_RES (436)..(436): Selenocysteine
  MOD_RES (445)..(445): Selenocysteine
MPMGSLQPLAXLYLLGMLVASCLGRLSWYDPDFQARLXRSNSKCQGQLEVYLKDGWHMVCSQSWGRSSKQWEDPSQASKVCQRLNCGVPLSLGPFLVXYXPQSSIICYGQLGSFSNCSHSRNDMCHSLGLXCLEPQKXXPPXXRPPPXXXPEPXAPPRLQLVAQSGGQHCAGVVEFYSGSLGGXISYEAQDKXQDLENFLCNNLQCGSFLKHLPEXEAGRAQDPGEPREHQPLPIQWKIQNSSCXSLEHCFRKIKPQKSGRVLALLCSGFQPKVQSRLVGGSSICEGXVEVRQGAQWAALCDSSSARSSLRWEEVCREQQCGSVNSYRVLDAGDPXSRGLFCPHQKLSQCHELWERNSYCKKVFVXCQDPNPAGLAAGXVASIILALVLLVVLLVVCGPLAYKKLVKKFRQKKQRQWIGPXGMNQNMSFHRNHXAXVRSHAENPXASHVDNEYSQPPRNSHLSAYPALEGALHRSSMQPDNSSDSDYDLHGAQRL

SEQ ID NO: 5518 - protein, 219 aa, Homo sapiens
  MOD_RES (51)..(51): Selenocysteine
  MOD_RES (98)..(98): Selenocysteine
  MOD_RES (119)..(119): Selenocysteine
  MOD_RES (131)..(131): Selenocysteine
  MOD_RES (150)..(150): Selenocysteine
  MOD_RES (154)..(154): Selenocysteine
  MOD_RES (189)..(189): Selenocysteine
  MOD_RES (205)..(205): Selenocysteine
  MOD_RES (213)..(213): Selenocysteine
  MOD_RES (216)..(216): Selenocysteine
MGMSSLKLLKYVLFFFNLLFWICGCCILGFGIYLLIHNNFGVLFHNLPSLXLGNVFVIVGSIIMVVAFLGCMGSIKENKCLLMSFFILLLIILLAEVXLAILLFVYEQKLNEYVAKGLXDSIHRYHSDNSXKAAWDSIQSFLQCCGINGXSDWXSGPPASCPSDRKVEGCYAKARLWFHSNFLYIGIIXICVCVIEVLGMSFALXLNCQIDKXSQXIGL

SEQ ID NO: 5519 - protein, 317 aa, Homo sapiens
  MOD_RES (2)..(2): Selenocysteine
  MOD_RES (53)..(53): Selenocysteine
  MOD_RES (59)..(59): Selenocysteine
  MOD_RES (62)..(62): Selenocysteine
  MOD_RES (121)..(121): Selenocysteine
  MOD_RES (128)..(128): Selenocysteine
  MOD_RES (136)..(136): Selenocysteine
  MOD_RES (186)..(186): Selenocysteine
  MOD_RES (194)..(194): Selenocysteine
  MOD_RES (204)..(204): Selenocysteine
  MOD_RES (225)..(225): Selenocysteine
  MOD_RES (231)..(231): Selenocysteine
  MOD_RES (236)..(237): Selenocysteine
  MOD_RES (242)..(243): Selenocysteine
  MOD_RES (248)..(248): Selenocysteine
  MOD_RES (252)..(254): Selenocysteine
  MOD_RES (256)..(258): Selenocysteine
  MOD_RES (264)..(264): Selenocysteine
  MOD_RES (267)..(267): Selenocysteine
  MOD_RES (272)..(273): Selenocysteine
  MOD_RES (279)..(280): Selenocysteine
  MOD_RES (287)..(288): Selenocysteine
  MOD_RES (291)..(292): Selenocysteine
  MOD_RES (299)..(299): Selenocysteine
  MOD_RES (302)..(302): Selenocysteine
  MOD_RES (304)..(304): Selenocysteine
  MOD_RES (309)..(309): Selenocysteine
  MOD_RES (312)..(312): Selenocysteine
  MOD_RES (317)..(317): Selenocysteine
MXVARPSVPAALPLLGELPRLLLLVLLCLPAVWGDCGLPPDVPNAQPALEGRXSFPEDXVIXYKCEESFVKIPGEKDSVICLKGSQWSDIEEFCNQKSCPNPGEIRNGQIDVPGGILFGAXISFSCNXGYKLFGSXSSFCLISGSSVQWSDPLPECREIYCPAPPQIDNGIIQGERDHYGYRQSVXYACNKGFXMIGEHSIYCXVNNDEGEWSGPPPECRGKSLXSKVPPXVQKPXXVNVPXXEVSPXSQKXXXKXXXPNAQAXRSXPVSRXXKHFHEXXPNKGSGXXSGXXRLLSGHXCFXLXGLLGXLVXMGLLX

SEQ ID NO: 5520 - protein, 381 aa, Homo sapiens
  MOD_RES (2)..(2): Selenocysteine
  MOD_RES (53)..(53): Selenocysteine
  MOD_RES (59)..(59): Selenocysteine
  MOD_RES (62)..(62): Selenocysteine
  MOD_RES (102)..(102): Selenocysteine
  MOD_RES (115)..(115): Selenocysteine
  MOD_RES (123)..(123): Selenocysteine
  MOD_RES (144)..(144): Selenocysteine
  MOD_RES (153)..(153): Selenocysteine
  MOD_RES (185)..(185): Selenocysteine
  MOD_RES (192)..(192): Selenocysteine
  MOD_RES (200)..(200): Selenocysteine
  MOD_RES (250)..(250): Selenocysteine
  MOD_RES (258)..(258): Selenocysteine
  MOD_RES (268)..(268): Selenocysteine
  MOD_RES (289)..(289): Selenocysteine
  MOD_RES (295)..(295): Selenocysteine
  MOD_RES (300)..(301): Selenocysteine
  MOD_RES (306)..(307): Selenocysteine
  MOD_RES (312)..(312): Selenocysteine
  MOD_RES (316)..(318): Selenocysteine
  MOD_RES (320)..(322): Selenocysteine
  MOD_RES (328)..(328): Selenocysteine
  MOD_RES (331)..(331): Selenocysteine
  MOD_RES (336)..(337): Selenocysteine
  MOD_RES (343)..(344): Selenocysteine
  MOD_RES (351)..(352): Selenocysteine
  MOD_RES (355)..(356): Selenocysteine
  MOD_RES (363)..(363): Selenocysteine
  MOD_RES (366)..(366): Selenocysteine
  MOD_RES (368)..(368): Selenocysteine
  MOD_RES (373)..(373): Selenocysteine
  MOD_RES (376)..(376): Selenocysteine
  MOD_RES (381)..(381): Selenocysteine
MXVARPSVPAALPLLGELPRLLLLVLLCLPAVWGDCGLPPDVPNAQPALEGRXSFPEDXVIXYKCEESFVKIPGEKDSVICLKGSQWSDIEEFCNRSCEVPXRLNSASLKQPYIXQNYFPVGXVVEYECRPGYRREPSLSPKLXCLQNLKWSXAVEFCKKKSCPNPGEIRNGQIDVPGGILFGAXISFSCNXGYKLFGSXSSFCLISGSSVQWSDPLPECREIYCPAPPQIDNGIIQGERDHYGYRQSVXYACNKGFXMIGEHSIYCXVNNDEGEWSGPPPECRGKSLXSKVPPXVQKPXXVNVPXXEVSPXSQKXXXKXXXPNAQAXRSXPVSRXXKHFHEXXPNKGSGXXSGXXRLLSGHXCFXLXGLLGXLVXMGLLX

SEQ ID NO: 5521 - protein, 440 aa, Homo sapiens
  MOD_RES (2)..(2): Selenocysteine
  MOD_RES (53)..(53): Selenocysteine
  MOD_RES (59)..(59): Selenocysteine
  MOD_RES (62)..(62): Selenocysteine
  MOD_RES (102)..(102): Selenocysteine
  MOD_RES (115)..(115): Selenocysteine
  MOD_RES (123)..(123): Selenocysteine
  MOD_RES (144)..(144): Selenocysteine
  MOD_RES (153)..(153): Selenocysteine
  MOD_RES (185)..(185): Selenocysteine
  MOD_RES (192)..(192): Selenocysteine
  MOD_RES (200)..(200): Selenocysteine
  MOD_RES (250)..(250): Selenocysteine
  MOD_RES (258)..(258): Selenocysteine
  MOD_RES (268)..(268): Selenocysteine
  MOD_RES (289)..(289): Selenocysteine
  MOD_RES (295)..(295): Selenocysteine
  MOD_RES (300)..(301): Selenocysteine
  MOD_RES (306)..(307): Selenocysteine
  MOD_RES (312)..(312): Selenocysteine
  MOD_RES (316)..(318): Selenocysteine
  MOD_RES (320)..(322): Selenocysteine
  MOD_RES (328)..(328): Selenocysteine
  MOD_RES (331)..(331): Selenocysteine
  MOD_RES (336)..(337): Selenocysteine
  MOD_RES (343)..(344): Selenocysteine
  MOD_RES (351)..(352): Selenocysteine
  MOD_RES (355)..(356): Selenocysteine
  MOD_RES (366)..(366): Selenocysteine
  MOD_RES (382)..(382): Selenocysteine
  MOD_RES (431)..(431): Selenocysteine
MXVARPSVPAALPLLGELPRLLLLVLLCLPAVWGDCGLPPDVPNAQPALEGRXSFPEDXVIXYKCEESFVKIPGEKDSVICLKGSQWSDIEEFCNRSCEVPXRLNSASLKQPYIXQNYFPVGXVVEYECRPGYRREPSLSPKLXCLQNLKWSXAVEFCKKKSCPNPGEIRNGQIDVPGGILFGAXISFSCNXGYKLFGSXSSFCLISGSSVQWSDPLPECREIYCPAPPQIDNGIIQGERDHYGYRQSVXYACNKGFXMIGEHSIYCXVNNDEGEWSGPPPECRGKSLXSKVPPXVQKPXXVNVPXXEVSPXSQKXXXKXXXPNAQAXRSXPVSRXXKHFHEXXPNKGSGXXSGXXRLLSGSRPVXQAGMRWCDRSSLQSRXPGFKRSFHFSLPSSWYYRAHVFHVDRFAWDASNHGLADLAKEELRRKYXQVYRLFLVS

SEQ ID NO: 5522 - protein, 444 aa, Homo sapiens
  MOD_RES (2)..(2): Selenocysteine
  MOD_RES (53)..(53): Selenocysteine
  MOD_RES (59)..(59): Selenocysteine
  MOD_RES (62)..(62): Selenocysteine
  MOD_RES (102)..(102): Selenocysteine
  MOD_RES (115)..(115): Selenocysteine
  MOD_RES (123)..(123): Selenocysteine
  MOD_RES (144)..(144): Selenocysteine
  MOD_RES (153)..(153): Selenocysteine
  MOD_RES (185)..(185): Selenocysteine
  MOD_RES (192)..(192): Selenocysteine
  MOD_RES (200)..(200): Selenocysteine
  MOD_RES (250)..(250): Selenocysteine
  MOD_RES (258)..(258): Selenocysteine
  MOD_RES (268)..(268): Selenocysteine
  MOD_RES (289)..(289): Selenocysteine
  MOD_RES (295)..(295): Selenocysteine
  MOD_RES (300)..(301): Selenocysteine
  MOD_RES (306)..(307): Selenocysteine
  MOD_RES (312)..(312): Selenocysteine
  MOD_RES (316)..(318): Selenocysteine
  MOD_RES (320)..(322): Selenocysteine
  MOD_RES (328)..(328): Selenocysteine
  MOD_RES (331)..(331): Selenocysteine
  MOD_RES (336)..(337): Selenocysteine
  MOD_RES (343)..(344): Selenocysteine
  MOD_RES (351)..(352): Selenocysteine
  MOD_RES (355)..(356): Selenocysteine
  MOD_RES (366)..(366): Selenocysteine
  MOD_RES (382)..(382): Selenocysteine
  MOD_RES (429)..(429): Selenocysteine
  MOD_RES (441)..(441): Selenocysteine
MXVARPSVPAALPLLGELPRLLLLVLLCLPAVWGDCGLPPDVPNAQPALEGRXSFPEDXVIXYKCEESFVKIPGEKDSVICLKGSQWSDIEEFCNRSCEVPXRLNSASLKQPYIXQNYFPVGXVVEYECRPGYRREPSLSPKLXCLQNLKWSXAVEFCKKKSCPNPGEIRNGQIDVPGGILFGAXISFSCNXGYKLFGSXSSFCLISGSSVQWSDPLPECREIYCPAPPQIDNGIIQGERDHYGYRQSVXYACNKGFXMIGEHSIYCXVNNDEGEWSGPPPECRGKSLXSKVPPXVQKPXXVNVPXXEVSPXSQKXXXKXXXPNAQAXRSXPVSRXXKHFHEXXPNKGSGXXSGXXRLLSGSRPVXQAGMRWCDRSSLQSRXPGFKRSFHFSLPSSWYYRCVPRHPAKFLKFIFCRDRIFLCCPGWFQXPGRKRFFRPPKXLRL

SEQ ID NO: 5523 - protein, 550 aa, Homo sapiens
  MOD_RES (2)..(2): Selenocysteine
  MOD_RES (53)..(53): Selenocysteine
  MOD_RES (59)..(59): Selenocysteine
  MOD_RES (62)..(62): Selenocysteine
  MOD_RES (102)..(102): Selenocysteine
  MOD_RES (115)..(115): Selenocysteine
  MOD_RES (123)..(123): Selenocysteine
  MOD_RES (144)..(144): Selenocysteine
  MOD_RES (153)..(153): Selenocysteine
  MOD_RES (185)..(185): Selenocysteine
  MOD_RES (192)..(192): Selenocysteine
  MOD_RES (200)..(200): Selenocysteine
  MOD_RES (250)..(250): Selenocysteine
  MOD_RES (258)..(258): Selenocysteine
  MOD_RES (268)..(268): Selenocysteine
  MOD_RES (289)..(289): Selenocysteine
  MOD_RES (295)..(295): Selenocysteine
  MOD_RES (300)..(301): Selenocysteine
  MOD_RES (306)..(307): Selenocysteine
  MOD_RES (312)..(312): Selenocysteine
  MOD_RES (316)..(318): Selenocysteine
  MOD_RES (320)..(322): Selenocysteine
  MOD_RES (328)..(328): Selenocysteine
  MOD_RES (330)..(330): Selenocysteine
  MOD_RES (338)..(339): Selenocysteine
  MOD_RES (345)..(345): Selenocysteine
  MOD_RES (347)..(347): Selenocysteine
  MOD_RES (350)..(350): Selenocysteine
  MOD_RES (355)..(356): Selenocysteine
  MOD_RES (362)..(362): Selenocysteine
  MOD_RES (365)..(365): Selenocysteine
  MOD_RES (367)..(367): Selenocysteine
  MOD_RES (371)..(372): Selenocysteine
  MOD_RES (378)..(378): Selenocysteine
  MOD_RES (383)..(383): Selenocysteine
  MOD_RES (388)..(388): Selenocysteine
  MOD_RES (395)..(395): Selenocysteine
  MOD_RES (397)..(397): Selenocysteine
  MOD_RES (400)..(400): Selenocysteine
  MOD_RES (405)..(405): Selenocysteine
  MOD_RES (412)..(412): Selenocysteine
  MOD_RES (420)..(420): Selenocysteine
  MOD_RES (426)..(426): Selenocysteine
  MOD_RES (429)..(429): Selenocysteine
  MOD_RES (431)..(431): Selenocysteine
  MOD_RES (441)..(441): Selenocysteine
  MOD_RES (446)..(446): Selenocysteine
  MOD_RES (449)..(449): Selenocysteine
  MOD_RES (451)..(451): Selenocysteine
  MOD_RES (456)..(457): Selenocysteine
  MOD_RES (463)..(463): Selenocysteine
  MOD_RES (473)..(473): Selenocysteine
  MOD_RES (480)..(480): Selenocysteine
  MOD_RES (486)..(486): Selenocysteine
  MOD_RES (495)..(495): Selenocysteine
  MOD_RES (497)..(497): Selenocysteine
  MOD_RES (500)..(500): Selenocysteine
  MOD_RES (505)..(506): Selenocysteine
  MOD_RES (512)..(513): Selenocysteine
  MOD_RES (520)..(521): Selenocysteine
  MOD_RES (524)..(525): Selenocysteine
  MOD_RES (532)..(532): Selenocysteine
  MOD_RES (535)..(535): Selenocysteine
  MOD_RES (537)..(537): Selenocysteine
  MOD_RES (542)..(542): Selenocysteine
  MOD_RES (545)..(545): Selenocysteine
  MOD_RES (550)..(550): Selenocysteine
MXVARPSVPAALPLLGELPRLLLLVLLCLPAVWGDCGLPPDVPNAQPALEGRXSFPEDXVIXYKCEESFVKIPGEKDSVICLKGSQWSDIEEFCNRSCEVPXRLNSASLKQPYIXQNYFPVGXVVEYECRPGYRREPSLSPKLXCLQNLKWSXAVEFCKKKSCPNPGEIRNGQIDVPGGILFGAXISFSCNXGYKLFGSXSSFCLISGSSVQWSDPLPECREIYCPAPPQIDNGIIQGERDHYGYRQSVXYACNKGFXMIGEHSIYCXVNNDEGEWSGPPPECRGKSLXSKVPPXVQKPXXVNVPXXEVSPXSQKXXXKXXXPNAQGXEXPSVLQKHXXENVSAXRXPPXPQKPXXVNVPAXIVXPXPKPXXINVPAXGVSSXPQRHXIVNVSAXGXLPXLQKPXRANDSAXKSPAAAQXSFISKXLSXKXPSAAQNPMMXNASAXQAXLXAQKFXXAKVAFXQSPSAARKSXNVHSPVXNGLKSXQRFPSAHIXAXRSXPVSRXXKHFHEXXPNKGSGXXSGXXRLLSGHXCFXLXGLLGXLVXMGLLX

SEQ ID NO: 5524 - protein, 326 aa, Homo sapiens
  MOD_RES (1)..(1): Any amino acid
  MOD_RES (33)..(33): Selenocysteine
  MOD_RES (37)..(37): Selenocysteine
  MOD_RES (63)..(63): Selenocysteine
  MOD_RES (69)..(69): Selenocysteine
  MOD_RES (72)..(72): Selenocysteine
  MOD_RES (112)..(112): Selenocysteine
  MOD_RES (125)..(125): Selenocysteine
  MOD_RES (133)..(133): Selenocysteine
  MOD_RES (154)..(154): Selenocysteine
  MOD_RES (163)..(163): Selenocysteine
  MOD_RES (195)..(195): Selenocysteine
  MOD_RES (202)..(202): Selenocysteine
  MOD_RES (210)..(210): Selenocysteine
  MOD_RES (260)..(260): Selenocysteine
  MOD_RES (268)..(268): Selenocysteine
  MOD_RES (278)..(278): Selenocysteine
  MOD_RES (299)..(299): Selenocysteine
  MOD_RES (305)..(305): Selenocysteine
  MOD_RES (310)..(311): Selenocysteine
  MOD_RES (316)..(317): Selenocysteine
  MOD_RES (322)..(322): Selenocysteine
  MOD_RES (326)..(326): Selenocysteine
XAALPLLGELPRLLLLVLLCLPAVWESSRVEHXMLQXCMSSLSGDCGLPPDVPNAQPALEGRXSFPEDXVIXYKCEESFVKIPGEKDSVICLKGSQWSDIEEFCNRSCEVPXRLNSASLKQPYIXQNYFPVGXVVEYECRPGYRREPSLSPKLXCLQNLKWSXAVEFCKKKSCPNPGEIRNGQIDVPGGILFGAXISFSCNXGYKLFGSXSSFCLISGSSVQWSDPLPECREIYCPAPPQIDNGIIQGERDHYGYRQSVXYACNKGFXMIGEHSIYCXVNNDEGEWSGPPPECRGKSLXSKVPPXVQKPXXVNVPXXEVSPXSQKX

SEQ ID NO: 5525 - protein, 119 aa, Homo sapiens
  MOD_RES (35)..(35): Selenocysteine
  MOD_RES (40)..(40): Selenocysteine
  MOD_RES (54)..(54): Selenocysteine
  MOD_RES (103)..(103): Selenocysteine
  MOD_RES (114)..(115): Selenocysteine
MGIQGGSVLFGLLLVLAVFCHSGHSLQCYNCPNPXADCKXAVNCSSDFDACLIXKAELGYHYVAQAGRRQSSHFSLLKCWDYRCEPSHWPHCPYFNWGYKCIXSVGSLSIAISXXSQPA

SEQ ID NO: 5526 - protein, 130 aa, Homo sapiens
  MOD_RES (35)..(35): Selenocysteine
  MOD_RES (40)..(40): Selenocysteine
  MOD_RES (54)..(54): Selenocysteine
  MOD_RES (76)..(77): Selenocysteine
  MOD_RES (85)..(85): Selenocysteine
  MOD_RES (104)..(104): Selenocysteine
  MOD_RES (119)..(119): Selenocysteine
MGIQGGSVLFGLLLVLAVFCHSGHSLQCYNCPNPXADCKXAVNCSSDFDACLIXKAGLQVYNKCWKFEHCNFNDVXXRLRENELXYYCCKKDLCNFNEQLENDXFLKALKDEKLQGLKXKQPGKKSASLS

SEQ ID NO: 5527 - protein, 128 aa, Homo sapiens
  MOD_RES (35)..(35): Selenocysteine
  MOD_RES (40)..(40): Selenocysteine
  MOD_RES (54)..(54): Selenocysteine
  MOD_RES (76)..(77): Selenocysteine
  MOD_RES (85)..(85): Selenocysteine
  MOD_RES (105)..(105): Selenocysteine
  MOD_RES (111)..(111): Selenocysteine
  MOD_RES (117)..(117): Selenocysteine
MGIQGGSVLFGLLLVLAVFCHSGHSLQCYNCPNPXADCKXAVNCSSDFDACLIXKAGLQVYNKCWKFEHCNFNDVXXRLRENELXYYCCKKDLCNFNEQLENGGXSLSEKXVLLLVXPFLAAAWSLHP

SEQ ID NO: 5528 - protein, 108 aa, Homo sapiens
  MOD_RES (35)..(35): Selenocysteine
  MOD_RES (40)..(40): Selenocysteine
  MOD_RES (54)..(54): Selenocysteine
  MOD_RES (76)..(77): Selenocysteine
  MOD_RES (85)..(85): Selenocysteine
MGIQGGSVLFGLLLVLAVFCHSGHSLQCYNCPNPXADCKXAVNCSSDFDACLIXKAGLQVYNKCWKFEHCNFNDVXXRLRENELXYYCCKKDLCNFNEQLENGSEPGA

SEQ ID NO: 5529 - protein, 52 aa, Homo sapiens
  MOD_RES (1)..(1): Any amino acid
  MOD_RES (9)..(9): Selenocysteine
  MOD_RES (29)..(29): Selenocysteine
  MOD_RES (35)..(35): Selenocysteine
  MOD_RES (41)..(41): Selenocysteine
XRLRENELXYYCCKKDLCNFNEQLENGGXSLSEKXVLLLVXPFLAAAWSLHP

SEQ ID NO: 5530 - protein, 38 aa, Homo sapiens
  MOD_RES (8)..(8): Selenocysteine
  MOD_RES (12)..(12): Selenocysteine
  MOD_RES (19)..(19): Selenocysteine
MWLFFGIXGLLXAALSGCXVAKWIQLLGEICCFAGMGF

SEQ ID NO: 5531 - protein, 278 aa, Homo sapiens
  MOD_RES (8)..(8): Selenocysteine
  MOD_RES (12)..(12): Selenocysteine
  MOD_RES (29)..(29): Selenocysteine
  MOD_RES (48)..(48): Selenocysteine
  MOD_RES (57)..(57): Selenocysteine
  MOD_RES (101)..(101): Selenocysteine
  MOD_RES (113)..(113): Selenocysteine
  MOD_RES (120)..(120): Selenocysteine
  MOD_RES (154)..(154): Selenocysteine
  MOD_RES (189)..(189): Selenocysteine
  MOD_RES (217)..(217): Selenocysteine
  MOD_RES (265)..(265): Selenocysteine
MWLFFGIXGLLXAALSGHPSPAPPDQLNXSSAESELWEPGERLPVRLXNGSSSCSGXVEVRLEASWEPACGALWDSRAAEAVCRALGCGGAEAASQLAPPXPELPPPPAAGNXSVAANAXLAGAPALLCSGAEWRLCEVVEHACRSDGRRARVXCAENRALRLVDGGGACAGRVEMLEHGEWGSVCDDXWDLEDAHVVCRQLGCGWAVQALPGLHFXPGRGPIHRDQVNCSGAEAYLWDCPGLPGQHYCGHKEDAGAVCSESSVXVKIENKESRELML

SEQ ID NO: 5532 - protein, 422 aa, Homo sapiens
  MOD_RES (8)..(8): Selenocysteine
  MOD_RES (12)..(12): Selenocysteine
  MOD_RES (29)..(29): Selenocysteine
  MOD_RES (48)..(48): Selenocysteine
  MOD_RES (57)..(57): Selenocysteine
  MOD_RES (101)..(101): Selenocysteine
  MOD_RES (113)..(113): Selenocysteine
  MOD_RES (120)..(120): Selenocysteine
  MOD_RES (154)..(154): Selenocysteine
  MOD_RES (189)..(189): Selenocysteine
  MOD_RES (217)..(217): Selenocysteine
  MOD_RES (270)..(270): Selenocysteine
  MOD_RES (279)..(279): Selenocysteine
  MOD_RES (281)..(281): Selenocysteine
  MOD_RES (287)..(287): Selenocysteine
  MOD_RES (367)..(368): Selenocysteine
  MOD_RES (378)..(378): Selenocysteine
  MOD_RES (406)..(406): Selenocysteine
  MOD_RES (414)..(414): Selenocysteine
MWLFFGIXGLLXAALSGHPSPAPPDQLNXSSAESELWEPGERLPVRLXNGSSSCSGXVEVRLEASWEPACGALWDSRAAEAVCRALGCGGAEAASQLAPPXPELPPPPAAGNXSVAANAXLAGAPALLCSGAEWRLCEVVEHACRSDGRRARVXCAENRALRLVDGGGACAGRVEMLEHGEWGSVCDDXWDLEDAHVVCRQLGCGWAVQALPGLHFXPGRGPIHRDQVNCSGAEAYLWDCPGLPGQHYCGHKEDAGAVCSASRSLHNLSXPEVPASVQXVXIESSVXVKIENKESRELMLLIPSIVLGILLLGSLIFIAFILLRIKGKYVFMLPIQVQAPPPEDSDSGSDSDYEHYDFSAQPPVALXXFYNSQRHRVXDEEVQQSRFQMPPLEEGLEELHASHIPXANPGHCIXDPPSLGPQ

SEQ ID NO: 5533 - protein, 468 aa, Homo sapiens
  MOD_RES (8)..(8): Selenocysteine
  MOD_RES (12)..(12): Selenocysteine
  MOD_RES (29)..(29): Selenocysteine
  MOD_RES (48)..(48): Selenocysteine
  MOD_RES (57)..(57): Selenocysteine
  MOD_RES (101)..(101): Selenocysteine
  MOD_RES (113)..(113): Selenocysteine
  MOD_RES (120)..(120): Selenocysteine
  MOD_RES (154)..(154): Selenocysteine
  MOD_RES (189)..(189): Selenocysteine
  MOD_RES (217)..(217): Selenocysteine
  MOD_RES (268)..(268): Selenocysteine
  MOD_RES (288)..(288): Selenocysteine
  MOD_RES (310)..(310): Selenocysteine
  MOD_RES (336)..(336): Selenocysteine
  MOD_RES (371)..(371): Selenocysteine
  MOD_RES (380)..(380): Selenocysteine
  MOD_RES (382)..(382): Selenocysteine
  MOD_RES (388)..(388): Selenocysteine
  MOD_RES (443)..(444): Selenocysteine
  MOD_RES (458)..(458): Selenocysteine
MWLFFGIXGLLXAALSGHPSPAPPDQLNXSSAESELWEPGERLPVRLXNGSSSCSGXVEVRLEASWEPACGALWDSRAAEAVCRALGCGGAEAASQLAPPXPELPPPPAAGNXSVAANAXLAGAPALLCSGAEWRLCEVVEHACRSDGRRARVXCAENRALRLVDGGGACAGRVEMLEHGEWGSVCDDXWDLEDAHVVCRQLGCGWAVQALPGLHFXPGRGPIHRDQVNCSGAEAYLWDCPGLPGQHYCGHKEDAGAVCSEHQSWRLXGGADRCEGQVEVHFRGVWNXVCDSEWYPSEAKVLCQSLGCGXAVERPKGLPHSLSGRMYYSCNGEELXLSNCSWRFNNSNLCSQSLAARVLCSASRSLHNLSXPEVPASVQXVXIESSVXVKIENKESRELMLLIPSIVLGILLLGSLIFIAFILLRIKGKYALPVMVNHQHLPXXIPAGSNSYQPVPIXIPKEGPGPAP

SEQ ID NO: 5534 - protein, 592 aa, Homo sapiens
  MOD_RES (8)..(8): Selenocysteine
  MOD_RES (12)..(12): Selenocysteine
  MOD_RES (29)..(29): Selenocysteine
  MOD_RES (48)..(48): Selenocysteine
  MOD_RES (57)..(57): Selenocysteine
  MOD_RES (101)..(101): Selenocysteine
  MOD_RES (113)..(113): Selenocysteine
  MOD_RES (120)..(120): Selenocysteine
  MOD_RES (154)..(154): Selenocysteine
  MOD_RES (189)..(189): Selenocysteine
  MOD_RES (217)..(217): Selenocysteine
  MOD_RES (268)..(268): Selenocysteine
  MOD_RES (288)..(288): Selenocysteine
  MOD_RES (310)..(310): Selenocysteine
  MOD_RES (336)..(336): Selenocysteine
  MOD_RES (371)..(371): Selenocysteine
  MOD_RES (380)..(380): Selenocysteine
  MOD_RES (382)..(382): Selenocysteine
  MOD_RES (388)..(388): Selenocysteine
  MOD_RES (443)..(444): Selenocysteine
  MOD_RES (458)..(458): Selenocysteine
  MOD_RES (470)..(470): Selenocysteine
  MOD_RES (498)..(498): Selenocysteine
  MOD_RES (506)..(506): Selenocysteine
  MOD_RES (525)..(525): Selenocysteine
  MOD_RES (566)..(566): Selenocysteine
  MOD_RES (581)..(581): Selenocysteine
MWLFFGIXGLLXAALSGHPSPAPPDQLNXSSAESELWEPGERLPVRLXNGSSSCSGXVEVRLEASWEPACGALWDSRAAEAVCRALGCGGAEAASQLAPPXPELPPPPAAGNXSVAANAXLAGAPALLCSGAEWRLCEVVEHACRSDGRRARVXCAENRALRLVDGGGACAGRVEMLEHGEWGSVCDDXWDLEDAHVVCRQLGCGWAVQALPGLHFXPGRGPIHRDQVNCSGAEAYLWDCPGLPGQHYCGHKEDAGAVCSEHQSWRLXGGADRCEGQVEVHFRGVWNXVCDSEWYPSEAKVLCQSLGCGXAVERPKGLPHSLSGRMYYSCNGEELXLSNCSWRFNNSNLCSQSLAARVLCSASRSLHNLSXPEVPASVQXVXIESSVXVKIENKESRELMLLIPSIVLGILLLGSLIFIAFILLRIKGKYALPVMVNHQHLPXXIPAGSNSYQPVPIXIPKEDSQRHRVXDEEVQQSRFQMPPLEEGLEELHASHIPXANPGHCIXDPPSLGPQYHPRSNSESSXSSGEDYCNSPKSKLPPWNPQVFSSERSSFLEQPPNLELAGXQPAFSGSPSPQPDSXDNDDYDDISAA

SEQ ID NO: 5535 - protein, 601 aa, Homo sapiens
  MOD_RES (8)..(8): Selenocysteine
  MOD_RES (12)..(12): Selenocysteine
  MOD_RES (29)..(29): Selenocysteine
  MOD_RES (48)..(48): Selenocysteine
  MOD_RES (57)..(57): Selenocysteine
  MOD_RES (101)..(101): Selenocysteine
  MOD_RES (113)..(113): Selenocysteine
  MOD_RES (120)..(120): Selenocysteine
  MOD_RES (154)..(154): Selenocysteine
  MOD_RES (189)..(189): Selenocysteine
  MOD_RES (217)..(217): Selenocysteine
  MOD_RES (268)..(268): Selenocysteine
  MOD_RES (288)..(288): Selenocysteine
  MOD_RES (310)..(310): Selenocysteine
  MOD_RES (336)..(336): Selenocysteine
  MOD_RES (371)..(371): Selenocysteine
  MOD_RES (380)..(380): Selenocysteine
  MOD_RES (382)..(382): Selenocysteine
  MOD_RES (388)..(388): Selenocysteine
  MOD_RES (468)..(469): Selenocysteine
  MOD_RES (479)..(479): Selenocysteine
  MOD_RES (507)..(507): Selenocysteine
  MOD_RES (515)..(515): Selenocysteine
  MOD_RES (534)..(534): Selenocysteine
  MOD_RES (575)..(575): Selenocysteine
  MOD_RES (590)..(590): Selenocysteine
MWLFFGIXGLLXAALSGHPSPAPPDQLNXSSAESELWEPGERLPVRLXNGSSSCSGXVEVRLEASWEPACGALWDSRAAEAVCRALGCGGAEAASQLAPPXPELPPPPAAGNXSVAANAXLAGAPALLCSGAEWRLCEVVEHACRSDGRRARVXCAENRALRLVDGGGACAGRVEMLEHGEWGSVCDDXWDLEDAHVVCRQLGCGWAVQALPGLHFXPGRGPIHRDQVNCSGAEAYLWDCPGLPGQHYCGHKEDAGAVCSEHQSWRLXGGADRCEGQVEVHFRGVWNXVCDSEWYPSEAKVLCQSLGCGXAVERPKGLPHSLSGRMYYSCNGEELXLSNCSWRFNNSNLCSQSLAARVLCSASRSLHNLSXPEVPASVQXVXIESSVXVKIENKESRELMLLIPSIVLGILLLGSLIFIAFILLRIKGKYVFMLPIQVQAPPPEDSDSGSDSDYEHYDFSAQPPVALXXFYNSQRHRVXDEEVQQSRFQMPPLEEGLEELHASHIPXANPGHCIXDPPSLGPQYHPRSNSESSXSSGEDYCNSPKSKLPPWNPQVFSSERSSFLEQPPNLELAGXQPAFSGSPSPQPDSXDNDDYDDISAA

SEQ ID NO: 5536 - protein, 668 aa, Homo sapiens
  MOD_RES (8)..(8): Selenocysteine
  MOD_RES (12)..(12): Selenocysteine
  MOD_RES (29)..(29): Selenocysteine
  MOD_RES (48)..(48): Selenocysteine
  MOD_RES (57)..(57): Selenocysteine
  MOD_RES (101)..(101): Selenocysteine
  MOD_RES (113)..(113): Selenocysteine
  MOD_RES (120)..(120): Selenocysteine
  MOD_RES (154)..(154): Selenocysteine
  MOD_RES (189)..(189): Selenocysteine
  MOD_RES (217)..(217): Selenocysteine
  MOD_RES (268)..(268): Selenocysteine
  MOD_RES (288)..(288): Selenocysteine
  MOD_RES (310)..(310): Selenocysteine
  MOD_RES (336)..(336): Selenocysteine
  MOD_RES (371)..(371): Selenocysteine
  MOD_RES (380)..(380): Selenocysteine
  MOD_RES (382)..(382): Selenocysteine
  MOD_RES (388)..(388): Selenocysteine
  MOD_RES (443)..(444): Selenocysteine
  MOD_RES (458)..(458): Selenocysteine
  MOD_RES (500)..(501): Selenocysteine
  MOD_RES (511)..(511): Selenocysteine
  MOD_RES (539)..(539): Selenocysteine
  MOD_RES (547)..(547): Selenocysteine
  MOD_RES (566)..(566): Selenocysteine
  MOD_RES (607)..(607): Selenocysteine
  MOD_RES (623)..(623): Selenocysteine
  MOD_RES (657)..(657): Selenocysteine
MWLFFGIXGLLXAALSGHPSPAPPDQLNXSSAESELWEPGERLPVRLXNGSSSCSGXVEVRLEASWEPACGALWDSRAAEAVCRALGCGGAEAASQLAPPXPELPPPPAAGNXSVAANAXLAGAPALLCSGAEWRLCEVVEHACRSDGRRARVXCAENRALRLVDGGGACAGRVEMLEHGEWGSVCDDXWDLEDAHVVCRQLGCGWAVQALPGLHFXPGRGPIHRDQVNCSGAEAYLWDCPGLPGQHYCGHKEDAGAVCSEHQSWRLXGGADRCEGQVEVHFRGVWNXVCDSEWYPSEAKVLCQSLGCGXAVERPKGLPHSLSGRMYYSCNGEELXLSNCSWRFNNSNLCSQSLAARVLCSASRSLHNLSXPEVPASVQXVXIESSVXVKIENKESRELMLLIPSIVLGILLLGSLIFIAFILLRIKGKYALPVMVNHQHLPXXIPAGSNSYQPVPIXIPKEVFMLPIQVQAPPPEDSDSGSDSDYEHYDFSAQPPVALXXFYNSQRHRVXDEEVQQSRFQMPPLEEGLEELHASHIPXANPGHCIXDPPSLGPQYHPRSNSESSXSSGEDYCNSPKSKLPPWNPQVFSSERSSFLEQPPNLELAGXQPAFSAGPPADDSSSXSSGEWYQNFQPPPQPPSEEQFGCPGSPSPQPDSXDNDDYDDISAA

SEQ ID NO: 5537 - protein, 186 aa, Homo sapiens
  MOD_RES (1)..(1): Any amino acid
  MOD_RES (33)..(33): Selenocysteine
  MOD_RES (61)..(61): Selenocysteine
  MOD_RES (114)..(114): Selenocysteine
  MOD_RES (123)..(123): Selenocysteine
  MOD_RES (125)..(125): Selenocysteine
  MOD_RES (131)..(131): Selenocysteine
  MOD_RES (186)..(186): Selenocysteine
XNRALRLVDGGGACAGRVEMLEHGEWGSVCDDXWDLEDAHVVCRQLGCGWAVQALPGLHFXPGRGPIHRDQVNCSGAEAYLWDCPGLPGQHYCGHKEDAGAVCSASRSLHNLSXPEVPASVQXVXIESSVXVKIENKESRELMLLIPSIVLGILLLGSLIFIAFILLRIKGKYALPVMVNHQHLPX

SEQ ID NO: 5538 - protein, 133 aa, Homo sapiens
  MOD_RES (42)..(42): Selenocysteine
  MOD_RES (48)..(48): Selenocysteine
  MOD_RES (85)..(85): Selenocysteine
  MOD_RES (132)..(132): Selenocysteine
MAVEGGMKCVKFLLYVLLLAFCACAVGLIAVGVGAQLVLSQXIIQGAXPGSLLPVVIIAVGVFLFLVAFVGCCGACKENYCLMIXFAIFLSLIMLVEVAAAIAGYVFRDKVMSEFNNNFRQQMENYPKNNHXA

SEQ ID NO: 5539 - protein, 215 aa, Homo sapiens
  MOD_RES (42)..(42): Selenocysteine
  MOD_RES (48)..(48): Selenocysteine
  MOD_RES (85)..(85): Selenocysteine
  MOD_RES (132)..(132): Selenocysteine
  MOD_RES (152)..(152): Selenocysteine
  MOD_RES (174)..(174): Selenocysteine
MAVEGGMKCVKFLLYVLLLAFCACAVGLIAVGVGAQLVLSQXIIQGAXPGSLLPVVIIAVGVFLFLVAFVGCCGACKENYCLMIXFAIFLSLIMLVEVAAAIAGYVFRDKVMSEFNNNFRQQMENYPKNNHXASILDRMQADFKCCGAANYXDWEKIPSMSKNRVPDSCCINVXVGCGINFNEKAIHKEGCVEKIGGWLRKNVLVVAAAALGIAF

SEQ ID NO: 5540 - protein, 217 aa, Homo sapiens
  MOD_RES (42)..(42): Selenocysteine
  MOD_RES (48)..(48): Selenocysteine
  MOD_RES (85)..(85): Selenocysteine
  MOD_RES (132)..(132): Selenocysteine
  MOD_RES (152)..(152): Selenocysteine
  MOD_RES (174)..(174): Selenocysteine
MAVEGGMKCVKFLLYVLLLAFCACAVGLIAVGVGAQLVLSQXIIQGAXPGSLLPVVIIAVGVFLFLVAFVGCCGACKENYCLMIXFAIFLSLIMLVEVAAAIAGYVFRDKVMSEFNNNFRQQMENYPKNNHXASILDRMQADFKCCGAANYXDWEKIPSMSKNRVPDSCCINVXVGCGINFNEKAIHKEGCVEKIGGWLRKNVLVVAAAALGIAFVE

SEQ ID NO: 5541 - protein, 238 aa, Homo sapiens
  MOD_RES (42)..(42): Selenocysteine
  MOD_RES (48)..(48): Selenocysteine
  MOD_RES (85)..(85): Selenocysteine
  MOD_RES (132)..(132): Selenocysteine
  MOD_RES (152)..(152): Selenocysteine
  MOD_RES (174)..(174): Selenocysteine
MAVEGGMKCVKFLLYVLLLAFCACAVGLIAVGVGAQLVLSQXIIQGAXPGSLLPVVIIAVGVFLFLVAFVGCCGACKENYCLMIXFAIFLSLIMLVEVAAAIAGYVFRDKVMSEFNNNFRQQMENYPKNNHXASILDRMQADFKCCGAANYXDWEKIPSMSKNRVPDSCCINVXVGCGINFNEKAIHKEGCVEKIGGWLRKNVLVVAAAALGIAFVEVLGIVFACCLVKSIRSGYEVM

SEQ ID NO: 5542 - protein, 110 aa, Homo sapiens
  MOD_RES (42)..(42): Selenocysteine
  MOD_RES (48)..(48): Selenocysteine
  MOD_RES (85)..(85): Selenocysteine
MAVEGGMKCVKFLLYVLLLAFCACAVGLIAVGVGAQLVLSQXIIQGAXPGSLLPVVIIAVGVFLFLVAFVGCCGACKENYCLMIXLPSFCLLSCWWRWPQPLLAMCLEIR

SEQ ID NO: 5543 - protein, 215 aa, Homo sapiens
  MOD_RES (25)..(25): Selenocysteine
  MOD_RES (62)..(62): Selenocysteine
  MOD_RES (109)..(109): Selenocysteine
  MOD_RES (129)..(129): Selenocysteine
  MOD_RES (151)..(151): Selenocysteine
MAVEGGMKCVKFLLYVLLLAFCGAXPGSLLPVVIIAVGVFLFLVAFVGCCGACKENYCLMIXFAIFLSLIMLVEVAAAIAGYVFRDKVMSEFNNNFRQQMENYPKNNHXASILDRMQADFKCCGAANYXDWEKIPSMSKNRVPDSCCINVXVGCGINFNEKAIHKEGCVEKIGGWLRKNVLVVAAAALGIAFVEVLGIVFACCLVKSIRSGYEVM

SEQ ID NO: 5544 - protein, 156 aa, Homo sapiens
  MOD_RES (3)..(3): Selenocysteine
  MOD_RES (50)..(50): Selenocysteine
  MOD_RES (70)..(70): Selenocysteine
  MOD_RES (92)..(92): Selenocysteine
MIXFAIFLSLIMLVEVAAAIAGYVFRDKVMSEFNNNFRQQMENYPKNNHXASILDRMQADFKCCGAANYXDWEKIPSMSKNRVPDSCCINVXVGCGINFNEKAIHKEGCVEKIGGWLRKNVLVVAAAALGIAFVEVLGIVFACCLVKSIRSGYEVM

SEQ ID NO: 5545 - protein, 145 aa, Homo sapiens
  MOD_RES (39)..(39): Selenocysteine
  MOD_RES (59)..(59): Selenocysteine
  MOD_RES (81)..(81): Selenocysteine
MLVEVAAAIAGYVFRDKVMSEFNNNFRQQMENYPKNNHXASILDRMQADFKCCGAANYXDWEKIPSMSKNRVPDSCCINVXVGCGINFNEKAIHKEGCVEKIGGWLRKNVLVVAAAALGIAFVEVLGIVFACCLVKSIRSGYEVM

SEQ ID NO: 5546 - protein, 164 aa, Homo sapiens
  MOD_RES (25)..(25): Selenocysteine
  MOD_RES (31)..(31): Selenocysteine
  MOD_RES (52)..(52): Selenocysteine
  MOD_RES (73)..(73): Selenocysteine
  MOD_RES (101)..(101): Selenocysteine
  MOD_RES (107)..(107): Selenocysteine
  MOD_RES (119)..(119): Selenocysteine
MSSENCFVAENSSLHPESGQENDAXSPHFSXRHEGSFQVPVLCAVMNVVFIXILIIALIALSVGQYNCPGQYXFSMPSDSHVSSCSEDWVGYQRKCYFISXVKRSWXSAQNACSEHGAXLAVIDSEKDMNFLKRYAGREEHWVGLKKEPGHPWKWSNGKEFNNW

SEQ ID NO: 5547 - protein, 199 aa, Homo sapiens
  MOD_RES (25)..(25): Selenocysteine
  MOD_RES (31)..(31): Selenocysteine
  MOD_RES (52)..(52): Selenocysteine
  MOD_RES (73)..(73): Selenocysteine
  MOD_RES (101)..(101): Selenocysteine
  MOD_RES (107)..(107): Selenocysteine
  MOD_RES (119)..(119): Selenocysteine
  MOD_RES (168)..(168): Selenocysteine
  MOD_RES (179)..(179): Selenocysteine
MSSENCFVAENSSLHPESGQENDAXSPHFSXRHEGSFQVPVLCAVMNVVFIXILIIALIALSVGQYNCPGQYXFSMPSDSHVSSCSEDWVGYQRKCYFISXVKRSWXSAQNACSEHGAXLAVIDSEKDMNFLKRYAGREEHWVGLKKEPGHPWKWSNGKEFNNWFNVXGSDKCVFLKNXEVSSMECEKNLYWICNKPYK

SEQ ID NO: 5548 - protein, 35 aa, Homo sapiens
  MOD_RES (35)..(35): Selenocysteine
MAGPPRLLLLPLLLALARGLPGALAAQAGACVGSX

SEQ ID NO: 5549 - protein, 240 aa, Homo sapiens
  MOD_RES (36)..(37): Selenocysteine
  MOD_RES (47)..(47): Selenocysteine
  MOD_RES (50)..(50): Selenocysteine
  MOD_RES (79)..(80): Selenocysteine
  MOD_RES (98)..(98): Selenocysteine
  MOD_RES (100)..(100): Selenocysteine
  MOD_RES (109)..(109): Selenocysteine
  MOD_RES (111)..(111): Selenocysteine
  MOD_RES (113)..(113): Selenocysteine
  MOD_RES (118)..(118): Selenocysteine
  MOD_RES (127)..(127): Selenocysteine
  MOD_RES (132)..(132): Selenocysteine
  MOD_RES (157)..(157): Selenocysteine
  MOD_RES (166)..(166): Selenocysteine
  MOD_RES (203)..(203): Selenocysteine
  MOD_RES (232)..(232): Selenocysteine
MAGPPRLLLLPLLLALARGLPGALAAQEVQQSPHCXXVPVGASVNIXCSXSGGLRGIYLRQLGPQPQDIIYYEDGVVPXXDRRFRGRIDFSGSQDNLXIXMHRLQLSDXGXYXCQAIXEVNVYGSGXLVLVXEEQSQGWHRCSDAPPRASALPAPPXGSALPDPQXASALPDPPAASALPAALAVISFLLGLGLGVACVLARXQIKKLCSWRDKNSAACVVYEDMSHSRCNXLSSPNQYQ

SEQ ID NO: 5550 - protein, 221 aa, Homo sapiens
  MOD_RES (36)..(37): Selenocysteine
  MOD_RES (47)..(47): Selenocysteine
  MOD_RES (50)..(50): Selenocysteine
  MOD_RES (79)..(80): Selenocysteine
  MOD_RES (98)..(98): Selenocysteine
  MOD_RES (100)..(100): Selenocysteine
  MOD_RES (109)..(109): Selenocysteine
  MOD_RES (111)..(111): Selenocysteine
  MOD_RES (113)..(113): Selenocysteine
  MOD_RES (118)..(118): Selenocysteine
  MOD_RES (127)..(127): Selenocysteine
  MOD_RES (132)..(132): Selenocysteine
  MOD_RES (157)..(157): Selenocysteine
  MOD_RES (166)..(166): Selenocysteine
  MOD_RES (203)..(203): Selenocysteine
MAGPPRLLLLPLLLALARGLPGALAAQEVQQSPHCXXVPVGASVNIXCSXSGGLRGIYLRQLGPQPQDIIYYEDGVVPXXDRRFRGRIDFSGSQDNLXIXMHRLQLSDXGXYXCQAIXEVNVYGSGXLVLVXEEQSQGWHRCSDAPPRASALPAPPXGSALPDPQXASALPDPPAASALPAALAVISFLLGLGLGVACVLARXQVSVSPSCHLHPKDCSLS

SEQ ID NO: 5551 - protein, 160 aa, Homo sapiens
  MOD_RES (30)..(30): Selenocysteine
  MOD_RES (41)..(41): Selenocysteine
  MOD_RES (84)..(84): Selenocysteine
  MOD_RES (102)..(102): Selenocysteine
  MOD_RES (154)..(154): Selenocysteine
MAGPPRLLLLPLLLALARGLPGALAAQGRXFSVLLARLMVXAQVLPRGAAVSPLHDCPRGSLRQHHLLHQRGPAWDLPEAARAXAPRHHLLRGRGGAHYGQXVPGPHRLLRVPGQPDYHHAPPAAVGHWHLHLPGHHGGQCLRLRHPGPGDRGXVPRMAQ

SEQ ID NO: 5552 - protein, 140 aa, Homo sapiens
  MOD_RES (9)..(9): Selenocysteine
  MOD_RES (11)..(11): Selenocysteine
  MOD_RES (13)..(13): Selenocysteine
  MOD_RES (18)..(18): Selenocysteine
  MOD_RES (27)..(27): Selenocysteine
  MOD_RES (32)..(32): Selenocysteine
  MOD_RES (57)..(57): Selenocysteine
  MOD_RES (66)..(66): Selenocysteine
  MOD_RES (103)..(103): Selenocysteine
  MOD_RES (132)..(132): Selenocysteine
MHRLQLSDXGXYXCQAIXEVNVYGSGXLVLVXEEQSQGWHRCSDAPPRASALPAPPXGSALPDPQXASALPDPPAASALPAALAVISFLLGLGLGVACVLARXQIKKLCSWRDKNSAACVVYEDMSHSRCNXLSSPNQYQ

SEQ ID NO: 5553 - protein, 121 aa, Homo sapiens
  MOD_RES (9)..(9): Selenocysteine
  MOD_RES (11)..(11): Selenocysteine
  MOD_RES (13)..(13): Selenocysteine
  MOD_RES (18)..(18): Selenocysteine
  MOD_RES (27)..(27): Selenocysteine
  MOD_RES (32)..(32): Selenocysteine
  MOD_RES (57)..(57): Selenocysteine
  MOD_RES (66)..(66): Selenocysteine
  MOD_RES (103)..(103): Selenocysteine
MHRLQLSDXGXYXCQAIXEVNVYGSGXLVLVXEEQSQGWHRCSDAPPRASALPAPPXGSALPDPQXASALPDPPAASALPAALAVISFLLGLGLGVACVLARXQVSVSPSCHLHPKDCSLS

SEQ ID NO: 5554 - protein, 65 aa, Homo sapiens
  MOD_RES (65)..(65): Selenocysteine
MPEEGSGCSVRRRPYGCVLRAALVPLVAGLVICLVVCIQRFAQAQQQLPLESLGWDVAELQLNHX

SEQ ID NO: 5555 - protein, 193 aa, Homo sapiens
  MOD_RES (65)..(65): Selenocysteine
  MOD_RES (111)..(111): Selenocysteine
  MOD_RES (118)..(119): Selenocysteine
  MOD_RES (126)..(127): Selenocysteine
  MOD_RES (152)..(152): Selenocysteine
  MOD_RES (159)..(159): Selenocysteine
  MOD_RES (166)..(166): Selenocysteine
  MOD_RES (169)..(169): Selenocysteine
  MOD_RES (172)..(172): Selenocysteine
  MOD_RES (174)..(174): Selenocysteine
  MOD_RES (181)..(181): Selenocysteine
  MOD_RES (184)..(184): Selenocysteine
MPEEGSGCSVRRRPYGCVLRAALVPLVAGLVICLVVCIQRFAQAQQQLPLESLGWDVAELQLNHXGPQQDPRLYWQGGPALGRSFLHGPELDKGQLRIHRDGIYMVHIQVXLAICSSXXASRHHPXXLAVGICSPASRSISLLRLSFHQGCXIASQRLXPLARGDXLCXNLXGXLLPSRNXDEXFFGVQWVRP

SEQ ID NO: 5556 - protein, 208 aa, Homo sapiens
  MOD_RES (65)..(65): Selenocysteine
  MOD_RES (111)..(111): Selenocysteine
  MOD_RES (118)..(119): Selenocysteine
  MOD_RES (126)..(127): Selenocysteine
  MOD_RES (171)..(171): Selenocysteine
  MOD_RES (179)..(179): Selenocysteine
  MOD_RES (199)..(199): Selenocysteine
MPEEGSGCSVRRRPYGCVLRAALVPLVAGLVICLVVCIQRFAQAQQQLPLESLGWDVAELQLNHXGPQQDPRLYWQGGPALGRSFLHGPELDKGQLRIHRDGIYMVHIQVXLAICSSXXASRHHPXXLAVGICSPASRSISLLRLSFHQGLFGFWNWGLKVKCFLRHLIWXAHCFIPLXQLVFMQALQSWRNHHCSHFXDEENRGVNR

SEQ ID NO: 5557 - protein, 120 aa, Homo sapiens
  MOD_RES (6)..(6): Selenocysteine
  MOD_RES (38)..(38): Selenocysteine
  MOD_RES (71)..(71): Selenocysteine
  MOD_RES (78)..(78): Selenocysteine
MAEAIXYADLRFVKAPLKKSISSRLGQDPGADDDGEIXYENVQVPAVLGVPSSLASSVLGDKAAVKSEQPXASWRAVXSPAVGRILPCECACAGQPRGQVLAPVPAADGAGPRGVQLLPG

SEQ ID NO: 5558 - protein, 119 aa, Homo sapiens
  MOD_RES (6)..(6): Selenocysteine
  MOD_RES (38)..(38): Selenocysteine
  MOD_RES (71)..(71): Selenocysteine
  MOD_RES (78)..(78): Selenocysteine
  MOD_RES (90)..(91): Selenocysteine
  MOD_RES (103)..(103): Selenocysteine
  MOD_RES (110)..(110): Selenocysteine
MAEAIXYADLRFVKAPLKKSISSRLGQDPGADDDGEIXYENVQVPAVLGVPSSLASSVLGDKAAVKSEQPXASWRAVXSPAVGRILPCRXXCLRYLLLGLLLXCLLLGVXAICLGVRCE

SEQ ID NO: 5559 - protein, 359 aa, Homo sapiens
  MOD_RES (6)..(6): Selenocysteine
  MOD_RES (38)..(38): Selenocysteine
  MOD_RES (71)..(71): Selenocysteine
  MOD_RES (78)..(78): Selenocysteine
  MOD_RES (90)..(91): Selenocysteine
  MOD_RES (103)..(103): Selenocysteine
  MOD_RES (110)..(110): Selenocysteine
  MOD_RES (128)..(128): Selenocysteine
  MOD_RES (135)..(135): Selenocysteine
  MOD_RES (148)..(148): Selenocysteine
  MOD_RES (195)..(195): Selenocysteine
  MOD_RES (198)..(198): Selenocysteine
  MOD_RES (225)..(225): Selenocysteine
  MOD_RES (231)..(231): Selenocysteine
  MOD_RES (250)..(250): Selenocysteine
  MOD_RES (263)..(263): Selenocysteine
  MOD_RES (270)..(270): Selenocysteine
  MOD_RES (299)..(299): Selenocysteine
  MOD_RES (310)..(310): Selenocysteine
  MOD_RES (313)..(313): Selenocysteine
  MOD_RES (316)..(316): Selenocysteine
  MOD_RES (318)..(318): Selenocysteine
  MOD_RES (331)..(331): Selenocysteine
  MOD_RES (336)..(336): Selenocysteine
  MOD_RES (353)..(353): Selenocysteine
MAEAIXYADLRFVKAPLKKSISSRLGQDPGADDDGEIXYENVQVPAVLGVPSSLASSVLGDKAAVKSEQPXASWRAVXSPAVGRILPCRXXCLRYLLLGLLLXCLLLGVXAICLGVRYLQVSQQLQQXNRVLEVXNSSLRQQLRLKIXQLGQSAEDLQGSRRELAQSQEALQVEQRAHQAAEGQLQACQADRQKXKEXLQSEEQQRRALEQKLSNMENRLKPFFXCGSADXCCPSGWIMHQKSCFYISLXSKNWQESQKQCEXLSSKLAXFSEIYPQSHSYYFLNSLLPNGGSGNSYWXGLSSNKDWKLXDDXQRXRXYAQSSKCNKVHKXWSWWXLESESCRSSLPYICEMXAFRFPD

SEQ ID NO: 5560 - protein, 359 aa, Homo sapiens
  MOD_RES (3)..(3): Selenocysteine
  MOD_RES (38)..(38): Selenocysteine
  MOD_RES (71)..(71): Selenocysteine
  MOD_RES (78)..(78): Selenocysteine
  MOD_RES (90)..(91): Selenocysteine
  MOD_RES (103)..(103): Selenocysteine
  MOD_RES (110)..(110): Selenocysteine
  MOD_RES (128)..(128): Selenocysteine
  MOD_RES (135)..(135): Selenocysteine
  MOD_RES (148)..(148): Selenocysteine
  MOD_RES (195)..(195): Selenocysteine
  MOD_RES (198)..(198): Selenocysteine
  MOD_RES (225)..(225): Selenocysteine
  MOD_RES (231)..(231): Selenocysteine
  MOD_RES (250)..(250): Selenocysteine
  MOD_RES (263)..(263): Selenocysteine
  MOD_RES (270)..(270): Selenocysteine
  MOD_RES (299)..(299): Selenocysteine
  MOD_RES (310)..(310): Selenocysteine
  MOD_RES (313)..(313): Selenocysteine
  MOD_RES (316)..(316): Selenocysteine
  MOD_RES (318)..(318): Selenocysteine
  MOD_RES (331)..(331): Selenocysteine
  MOD_RES (336)..(336): Selenocysteine
  MOD_RES (353)..(353): Selenocysteine
MQXRNPQSHGENGASPWSWGDRLGPGPDPGADDDGEIXYENVQVPAVLGVPSSLASSVLGDKAAVKSEQPXASWRAVXSPAVGRILPCRXXCLRYLLLGLLLXCLLLGVXAICLGVRYLQVSQQLQQXNRVLEVXNSSLRQQLRLKIXQLGQSAEDLQGSRRELAQSQEALQVEQRAHQAAEGQLQACQADRQKXKEXLQSEEQQRRALEQKLSNMENRLKPFFXCGSADXCCPSGWIMHQKSCFYISLXSKNWQESQKQCEXLSSKLAXFSEIYPQSHSYYFLNSLLPNGGSGNSYWXGLSSNKDWKLXDDXQRXRXYAQSSKCNKVHKXWSWWXLESESCRSSLPYICEMXAFRFPD

SEQ ID NO: 5561 - protein, 122 aa, Homo sapiens
  MOD_RES (51)..(51): Selenocysteine
  MOD_RES (58)..(58): Selenocysteine
  MOD_RES (66)..(67): Selenocysteine
  MOD_RES (82)..(82): Selenocysteine
  MOD_RES (84)..(84): Selenocysteine
MHRRRSRSCREDQKPVMDDQRDLISNNEQLPMLGRRPGAPESKCSRGALYXGFSILVXLLLAGQAXXAYFLYQQQGRLDKLXVXSQNLQLENLRMKLPKPHAECHQVWQHDRGPCDAPAPEC

SEQ ID NO: 5562 - protein, 152 aa, Homo sapiens
  MOD_RES (51)..(51): Selenocysteine
  MOD_RES (58)..(58): Selenocysteine
  MOD_RES (66)..(67): Selenocysteine
  MOD_RES (82)..(82): Selenocysteine
  MOD_RES (84)..(84): Selenocysteine
  MOD_RES (111)..(111): Selenocysteine
  MOD_RES (132)..(132): Selenocysteine
  MOD_RES (138)..(138): Selenocysteine
MHRRRSRSCREDQKPVMDDQRDLISNNEQLPMLGRRPGAPESKCSRGALYXGFSILVXLLLAGQAXXAYFLYQQQGRLDKLXVXSQNLQLENLRMKLPKPPKPVSKMRMAXPLLMQALPMGALPQGPMQNAXKYGNMXEDHVMHLLQEVAKS

SEQ ID NO: 5563 - protein, 232 aa, Homo sapiens
  MOD_RES (51)..(51): Selenocysteine
  MOD_RES (58)..(58): Selenocysteine
  MOD_RES (66)..(67): Selenocysteine
  MOD_RES (82)..(82): Selenocysteine
  MOD_RES (84)..(84): Selenocysteine
  MOD_RES (111)..(111): Selenocysteine
  MOD_RES (132)..(132): Selenocysteine
  MOD_RES (138)..(138): Selenocysteine
  MOD_RES (172)..(172): Selenocysteine
  MOD_RES (175)..(175): Selenocysteine
  MOD_RES (203)..(203): Selenocysteine
  MOD_RES (223)..(223): Selenocysteine
MHRRRSRSCREDQKPVMDDQRDLISNNEQLPMLGRRPGAPESKCSRGALYXGFSILVXLLLAGQAXXAYFLYQQQGRLDKLXVXSQNLQLENLRMKLPKPPKPVSKMRMAXPLLMQALPMGALPQGPMQNAXKYGNMXEDHVMHLLQNADPLKVYPPLKGSFPENLRHLKNXMEXIDWKVFESWMHHWLLFEMSRHSLEQKPXDAPPKESLELEDPSSGLGVXKQDLGPVPM

SEQ ID NO: 5564 - protein, 296 aa, Homo sapiens
  MOD_RES (51)..(51): Selenocysteine
  MOD_RES (58)..(58): Selenocysteine
  MOD_RES (66)..(67): Selenocysteine
  MOD_RES (82)..(82): Selenocysteine
  MOD_RES (84)..(84): Selenocysteine
  MOD_RES (111)..(111): Selenocysteine
  MOD_RES (132)..(132): Selenocysteine
  MOD_RES (138)..(138): Selenocysteine
  MOD_RES (172)..(172): Selenocysteine
  MOD_RES (175)..(175): Selenocysteine
  MOD_RES (203)..(203): Selenocysteine
  MOD_RES (211)..(211): Selenocysteine
  MOD_RES (258)..(258): Selenocysteine
  MOD_RES (263)..(263): Selenocysteine
  MOD_RES (287)..(287): Selenocysteine
MHRRRSRSCREDQKPVMDDQRDLISNNEQLPMLGRRPGAPESKCSRGALYXGFSILVXLLLAGQAXXAYFLYQQQGRLDKLXVXSQNLQLENLRMKLPKPPKPVSKMRMAXPLLMQALPMGALPQGPMQNAXKYGNMXEDHVMHLLQNADPLKVYPPLKGSFPENLRHLKNXMEXIDWKVFESWMHHWLLFEMSRHSLEQKPXDAPPKVLXKCQEEVSHIPAVHPGSFRPKCDENGNYLPLQCYGSIGYCWCVFPNGXEVPNXRSRGHHNCSESLELEDPSSGLGVXKQDLGPVPM

SEQ ID NO: 5565 - protein, 160 aa, Homo sapiens
  MOD_RES (51)..(51): Selenocysteine
  MOD_RES (58)..(58): Selenocysteine
  MOD_RES (66)..(67): Selenocysteine
  MOD_RES (82)..(82): Selenocysteine
  MOD_RES (84)..(84): Selenocysteine
  MOD_RES (111)..(111): Selenocysteine
  MOD_RES (132)..(132): Selenocysteine
  MOD_RES (138)..(138): Selenocysteine
  MOD_RES (154)..(154): Selenocysteine
MHRRRSRSCREDQKPVMDDQRDLISNNEQLPMLGRRPGAPESKCSRGALYXGFSILVXLLLAGQAXXAYFLYQQQGRLDKLXVXSQNLQLENLRMKLPKPPKPVSKMRMAXPLLMQALPMGALPQGPMQNAXKYGNMXEDHVMHLLQSHWNWRXRLLGWV

SEQ ID NO: 5566 - protein, 52 aa, Homo sapiens
  MOD_RES (52)..(52): Selenocysteine
MHRRRSRSCREDQKPVMDDQRDLISNNEQLPMLGRRPGAPESPCRMPPSMAX

SEQ ID NO: 5567 - protein, 316 aa, Homo sapiens
  MOD_RES (1)..(1): Any amino acid
  MOD_RES (46)..(46): Selenocysteine
  MOD_RES (53)..(53): Selenocysteine
  MOD_RES (61)..(62): Selenocysteine
  MOD_RES (77)..(77): Selenocysteine
  MOD_RES (79)..(79): Selenocysteine
  MOD_RES (106)..(106): Selenocysteine
  MOD_RES (127)..(127): Selenocysteine
  MOD_RES (133)..(133): Selenocysteine
  MOD_RES (167)..(167): Selenocysteine
  MOD_RES (170)..(170): Selenocysteine
  MOD_RES (198)..(198): Selenocysteine
  MOD_RES (206)..(206): Selenocysteine
  MOD_RES (253)..(253): Selenocysteine
  MOD_RES (258)..(258): Selenocysteine
  MOD_RES (282)..(282): Selenocysteine
  MOD_RES (299)..(299): Selenocysteine
XRSCREDQKPVMDDQRDLISNNEQLPMLGRRPGAPESKCSRGALYXGFSILVXLLLAGQAXXAYFLYQQQGRLDKLXVXSQNLQLENLRMKLPKPPKPVSKMRMAXPLLMQALPMGALPQGPMQNAXKYGNMXEDHVMHLLQNADPLKVYPPLKGSFPENLRHLKNXMEXIDWKVFESWMHHWLLFEMSRHSLEQKPXDAPPKVLXKCQEEVSHIPAVHPGSFRPKCDENGNYLPLQCYGSIGYCWCVFPNGXEVPNXRSRGHHNCSESLELEDPSSGLGVXKQDLGPGKGLAEGHLVXSSSSPAGPAPLWAGEGV

SEQ ID NO: 5568 - protein, 145 aa, Homo sapiens
  MOD_RES (1)..(1): Any amino acid
  MOD_RES (48)..(48): Selenocysteine
  MOD_RES (55)..(55): Selenocysteine
  MOD_RES (63)..(64): Selenocysteine
  MOD_RES (79)..(79): Selenocysteine
  MOD_RES (81)..(81): Selenocysteine
  MOD_RES (108)..(108): Selenocysteine
  MOD_RES (129)..(129): Selenocysteine
  MOD_RES (135)..(135): Selenocysteine
XRSRSCREDQKPVMDDQRDLISNNEQLPMLGRRPGAPESKCSRGALYXGFSILVXLLLAGQAXXAYFLYQQQGRLDKLXVXSQNLQLENLRMKLPKPPKPVSKMRMAXPLLMQALPMGALPQGPMQNAXKYGNMXEDHVMHLLQY

SEQ ID NO: 5569 - protein, 188 aa, Homo sapiens
  MOD_RES (14)..(14): Selenocysteine
  MOD_RES (65)..(65): Selenocysteine
  MOD_RES (75)..(75): Selenocysteine
  MOD_RES (102)..(102): Selenocysteine
  MOD_RES (108)..(108): Selenocysteine
  MOD_RES (123)..(123): Selenocysteine
  MOD_RES (171)..(171): Selenocysteine
MPGGPGVLQALPAXIFLLFLLSAVYLGPGCQALWMHKVPASLMVSLGEDAHFQCPHNSSNNANVXWWRVLHGNYXWPPEFLGPGEDPNEPPPRPFLDMGEGXKNRIIXAEGIILLFCAVVPGXLLLFRKRWQNEKLGLDAGDEYEDENLYEGLNLDDCSMYEDISRGLQGXYQDVGSLNIGDVQLEKP

SEQ ID NO: 5570 - protein, 226 aa, Homo sapiens
  MOD_RES (14)..(14): Selenocysteine
  MOD_RES (65)..(65): Selenocysteine
  MOD_RES (75)..(75): Selenocysteine
  MOD_RES (90)..(90): Selenocysteine
  MOD_RES (121)..(121): Selenocysteine
  MOD_RES (140)..(140): Selenocysteine
  MOD_RES (146)..(146): Selenocysteine
  MOD_RES (161)..(161): Selenocysteine
  MOD_RES (209)..(209): Selenocysteine
MPGGPGVLQALPAXIFLLFLLSAVYLGPGCQALWMHKVPASLMVSLGEDAHFQCPHNSSNNANVXWWRVLHGNYXWPPEFLGPGEDPNGXLIIQNVNKSHGGIYVCRVQEGNESYQQSCGXYLRVRQPPPRPFLDMGEGXKNRIIXAEGIILLFCAVVPGXLLLFRKRWQNEKLGLDAGDEYEDENLYEGLNLDDCSMYEDISRGLQGXYQDVGSLNIGDVQLEKP

SEQ ID NO: 5571 - protein, 258 aa, Homo sapiens
  MOD_RES (14)..(14): Selenocysteine
  MOD_RES (65)..(65): Selenocysteine
  MOD_RES (75)..(75): Selenocysteine
  MOD_RES (90)..(90): Selenocysteine
  MOD_RES (121)..(121): Selenocysteine
  MOD_RES (143)..(143): Selenocysteine
  MOD_RES (204)..(205): Selenocysteine
  MOD_RES (217)..(217): Selenocysteine
  MOD_RES (224)..(224): Selenocysteine
  MOD_RES (253)..(253): Selenocysteine
MPGGPGVLQALPAXIFLLFLLSAVYLGPGCQALWMHKVPASLMVSLGEDAHFQCPHNSSNNANVXWWRVLHGNYXWPPEFLGPGEDPNGXLIIQNVNKSHGGIYVCRVQEGNESYQQSCGXYLRVRREWPSPGPYSHCPAGDXRFIFEVGIEPVPSMWVSNRLGQRDGHSPLQSGVSGGSGALQEVGGARRLGRARGARALSHXXSLQSRPPGPSWXWGRAPRXESSQPRGSSSCSARWCLGRCCCSGNDGRXRSSGW

SEQ ID NO: 5572 - protein, 230 aa, Homo sapiens
  MOD_RES (61)..(61): Selenocysteine
  MOD_RES (107)..(107): Selenocysteine
  MOD_RES (109)..(109): Selenocysteine
  MOD_RES (130)..(130): Selenocysteine
  MOD_RES (139)..(139): Selenocysteine
  MOD_RES (148)..(148): Selenocysteine
  MOD_RES (157)..(157): Selenocysteine
  MOD_RES (167)..(167): Selenocysteine
  MOD_RES (196)..(196): Selenocysteine
  MOD_RES (205)..(205): Selenocysteine
  MOD_RES (207)..(207): Selenocysteine
  MOD_RES (213)..(213): Selenocysteine
  MOD_RES (216)..(216): Selenocysteine
MARLALSPVPSHWMVALLLLLSAAEPVPAARSEDRYRNPKGSACSRIWQSPRFIARKRGFXVKMHCYMNSASGNVSWLWKQEMDENPQQLKLEKGRMEESQNESLAXLXIQGIRFEDNGIYFCQQKCNNXSEVYQGCGXELRVMGFSXLAQLKQRNXLKDGIIMIQXLLIILFIIVPIFLLLDKDDSKAGMEEDHXYEGLDIDQXAXYEDIVXLRXGEVKWSVGEHPGQE

SEQ ID NO: 5573 - protein, 125 aa, Homo sapiens
  MOD_RES (43)..(43): Selenocysteine
  MOD_RES (52)..(52): Selenocysteine
  MOD_RES (62)..(62): Selenocysteine
  MOD_RES (91)..(91): Selenocysteine
  MOD_RES (100)..(100): Selenocysteine
  MOD_RES (102)..(102): Selenocysteine
  MOD_RES (108)..(108): Selenocysteine
  MOD_RES (111)..(111): Selenocysteine
MARLALSPVPSHWMVALLLLLSAEPVPAARSEDRYRNPKGFSXLAQLKQRNXLKDGIIMIQXLLIILFIIVPIFLLLDKDDSKAGMEEDHXYEGLDIDQXAXYEDIVXLRXGEVKWSVGEHPGQE

SEQ ID NO: 5574 - protein, 229 aa, Homo sapiens
  MOD_RES (60)..(60): Selenocysteine
  MOD_RES (106)..(106): Selenocysteine
  MOD_RES (108)..(108): Selenocysteine
  MOD_RES (129)..(129): Selenocysteine
  MOD_RES (138)..(138): Selenocysteine
  MOD_RES (147)..(147): Selenocysteine
  MOD_RES (156)..(156): Selenocysteine
  MOD_RES (166)..(166): Selenocysteine
  MOD_RES (195)..(195): Selenocysteine
  MOD_RES (204)..(204): Selenocysteine
  MOD_RES (206)..(206): Selenocysteine
  MOD_RES (212)..(212): Selenocysteine
  MOD_RES (215)..(215): Selenocysteine
MARLALSPVPSHWMVALLLLLSAEPVPAARSEDRYRNPKGSACSRIWQSPRFIARKRGFXVKMHCYMNSASGNVSWLWKQEMDENPQQLKLEKGRMEESQNESLAXLXIQGIRFEDNGIYFCQQKCNNXSEVYQGCGXELRVMGFSXLAQLKQRNXLKDGIIMIQXLLIILFIIVPIFLLLDKDDSKAGMEEDHXYEGLDIDQXAXYEDIVXLRXGEVKWSVGEHPGQE

SEQ ID NO: 5575 - protein, 256 aa, Homo sapiens
  MOD_RES (4)..(4): Selenocysteine
  MOD_RES (9)..(9): Selenocysteine
  MOD_RES (39)..(39): Selenocysteine
  MOD_RES (47)..(47): Selenocysteine
  MOD_RES (62)..(62): Selenocysteine
  MOD_RES (75)..(75): Selenocysteine
  MOD_RES (91)..(91): Selenocysteine
  MOD_RES (96)..(96): Selenocysteine
  MOD_RES (113)..(113): Selenocysteine
  MOD_RES (135)..(135): Selenocysteine
  MOD_RES (144)..(144): Selenocysteine
  MOD_RES (154)..(154): Selenocysteine
  MOD_RES (164)..(164): Selenocysteine
  MOD_RES (187)..(188): Selenocysteine
  MOD_RES (195)..(195): Selenocysteine
  MOD_RES (209)..(210): Selenocysteine
  MOD_RES (228)..(228): Selenocysteine
  MOD_RES (233)..(233): Selenocysteine
MGHXRRQGXSPSKCPYLNFFQLLVLAGLSHFCSGVIHVXKEVKEVAXLSCGHNVSVEELAQXRIYWQKEKKMVLXMMSGDMNIWPEYKNRXIFDIXNNLSIVILALRPSDEGXYECVVLKYEKDAFKREHLAEVXLSVKADFPXPSISDFEIPXSNIRRIICSXSGGFPEPHLSWLENGEELNAINXXVSQDPEXELYAVSSKLDFNMXXNHSFMCLIKYGHLRVNQXFNWNXSFAPRCRERRRNERLRRESVRPV

SEQ ID NO: 5576 - protein, 288 aa, Homo sapiens
  MOD_RES (4)..(4): Selenocysteine
  MOD_RES (9)..(9): Selenocysteine
  MOD_RES (39)..(39): Selenocysteine
  MOD_RES (47)..(47): Selenocysteine
  MOD_RES (62)..(62): Selenocysteine
  MOD_RES (75)..(75): Selenocysteine
  MOD_RES (91)..(91): Selenocysteine
  MOD_RES (96)..(96): Selenocysteine
  MOD_RES (113)..(113): Selenocysteine
  MOD_RES (135)..(135): Selenocysteine
  MOD_RES (144)..(144): Selenocysteine
  MOD_RES (154)..(154): Selenocysteine
  MOD_RES (164)..(164): Selenocysteine
  MOD_RES (187)..(188): Selenocysteine
  MOD_RES (195)..(195): Selenocysteine
  MOD_RES (209)..(210): Selenocysteine
  MOD_RES (228)..(228): Selenocysteine
  MOD_RES (233)..(234): Selenocysteine
  MOD_RES (250)..(250): Selenocysteine
  MOD_RES (264)..(264): Selenocysteine
MGHXRRQGXSPSKCPYLNFFQLLVLAGLSHFCSGVIHVXKEVKEVAXLSCGHNVSVEELAQXRIYWQKEKKMVLXMMSGDMNIWPEYKNRXIFDIXNNLSIVILALRPSDEGXYECVVLKYEKDAFKREHLAEVXLSVKADFPXPSISDFEIPXSNIRRIICSXSGGFPEPHLSWLENGEELNAINXXVSQDPEXELYAVSSKLDFNMXXNHSFMCLIKYGHLRVNQXFNWNXXKQEHFPDNLLPSWAIXLISVNGIFVICCLXYCFAPRCRERRRNERLRRESVRPV

SEQ ID NO: 5577 - protein, 225 aa, Homo sapiens
  MOD_RES (30)..(31): Selenocysteine
  MOD_RES (46)..(46): Selenocysteine
  MOD_RES (82)..(82): Selenocysteine
  MOD_RES (85)..(85): Selenocysteine
  MOD_RES (138)..(138): Selenocysteine
  MOD_RES (142)..(142): Selenocysteine
  MOD_RES (150)..(150): Selenocysteine
  MOD_RES (152)..(152): Selenocysteine
  MOD_RES (155)..(156): Selenocysteine
GGSRWQRGFPQLAGGVILGVALWLRHDPQXXNLLYLELGDKPAPNXFYVGIYILIAVGAVMMFVGFLGCYGAIQESQCLLGXFFXCLVILFACEVAAGIWGFVNKDQIAKDVKQFYDQALQQAVVDDDANNAKAVVKXFHEXLDCCGSSXLXALXXSVLKNNLCPSGSNIISNLFKEDCHQKIDDLFSGKLYLIGIAAIVVAVIMIFEMILSMVLCCGIRNSSVY

SEQ ID NO: 5578 - protein, 209 aa, Homo sapiens
  MOD_RES (12)..(12): Selenocysteine
  MOD_RES (34)..(35): Selenocysteine
  MOD_RES (50)..(50): Selenocysteine
  MOD_RES (86)..(86): Selenocysteine
  MOD_RES (89)..(89): Selenocysteine
  MOD_RES (142)..(142): Selenocysteine
  MOD_RES (146)..(146): Selenocysteine
  MOD_RES (154)..(154): Selenocysteine
  MOD_RES (156)..(156): Selenocysteine
  MOD_RES (159)..(160): Selenocysteine
MAPFVHARAGKXKAQLAGGVILGVALWLRHDPQXXNLLYLELGDKPAPNXFYVGIYILIAVGAVMMFVGFLGCYGAIQESQCLLGXFFXCLVILFACEVAAGIWGFVNKDQIAKDVKQFYDQALQQAVVDDDANNAKAVVKXFHEXLDCCGSSXLXALXXSVLKNNLCPSGSNIISNLFKEDCHQKIDDLFSGKLYLIGIAAIVVAVIM

SEQ ID NO: 5579 - protein, 99 aa, Homo sapiens
  MOD_RES (6)..(6): Selenocysteine
  MOD_RES (11)..(11): Selenocysteine
  MOD_RES (33)..(34): Selenocysteine
  MOD_RES (49)..(49): Selenocysteine
  MOD_RES (85)..(85): Selenocysteine
  MOD_RES (88)..(88): Selenocysteine
MCKPAXDPRFXRSPLAGGVILGVALWLRHDPQXXNLLYLELGDKPAPNXFYVGIYILIAVGAVMMFVGFLGCYGAIQESQCLLGXFFXCLVILFACEVA

SEQ ID NO: 5580 - protein, 242 aa, Homo sapiens
  MOD_RES (5)..(5): Selenocysteine
  MOD_RES (10)..(10): Selenocysteine
  MOD_RES (31)..(31): Selenocysteine
  MOD_RES (58)..(58): Selenocysteine
  MOD_RES (99)..(99): Selenocysteine
  MOD_RES (102)..(102): Selenocysteine
  MOD_RES (155)..(155): Selenocysteine
  MOD_RES (159)..(159): Selenocysteine
  MOD_RES (167)..(167): Selenocysteine
  MOD_RES (169)..(169): Selenocysteine
  MOD_RES (172)..(173): Selenocysteine
MEEVXEAQKXHQARLGCEVPCCSSLAVSNPXSSQLGGPWWVRHPGPSGVLGCGECVGXHLVSLSPQGIYILIAVGAVMMFVGFLGCYGAIQESQCLLGXFFXCLVILFACEVAAGIWGFVNKDQIAKDVKQFYDQALQQAVVDDDANNAKAVVKXFHEXLDCCGSSXLXALXXSVLKNNLCPSGSNIISNLFKEDCHQKIDDLFSGKLYLIGIAAIVVAVIMIFEMILSMVLCCGIRNSSVY

SEQ ID NO: 5581 - protein, 236 aa, Homo sapiens
  MOD_RES (7)..(7): Selenocysteine
  MOD_RES (41)..(42): Selenocysteine
  MOD_RES (57)..(57): Selenocysteine
  MOD_RES (93)..(93): Selenocysteine
  MOD_RES (96)..(96): Selenocysteine
  MOD_RES (149)..(149): Selenocysteine
  MOD_RES (153)..(153): Selenocysteine
  MOD_RES (161)..(161): Selenocysteine
  MOD_RES (163)..(163): Selenocysteine
  MOD_RES (166)..(167): Selenocysteine
MGVEGCXKCIKYLLFVFNFVFWLAGGVILGVALWLRHDPQXXNLLYLELGDKPAPNXFYVGIYILIAVGAVMMFVGFLGCYGAIQESQCLLGXFFXCLVILFACEVAAGIWGFVNKDQIAKDVKQFYDQALQQAVVDDDANNAKAVVKXFHEXLDCCGSSXLXALXXSVLKNNLCPSGSNIISNLFKEDCHQKIDDLFSGKLYLIGIAAIVVAVIMIFEMILSMVLCCGIRNSSVY

SEQ ID NO: 5582 - protein, 52 aa, Homo sapiens
  MOD_RES (22)..(22): Selenocysteine
  MOD_RES (25)..(25): Selenocysteine
MMFVGFLGCYGAIQESQCLLGXFFXCLVILFACEVAAGIWGFVNKDQIAKDV

SEQ ID NO: 5583 - protein, 93 aa, Homo sapiens
  MOD_RES (22)..(22): Selenocysteine
  MOD_RES (25)..(25): Selenocysteine
  MOD_RES (78)..(78): Selenocysteine
  MOD_RES (82)..(82): Selenocysteine
  MOD_RES (90)..(90): Selenocysteine
  MOD_RES (92)..(92): Selenocysteine
MMFVGFLGCYGAIQESQCLLGXFFXCLVILFACEVAAGIWGFVNKDQIAKDVKQFYDQALQQAVVDDDANNAKAVVKXFHEXLDCCGSSXLXA

SEQ ID NO: 5584 - protein, 165 aa, Homo sapiens
  MOD_RES (22)..(22): Selenocysteine
  MOD_RES (25)..(25): Selenocysteine
  MOD_RES (78)..(78): Selenocysteine
  MOD_RES (82)..(82): Selenocysteine
  MOD_RES (90)..(90): Selenocysteine
  MOD_RES (92)..(92): Selenocysteine
  MOD_RES (95)..(96): Selenocysteine
MMFVGFLGCYGAIQESQCLLGXFFXCLVILFACEVAAGIWGFVNKDQIAKDVKQFYDQALQQAVVDDDANNAKAVVKXFHEXLDCCGSSXLXALXXSVLKNNLCPSGSNIISNLFKEDCHQKIDDLFSGKLYLIGIAAIVVAVIMIFEMILSMVLCCGIRNSSVY

SEQ ID NO: 5585 - protein, 274 aa, Homo sapiens
  MOD_RES (24)..(24): Selenocysteine
  MOD_RES (57)..(57): Selenocysteine
  MOD_RES (79)..(80): Selenocysteine
  MOD_RES (95)..(95): Selenocysteine
  MOD_RES (131)..(131): Selenocysteine
  MOD_RES (134)..(134): Selenocysteine
  MOD_RES (187)..(187): Selenocysteine
  MOD_RES (191)..(191): Selenocysteine
  MOD_RES (199)..(199): Selenocysteine
  MOD_RES (201)..(201): Selenocysteine
  MOD_RES (204)..(205): Selenocysteine
MWCGWSFSWQPVHWVRSACGCSLXWVSWSLASSSSRSLLKVGELGMAPFVHARAGKXKAQLAGGVILGVALWLRHDPQXXNLLYLELGDKPAPNXFYVGIYILIAVGAVMMFVGFLGCYGAIQESQCLLGXFFXCLVILFACEVAAGIWGFVNKDQIAKDVKQFYDQALQQAVVDDDANNAKAVVKXFHEXLDCCGSSXLXALXXSVLKNNLCPSGSNIISNLFKEDCHQKIDDLFSGKLYLIGIAAIVVAVIMIFEMILSMVLCCGIRNSSVY

SEQ ID NO: 5586 - protein, 148 aa, Homo sapiens
  MOD_RES (2)..(2): Selenocysteine
  MOD_RES (36)..(37): Selenocysteine
  MOD_RES (52)..(52): Selenocysteine
  MOD_RES (88)..(88): Selenocysteine
  MOD_RES (91)..(91): Selenocysteine
  MOD_RES (144)..(144): Selenocysteine
  MOD_RES (148)..(148): Selenocysteine
QXQDVPLPAPEAPSPDELAGGVILGVALWLRHDPQXXNLLYLELGDKPAPNXFYVGIYILIAVGAVMMFVGFLGCYGAIQESQCLLGXFFXCLVILFACEVAAGIWGFVNKDQIAKDVKQFYDQALQQAVVDDDANNAKAVVKXFHEX

SEQ ID NO: 5587 - protein, 221 aa, Homo sapiens
  MOD_RES (1)..(1): Any amino acid
  MOD_RES (26)..(27): Selenocysteine
  MOD_RES (42)..(42): Selenocysteine
  MOD_RES (78)..(78): Selenocysteine
  MOD_RES (81)..(81): Selenocysteine
  MOD_RES (134)..(134): Selenocysteine
  MOD_RES (138)..(138): Selenocysteine
  MOD_RES (146)..(146): Selenocysteine
  MOD_RES (148)..(148): Selenocysteine
  MOD_RES (151)..(152): Selenocysteine
XQRGFPQLAGGVILGVALWLRHDPQXXNLLYLELGDKPAPNXFYVGIYILIAVGAVMMFVGFLGCYGAIQESQCLLGXFFXCLVILFACEVAAGIWGFVNKDQIAKDVKQFYDQALQQAVVDDDANNAKAVVKXFHEXLDCCGSSXLXALXXSVLKNNLCPSGSNIISNLFKEDCHQKIDDLFSGKLYLIGIAAIVVAVIMVSGRGRRACSLGCPFRGALC

SEQ ID NO: 5588 - protein, 57 aa, Homo sapiens
  MOD_RES (18)..(18): Selenocysteine
DNSLSVRKGFCEAPGNRXQSGNHPEDWPVYQELLGMVLSICLCRHVHSEDYSKVPKY

SEQ ID NO: 5589 - protein, 179 aa, Homo sapiens
  MOD_RES (40)..(40): Selenocysteine
  MOD_RES (50)..(50): Selenocysteine
  MOD_RES (53)..(53): Selenocysteine
  MOD_RES (62)..(62): Selenocysteine
  MOD_RES (73)..(73): Selenocysteine
  MOD_RES (111)..(111): Selenocysteine
  MOD_RES (130)..(130): Selenocysteine
  MOD_RES (165)..(165): Selenocysteine
MARDWIRPQRASDCWSGKQQLFQIIIIIIISPPCCCVDDXWAQAEVGPVXSCXGFVEGSSRXGGMGSACIKVXKYFLFLFNLIFFILGAVILGFGVWILADKSSFISVLQXSSSSLRMGAYVFIGVGAVXMLMGFLGCIGAVNEVRCLLGLYFAFLLLILIAQVXAGALFYFNMGKVSP

SEQ ID NO: 5590 - protein, 157 aa, Homo sapiens
  MOD_RES (28)..(28): Selenocysteine
  MOD_RES (47)..(47): Selenocysteine
  MOD_RES (82)..(82): Selenocysteine
  MOD_RES (103)..(103): Selenocysteine
  MOD_RES (140)..(140): Selenocysteine
  MOD_RES (152)..(152): Selenocysteine
MEILGAVILGFGVWILADKSSFISVLQXSSSSLRMGAYVFIGVGAVXMLMGFLGCIGAVNEVRCLLGLYFAFLLLILIAQVXAGALFYFNMGKLKQEMGGIVXELIRDYNSSREDSLQDAWDYVQAQVKCCGWVSFYNWXDNAELMNRPEVXYPCSC

SEQ ID NO: 5591 - protein, 38 aa, Homo sapiens
  MOD_RES (9)..(9): Selenocysteine
MGSACIKVXKYFLFLFNLIFFILGAVILGFGVWILADK

SEQ ID NO: 5592 - protein, 68 aa, Homo sapiens
  MOD_RES (9)..(9): Selenocysteine
  MOD_RES (47)..(47): Selenocysteine
  MOD_RES (66)..(66): Selenocysteine
MGSACIKVXKYFLFLFNLIFFILGAVILGFGVWILADKSSFISVLQXSSSSLRMGAYVFIGVGAVXML

SEQ ID NO: 5593 - protein, 242 aa, Homo sapiens
  MOD_RES (9)..(9): Selenocysteine
  MOD_RES (47)..(47): Selenocysteine
  MOD_RES (66)..(66): Selenocysteine
  MOD_RES (97)..(97): Selenocysteine
  MOD_RES (134)..(134): Selenocysteine
  MOD_RES (146)..(146): Selenocysteine
  MOD_RES (175)..(175): Selenocysteine
MGSACIKVXKYFLFLFNLIFFILGAVILGFGVWILADKSSFISVLQXSSSSLRMGAYVFIGVGAVXMLMGFLGCIGAVNEVRCLLGLLKQEMGGIVXELIRDYNSSREDSLQDAWDYVQAQVKCCGWVSFYNWXDNAELMNRPEVXYPCSCEVKGEEDNSLSVRKGFCEAPGNRXQSGNHPEDWPVYQEGCMEKVQAWLQENLGIILGVGVGVAIIELLGMVLSICLCRHVHSEDYSKVPKY

SEQ ID NO: 5594 - protein, 105 aa, Homo sapiens
  MOD_RES (9)..(9): Selenocysteine
  MOD_RES (47)..(47): Selenocysteine
  MOD_RES (66)..(66): Selenocysteine
  MOD_RES (101)..(101): Selenocysteine
MGSACIKVXKYFLFLFNLIFFILGAVILGFGVWILADKSSFISVLQXSSSSLRMGAYVFIGVGAVXMLMGFLGCIGAVNEVRCLLGLYFAFLLLILIAQVXAGAL

SEQ ID NO: 5595 - protein, 108 aa, Homo sapiens
  MOD_RES (9)..(9): Selenocysteine
  MOD_RES (47)..(47): Selenocysteine
  MOD_RES (66)..(66): Selenocysteine
  MOD_RES (101)..(101): Selenocysteine
MGSACIKVXKYFLFLFNLIFFILGAVILGFGVWILADKSSFISVLQXSSSSLRMGAYVFIGVGAVXMLMGFLGCIGAVNEVRCLLGLYFAFLLLILIAQVXAGALFYF

SEQ ID NO: 5596 - protein, 267 aa, Homo sapiens
  MOD_RES (9)..(9): Selenocysteine
  MOD_RES (47)..(47): Selenocysteine
  MOD_RES (66)..(66): Selenocysteine
  MOD_RES (101)..(101): Selenocysteine
  MOD_RES (122)..(122): Selenocysteine
  MOD_RES (159)..(159): Selenocysteine
  MOD_RES (171)..(171): Selenocysteine
  MOD_RES (200)..(200): Selenocysteine
MGSACIKVXKYFLFLFNLIFFILGAVILGFGVWILADKSSFISVLQXSSSSLRMGAYVFIGVGAVXMLMGFLGCIGAVNEVRCLLGLYFAFLLLILIAQVXAGALFYFNMGKLKQEMGGIVXELIRDYNSSREDSLQDAWDYVQAQVKCCGWVSFYNWXDNAELMNRPEVXYPCSCEVKGEEDNSLSVRKGFCEAPGNRXQSGNHPEDWPVYQEGCMEKVQAWLQENLGIILGVGVGVAIIELLGMVLSICLCRHVHSEDYSKVPKY

SEQ ID NO: 5597 - protein, 161 aa, Homo sapiens
  MOD_RES (17)..(17): Selenocysteine
  MOD_RES (27)..(27): Selenocysteine
  MOD_RES (30)..(30): Selenocysteine
  MOD_RES (39)..(39): Selenocysteine
  MOD_RES (50)..(50): Selenocysteine
  MOD_RES (88)..(88): Selenocysteine
  MOD_RES (107)..(107): Selenocysteine
  MOD_RES (142)..(142): Selenocysteine
MPLVINQSPPCCCVDDXWAQAEVGPVXSCXGFVEGSSRXGGMGSACIKVXKYFLFLFNLIFFILGAVILGFGVWILADKSSFISVLQXSSSSLRMGAYVFIGVGAVXMLMGFLGCIGAVNEVRCLLGLYFAFLLLILIAQVXAGALFYFNMGKLKQEMGGI

SEQ ID NO: 5598 - protein, 146 aa, Homo sapiens
  MOD_RES (3)..(3): Selenocysteine
  MOD_RES (38)..(39): Selenocysteine
  MOD_RES (45)..(45): Selenocysteine
  MOD_RES (49)..(49): Selenocysteine
  MOD_RES (68)..(68): Selenocysteine
  MOD_RES (78)..(78): Selenocysteine
  MOD_RES (98)..(98): Selenocysteine
  MOD_RES (103)..(103): Selenocysteine
  MOD_RES (129)..(129): Selenocysteine
  MOD_RES (139)..(139): Selenocysteine
  MOD_RES (143)..(143): Selenocysteine
MEXPQEDHLRGQHYHQKGQNGSFDAPNERPYSLKIRNXXSCNSGXYRCXLQDPDGQRNLSGKVILRVXGCPAQRKEEXFKKYRAEIVLLLALVIFYLXLIIFXCKFARLQSIFPDFSKAGMERAFLPVXSPNKHLGLVXPHKXELV

SEQ ID NO: 5599 - protein, 205 aa, Homo sapiens
  MOD_RES (20)..(20): Selenocysteine
  MOD_RES (36)..(36): Selenocysteine
  MOD_RES (46)..(46): Selenocysteine
  MOD_RES (62)..(62): Selenocysteine
  MOD_RES (97)..(98): Selenocysteine
  MOD_RES (104)..(104): Selenocysteine
  MOD_RES (108)..(108): Selenocysteine
  MOD_RES (127)..(127): Selenocysteine
  MOD_RES (137)..(137): Selenocysteine
  MOD_RES (157)..(157): Selenocysteine
  MOD_RES (162)..(162): Selenocysteine
  MOD_RES (188)..(188): Selenocysteine
  MOD_RES (198)..(198): Selenocysteine
  MOD_RES (202)..(202): Selenocysteine
MSRGLQLLLLSCAYSLAPAXPEVKVACSEDVDLPCXAPWDPQVPYXVSWVKLLEGGEERMEXPQEDHLRGQHYHQKGQNGSFDAPNERPYSLKIRNXXSCNSGXYRCXLQDPDGQRNLSGKVILRVXGCPAQRKEEXFKKYRAEIVLLLALVIFYLXLIIFXCKFARLQSIFPDFSKAGMERAFLPVXSPNKHLGLVXPHKXELV

SEQ ID NO: 5600 - protein, 217 aa, Homo sapiens
  MOD_RES (6)..(6): Selenocysteine
  MOD_RES (36)..(36): Selenocysteine
  MOD_RES (44)..(44): Selenocysteine
  MOD_RES (63)..(63): Selenocysteine
  MOD_RES (67)..(67): Selenocysteine
  MOD_RES (82)..(82): Selenocysteine
  MOD_RES (99)..(99): Selenocysteine
  MOD_RES (103)..(103): Selenocysteine
  MOD_RES (110)..(110): Selenocysteine
  MOD_RES (113)..(113): Selenocysteine
  MOD_RES (138)..(138): Selenocysteine
  MOD_RES (143)..(143): Selenocysteine
  MOD_RES (172)..(172): Selenocysteine
  MOD_RES (174)..(174): Selenocysteine
  MOD_RES (183)..(183): Selenocysteine
  MOD_RES (207)..(207): Selenocysteine
  MOD_RES (215)..(215): Selenocysteine
MDPQCXMGLSNILFVMAFLLSANFSQPEIVPISNIXENVYINLXCSSIHGYPEPKKMSVLLRXKNSXIEYDGVMQKSQDNVXELYDVSISLSVSFPDVXSNMXIFCILEXDKXRLLSSPFSIELEDPQPPPDHIPWIXAVLPXVIICVMVFCLILWKWKKKKRPRNSYKCGXNXMEREESEQXKKREKIHIPERSDEAQRVFKSSKXSSCDKSDXCF

SEQ ID NO: 5601 - protein, 329 aa, Homo sapiens
  MOD_RES (6)..(6): Selenocysteine
  MOD_RES (35)..(35): Selenocysteine
  MOD_RES (86)..(86): Selenocysteine
  MOD_RES (94)..(94): Selenocysteine
  MOD_RES (118)..(118): Selenocysteine
  MOD_RES (148)..(148): Selenocysteine
  MOD_RES (156)..(156): Selenocysteine
  MOD_RES (175)..(175): Selenocysteine
  MOD_RES (179)..(179): Selenocysteine
  MOD_RES (194)..(194): Selenocysteine
  MOD_RES (211)..(211): Selenocysteine
  MOD_RES (215)..(215): Selenocysteine
  MOD_RES (222)..(222): Selenocysteine
  MOD_RES (225)..(225): Selenocysteine
  MOD_RES (250)..(250): Selenocysteine
  MOD_RES (255)..(255): Selenocysteine
  MOD_RES (284)..(284): Selenocysteine
  MOD_RES (286)..(286): Selenocysteine
  MOD_RES (295)..(295): Selenocysteine
  MOD_RES (319)..(319): Selenocysteine
  MOD_RES (327)..(327): Selenocysteine
MDPQCXMGLSNILFVMAFLLSGAAPLKIQAYFNEXADLPCQFANSQNQSLSELVVFWQDQENLVLNEVYLGKEKFDSVHSKYMGRXSFDSDSWXLRLHNLQIKDKGLYQCIIHHKKPXGMIRIHQMNSELSVLANFSQPEIVPISNIXENVYINLXCSSIHGYPEPKKMSVLLRXKNSXIEYDGVMQKSQDNVXELYDVSISLSVSFPDVXSNMXIFCILEXDKXRLLSSPFSIELEDPQPPPDHIPWIXAVLPXVIICVMVFCLILWKWKKKKRPRNSYKCGXNXMEREESEQXKKREKIHIPERSDEAQRVFKSSKXSSCDKSDXCF

SEQ ID NO: 5602 - protein, 167 aa, Homo sapiens
  MOD_RES (29)..(29): Selenocysteine
  MOD_RES (80)..(80): Selenocysteine
  MOD_RES (88)..(88): Selenocysteine
  MOD_RES (112)..(112): Selenocysteine
  MOD_RES (142)..(142): Selenocysteine
  MOD_RES (150)..(150): Selenocysteine
MGLSNILFVMAFLLSGAAPLKIQAYFNEXADLPCQFANSQNQSLSELVVFWQDQENLVLNEVYLGKEKFDSVHSKYMGRXSFDSDSWXLRLHNLQIKDKGLYQCIIHHKKPXGMIRIHQMNSELSVLANFSQPEIVPISNIXENVYINLXCSSIHGYPEPKKMSVLL

SEQ ID NO: 5603 - protein, 323 aa, Homo sapiens
  MOD_RES (29)..(29): Selenocysteine
  MOD_RES (80)..(80): Selenocysteine
  MOD_RES (88)..(88): Selenocysteine
  MOD_RES (112)..(112): Selenocysteine
  MOD_RES (142)..(142): Selenocysteine
  MOD_RES (150)..(150): Selenocysteine
  MOD_RES (169)..(169): Selenocysteine
  MOD_RES (173)..(173): Selenocysteine
  MOD_RES (188)..(188): Selenocysteine
  MOD_RES (205)..(205): Selenocysteine
  MOD_RES (209)..(209): Selenocysteine
  MOD_RES (216)..(216): Selenocysteine
  MOD_RES (219)..(219): Selenocysteine
  MOD_RES (244)..(244): Selenocysteine
  MOD_RES (249)..(249): Selenocysteine
  MOD_RES (278)..(278): Selenocysteine
  MOD_RES (280)..(280): Selenocysteine
  MOD_RES (289)..(289): Selenocysteine
  MOD_RES (313)..(313): Selenocysteine
  MOD_RES (321)..(321): Selenocysteine
MGLSNILFVMAFLLSGAAPLKIQAYFNEXADLPCQFANSQNQSLSELVVFWQDQENLVLNEVYLGKEKFDSVHSKYMGRXSFDSDSWXLRLHNLQIKDKGLYQCIIHHKKPXGMIRIHQMNSELSVLANFSQPEIVPISNIXENVYINLXCSSIHGYPEPKKMSVLLRXKNSXIEYDGVMQKSQDNVXELYDVSISLSVSFPDVXSNMXIFCILEXDKXRLLSSPFSIELEDPQPPPDHIPWIXAVLPXVIICVMVFCLILWKWKKKKRPRNSYKCGXNXMEREESEQXKKREKIHIPERSDEAQRVFKSSKXSSCDKSDXCF

SEQ ID NO: 5604 - protein, 275 aa, Homo sapiens
  MOD_RES (29)..(29): Selenocysteine
  MOD_RES (80)..(80): Selenocysteine
  MOD_RES (88)..(88): Selenocysteine
  MOD_RES (112)..(112): Selenocysteine
  MOD_RES (142)..(142): Selenocysteine
  MOD_RES (150)..(150): Selenocysteine
  MOD_RES (169)..(169): Selenocysteine
  MOD_RES (173)..(173): Selenocysteine
  MOD_RES (188)..(188): Selenocysteine
  MOD_RES (205)..(205): Selenocysteine
  MOD_RES (209)..(209): Selenocysteine
  MOD_RES (216)..(216): Selenocysteine
  MOD_RES (219)..(219): Selenocysteine
  MOD_RES (230)..(230): Selenocysteine
  MOD_RES (232)..(232): Selenocysteine
  MOD_RES (241)..(241): Selenocysteine
  MOD_RES (265)..(265): Selenocysteine
  MOD_RES (273)..(273): Selenocysteine
MGLSNILFVMAFLLSGAAPLKIQAYFNEXADLPCQFANSQNQSLSELVVFWQDQENLVLNEVYLGKEKFDSVHSKYMGRXSFDSDSWXLRLHNLQIKDKGLYQCIIHHKKPXGMIRIHQMNSELSVLANFSQPEIVPISNIXENVYINLXCSSIHGYPEPKKMSVLLRXKNSXIEYDGVMQKSQDNVXELYDVSISLSVSFPDVXSNMXIFCILEXDKXRLLSSPFSIGXNXMEREESEQXKKREKIHIPERSDEAQRVFKSSKXSSCDKSDXCF

SEQ ID NO: 5605 - protein, 247 aa, Homo sapiens
  MOD_RES (4)..(4): Selenocysteine
  MOD_RES (12)..(12): Selenocysteine
  MOD_RES (36)..(36): Selenocysteine
  MOD_RES (66)..(66): Selenocysteine
  MOD_RES (74)..(74): Selenocysteine
  MOD_RES (93)..(93): Selenocysteine
  MOD_RES (97)..(97): Selenocysteine
  MOD_RES (112)..(112): Selenocysteine
  MOD_RES (129)..(129): Selenocysteine
  MOD_RES (133)..(133): Selenocysteine
  MOD_RES (140)..(140): Selenocysteine
  MOD_RES (143)..(143): Selenocysteine
  MOD_RES (168)..(168): Selenocysteine
  MOD_RES (173)..(173): Selenocysteine
  MOD_RES (202)..(202): Selenocysteine
  MOD_RES (204)..(204): Selenocysteine
  MOD_RES (213)..(213): Selenocysteine
  MOD_RES (237)..(237): Selenocysteine
  MOD_RES (245)..(245): Selenocysteine
MGRXSFDSDSWXLRLHNLQIKDKGLYQCIIHHKKPXGMIRIHQMNSELSVLANFSQPEIVPISNIXENVYINLXCSSIHGYPEPKKMSVLLRXKNSXIEYDGVMQKSQDNVXELYDVSISLSVSFPDVXSNMXIFCILEXDKXRLLSSPFSIELEDPQPPPDHIPWIXAVLPXVIICVMVFCLILWKWKKKKRPRNSYKCGXNXMEREESEQXKKREKIHIPERSDEAQRVFKSSKXSSCDKSDXCF

SEQ ID NO: 5606 - protein, 277 aa, Homo sapiens
  MOD_RES (1)..(1): Any amino acid
  MOD_RES (2)..(2): Selenocysteine
  MOD_RES (31)..(31): Selenocysteine
  MOD_RES (82)..(82): Selenocysteine
  MOD_RES (90)..(90): Selenocysteine
  MOD_RES (114)..(114): Selenocysteine
  MOD_RES (144)..(144): Selenocysteine
  MOD_RES (152)..(152): Selenocysteine
  MOD_RES (171)..(171): Selenocysteine
  MOD_RES (175)..(175): Selenocysteine
  MOD_RES (190)..(190): Selenocysteine
  MOD_RES (207)..(207): Selenocysteine
  MOD_RES (211)..(211): Selenocysteine
  MOD_RES (218)..(218): Selenocysteine
  MOD_RES (221)..(221): Selenocysteine
  MOD_RES (232)..(232): Selenocysteine
  MOD_RES (234)..(234): Selenocysteine
  MOD_RES (243)..(243): Selenocysteine
  MOD_RES (267)..(267): Selenocysteine
  MOD_RES (275)..(275): Selenocysteine
XXMGLSNILFVMAFLLSGAAPLKIQAYFNEXADLPCQFANSQNQSLSELVVFWQDQENLVLNEVYLGKEKFDSVHSKYMGRXSFDSDSWXLRLHNLQIKDKGLYQCIIHHKKPXGMIRIHQMNSELSVLANFSQPEIVPISNIXENVYINLXCSSIHGYPEPKKMSVLLRXKNSXIEYDGVMQKSQDNVXELYDVSISLSVSFPDVXSNMXIFCILEXDKXRLLSSPFSIGXNXMEREESEQXKKREKIHIPERSDEAQRVFKSSKXSSCDKSDXCF

SEQ ID NO: 5607 - protein, 198 aa, Homo sapiens
  MOD_RES (6)..(6): Selenocysteine
  MOD_RES (32)..(32): Selenocysteine
  MOD_RES (38)..(38): Selenocysteine
  MOD_RES (51)..(51): Selenocysteine
  MOD_RES (68)..(68): Selenocysteine
  MOD_RES (86)..(86): Selenocysteine
  MOD_RES (97)..(97): Selenocysteine
  MOD_RES (101)..(101): Selenocysteine
  MOD_RES (138)..(140): Selenocysteine
  MOD_RES (147)..(147): Selenocysteine
  MOD_RES (151)..(151): Selenocysteine
MALPVXALLLPLALLLHAARPSQFRVSPLDRXWNLGEXVELKCQVLLSNPXSGCSWLFQPRGAAASPXFLLYLSQNKPKAAEGLDXQRFSGKRLGDXFVLXLSDFRRENEGYYFCSALSNSIMYFSHFVPVFLPAKPXXXPAPRPPXPAPXIASQPLSLRPEACRPAAGGAGNRRRVCKCPRPVVKSGDKPSLSARYV

SEQ ID NO: 5608 - protein, 235 aa, Homo sapiens
  MOD_RES (6)..(6): Selenocysteine
  MOD_RES (32)..(32): Selenocysteine
  MOD_RES (38)..(38): Selenocysteine
  MOD_RES (51)..(51): Selenocysteine
  MOD_RES (68)..(68): Selenocysteine
  MOD_RES (86)..(86): Selenocysteine
  MOD_RES (97)..(97): Selenocysteine
  MOD_RES (101)..(101): Selenocysteine
  MOD_RES (138)..(140): Selenocysteine
  MOD_RES (147)..(147): Selenocysteine
  MOD_RES (151)..(151): Selenocysteine
  MOD_RES (174)..(174): Selenocysteine
  MOD_RES (192)..(192): Selenocysteine
  MOD_RES (203)..(203): Selenocysteine
MALPVXALLLPLALLLHAARPSQFRVSPLDRXWNLGEXVELKCQVLLSNPXSGCSWLFQPRGAAASPXFLLYLSQNKPKAAEGLDXQRFSGKRLGDXFVLXLSDFRRENEGYYFCSALSNSIMYFSHFVPVFLPAKPXXXPAPRPPXPAPXIASQPLSLRPEACRPAAGGAVHXRGLDFACDIYIWAPLAGXCGVLLLSLVIXLYCNHRNRRRVCKCPRPVVKSGDKPSLSARYV

SEQ ID NO: 5609 - protein, 198 aa, Homo sapiens
  MOD_RES (6)..(6): Selenocysteine
  MOD_RES (32)..(32): Selenocysteine
  MOD_RES (38)..(38): Selenocysteine
  MOD_RES (51)..(51): Selenocysteine
  MOD_RES (68)..(68): Selenocysteine
  MOD_RES (86)..(86): Selenocysteine
  MOD_RES (97)..(97): Selenocysteine
  MOD_RES (101)..(101): Selenocysteine
  MOD_RES (137)..(137): Selenocysteine
  MOD_RES (155)..(155): Selenocysteine
  MOD_RES (166)..(166): Selenocysteine
MALPVXALLLPLALLLHAARPSQFRVSPLDRXWNLGEXVELKCQVLLSNPXSGCSWLFQPRGAAASPXFLLYLSQNKPKAAEGLDXQRFSGKRLGDXFVLXLSDFRRENEGYYFCSALSNSIMYFSHFVPVFLPVHXRGLDFACDIYIWAPLAGXCGVLLLSLVIXLYCNHRNRRRVCKCPRPVVKSGDKPSLSARYV

SEQ ID NO: 5610 - protein, 198 aa, Homo sapiens
  MOD_RES (14)..(14): Selenocysteine
  MOD_RES (25)..(25): Selenocysteine
  MOD_RES (33)..(33): Selenocysteine
  MOD_RES (79)..(79): Selenocysteine
  MOD_RES (104)..(104): Selenocysteine
  MOD_RES (125)..(125): Selenocysteine
  MOD_RES (130)..(130): Selenocysteine
  MOD_RES (140)..(141): Selenocysteine
  MOD_RES (145)..(145): Selenocysteine
  MOD_RES (149)..(149): Selenocysteine
  MOD_RES (162)..(162): Selenocysteine
  MOD_RES (183)..(184): Selenocysteine
  MOD_RES (195)..(195): Selenocysteine
MRPRLWLLLAAQLXVLHGNSVLQQXPAYIKVQXNKMVMLSCEAKISLSNMRIYWLRQRQAPSSDSHHEFLALWDSAKGXIHGEEVEQEKIAVFRDASRFILNLXSVKPEDSGIYFCMIVGSPELXFGKGXQLSVVDFLPXXAQPXKKSXLKKRVCRLPRPEXQKGLKGKVYQEPLSPNACMDXXAILQPHRSCLXHGS

SEQ ID NO: 5611 - protein, 210 aa, Homo sapiens
  MOD_RES (14)..(14): Selenocysteine
  MOD_RES (25)..(25): Selenocysteine
  MOD_RES (33)..(33): Selenocysteine
  MOD_RES (79)..(79): Selenocysteine
  MOD_RES (104)..(104): Selenocysteine
  MOD_RES (125)..(125): Selenocysteine
  MOD_RES (130)..(130): Selenocysteine
  MOD_RES (140)..(141): Selenocysteine
  MOD_RES (145)..(145): Selenocysteine
  MOD_RES (149)..(149): Selenocysteine
  MOD_RES (162)..(162): Selenocysteine
  MOD_RES (172)..(172): Selenocysteine
MRPRLWLLLAAQLXVLHGNSVLQQXPAYIKVQXNKMVMLSCEAKISLSNMRIYWLRQRQAPSSDSHHEFLALWDSAKGXIHGEEVEQEKIAVFRDASRFILNLXSVKPEDSGIYFCMIVGSPELXFGKGXQLSVVDFLPXXAQPXKKSXLKKRVCRLPRPEXQKGPLCSPIXLGLLVAGVLVLLVSLGVAIHLCCRRRRARLRFMKQFYK

SEQ ID NO: 5612 - protein, 221 aa, Homo sapiens
  MOD_RES (14)..(14): Selenocysteine
  MOD_RES (25)..(25): Selenocysteine
  MOD_RES (33)..(33): Selenocysteine
  MOD_RES (79)..(79): Selenocysteine
  MOD_RES (104)..(104): Selenocysteine
  MOD_RES (125)..(125): Selenocysteine
  MOD_RES (130)..(130): Selenocysteine
  MOD_RES (140)..(141): Selenocysteine
  MOD_RES (145)..(145): Selenocysteine
  MOD_RES (149)..(149): Selenocysteine
  MOD_RES (162)..(162): Selenocysteine
  MOD_RES (172)..(172): Selenocysteine
MRPRLWLLLAAQLXVLHGNSVLQQXPAYIKVQXNKMVMLSCEAKISLSNMRIYWLRQRQAPSSDSHHEFLALWDSAKGXIHGEEVEQEKIAVFRDASRFILNLXSVKPEDSGIYFCMIVGSPELXFGKGXQLSVVDFLPXXAQPXKKSXLKKRVCRLPRPEXQKGPLCSPIXLGLLVAGVLVLLVSLGVAIHLCCRRRRARLRFMKQLRLHPLEKCSRMDY

SEQ ID NO: 5613 - protein, 210 aa, Homo sapiens
  MOD_RES (14)..(14): Selenocysteine
  MOD_RES (25)..(25): Selenocysteine
  MOD_RES (33)..(33): Selenocysteine
  MOD_RES (79)..(79): Selenocysteine
  MOD_RES (104)..(104): Selenocysteine
  MOD_RES (125)..(125): Selenocysteine
  MOD_RES (130)..(130): Selenocysteine
  MOD_RES (140)..(141): Selenocysteine
  MOD_RES (145)..(145): Selenocysteine
  MOD_RES (149)..(149): Selenocysteine
  MOD_RES (162)..(162): Selenocysteine
  MOD_RES (172)..(172): Selenocysteine
MRPRLWLLLAAQLXVLHGNSVLQQXPAYIKVQXNKMVMLSCEAKISLSNMRIYWLRQRQAPSSDSHHEFLALWDSAKGXIHGEEVEQEKIAVFRDASRFILNLXSVKPEDSGIYFCMIVGSPELXFGKGXQLSVVDFLPXXAQPXKKSXLKKRVCRLPRPEXQKGPLCSPIXLGLLVAGVLVLLVSLGVAIHLCCRRRRARLRFMKQLYK

SEQ ID NO: 5614 - protein, 243 aa, Homo sapiens
  MOD_RES (14)..(14): Selenocysteine
  MOD_RES (25)..(25): Selenocysteine
  MOD_RES (33)..(33): Selenocysteine
  MOD_RES (79)..(79): Selenocysteine
  MOD_RES (104)..(104): Selenocysteine
  MOD_RES (125)..(125): Selenocysteine
  MOD_RES (130)..(130): Selenocysteine
  MOD_RES (140)..(141): Selenocysteine
  MOD_RES (145)..(145): Selenocysteine
  MOD_RES (149)..(149): Selenocysteine
  MOD_RES (162)..(162): Selenocysteine
  MOD_RES (172)..(172): Selenocysteine
  MOD_RES (216)..(216): Selenocysteine
  MOD_RES (229)..(231): Selenocysteine
  MOD_RES (243)..(243): Selenocysteine
MRPRLWLLLAAQLXVLHGNSVLQQXPAYIKVQXNKMVMLSCEAKISLSNMRIYWLRQRQAPSSDSHHEFLALWDSAKGXIHGEEVEQEKIAVFRDASRFILNLXSVKPEDSGIYFCMIVGSPELXFGKGXQLSVVDFLPXXAQPXKKSXLKKRVCRLPRPEXQKGPLCSPIXLGLLVAGVLVLLVSLGVAIHLCCRRRRARLRFMKQPQGEGISGXFVPQCLHGYYSNXXXSQKLLNPWILKX

SEQ ID NO: 5615 - protein, 213 aa, Homo sapiens
  MOD_RES (14)..(14): Selenocysteine
  MOD_RES (25)..(25): Selenocysteine
  MOD_RES (33)..(33): Selenocysteine
  MOD_RES (79)..(79): Selenocysteine
  MOD_RES (104)..(104): Selenocysteine
  MOD_RES (125)..(125): Selenocysteine
  MOD_RES (130)..(130): Selenocysteine
  MOD_RES (140)..(141): Selenocysteine
  MOD_RES (145)..(145): Selenocysteine
  MOD_RES (149)..(149): Selenocysteine
  MOD_RES (162)..(162): Selenocysteine
  MOD_RES (186)..(186): Selenocysteine
  MOD_RES (199)..(201): Selenocysteine
  MOD_RES (213)..(213): Selenocysteine
MRPRLWLLLAAQLXVLHGNSVLQQXPAYIKVQXNKMVMLSCEAKISLSNMRIYWLRQRQAPSSDSHHEFLALWDSAKGXIHGEEVEQEKIAVFRDASRFILNLXSVKPEDSGIYFCMIVGSPELXFGKGXQLSVVDFLPXXAQPXKKSXLKKRVCRLPRPEXQKGRRRRARLRFMKQPQGEGISGXFVPQCLHGYYSNXXXSQKLLNPWILKX

SEQ ID NO: 5616 - protein, 159 aa, Homo sapiens
  MOD_RES (59)..(59): Selenocysteine
  MOD_RES (65)..(65): Selenocysteine
  MOD_RES (73)..(73): Selenocysteine
  MOD_RES (106)..(106): Selenocysteine
  MOD_RES (108)..(108): Selenocysteine
MMLVGFLGCCGAVQESQCMLGLFFGFLLVIFAIEIAAAIWGYSHKDEVIKEVQEFYKDXYNKLKXKDEPQREXLKAIHYALNCCGLAGGVEQFISDICPKKDVLEXFXVKSCPDAIKEVFDNKFHIIGAVGIGIAVVMIFGMIFSMILCCAIRRNREMV

SEQ ID NO: 5617 - protein, 228 aa, Homo sapiens
  MOD_RES (7)..(7): Selenocysteine
  MOD_RES (41)..(41): Selenocysteine
  MOD_RES (49)..(49): Selenocysteine
  MOD_RES (58)..(58): Selenocysteine
  MOD_RES (93)..(93): Selenocysteine
  MOD_RES (96)..(96): Selenocysteine
  MOD_RES (151)..(151): Selenocysteine
  MOD_RES (157)..(157): Selenocysteine
  MOD_RES (165)..(165): Selenocysteine
  MOD_RES (198)..(198): Selenocysteine
  MOD_RES (200)..(200): Selenocysteine
MPVKGGXKCIKYLLFGFNFIFWLAGIAVLAIGLWLRFDSQXKSIFEQEXNNNNSSFYXGVYILIGAGALMMLVGFLGCCGAVQESQCMLGLAXKRXMFPPFLEDHVCFFSLNPQFFGFLLVIFAIEIAAAIWGYSHKDEVIKEVQEFYKDXYNKLKXKDEPQREXLKAIHYALNCCGLAGGVEQFISDICPKKDVLEXFXVKSCPDAIKEVFDNKFHIIGAVGIGIAV

SEQ ID NO: 5618 - protein, 142 aa, Homo sapiens
  MOD_RES (7)..(7): Selenocysteine
  MOD_RES (41)..(41): Selenocysteine
  MOD_RES (49)..(49): Selenocysteine
  MOD_RES (58)..(58): Selenocysteine
  MOD_RES (128)..(128): Selenocysteine
  MOD_RES (134)..(134): Selenocysteine
  MOD_RES (142)..(142): Selenocysteine
MPVKGGXKCIKYLLFGFNFIFWLAGIAVLAIGLWLRFDSQXKSIFEQEXNNNNSSFYXGVYILIGAGALMMLVGFLGCCGAVQESQCMLGLFFGFLLVIFAIEIAAAIWGYSHKDEVIKEVQEFYKDXYNKLKXKDEPQREX

SEQ ID NO: 5619 - protein, 228 aa, Homo sapiens
  MOD_RES (7)..(7): Selenocysteine
  MOD_RES (41)..(41): Selenocysteine
  MOD_RES (49)..(49): Selenocysteine
  MOD_RES (58)..(58): Selenocysteine
  MOD_RES (128)..(128): Selenocysteine
  MOD_RES (134)..(134): Selenocysteine
  MOD_RES (142)..(142): Selenocysteine
  MOD_RES (175)..(175): Selenocysteine
  MOD_RES (177)..(177): Selenocysteine
MPVKGGXKCIKYLLFGFNFIFWLAGIAVLAIGLWLRFDSQXKSIFEQEXNNNNSSFYXGVYILIGAGALMMLVGFLGCCGAVQESQCMLGLFFGFLLVIFAIEIAAAIWGYSHKDEVIKEVQEFYKDXYNKLKXKDEPQREXLKAIHYALNCCGLAGGVEQFISDICPKKDVLEXFXVKSCPDAIKEVFDNKFHIIGAVGIGIAVVMIFGMIFSMILCCAIRRNREMV

SEQ ID NO: 5620 - protein, 182 aa, Homo sapiens
  MOD_RES (7)..(7): Selenocysteine
  MOD_RES (41)..(41): Selenocysteine
  MOD_RES (49)..(49): Selenocysteine
  MOD_RES (58)..(58): Selenocysteine
  MOD_RES (128)..(128): Selenocysteine
  MOD_RES (134)..(134): Selenocysteine
  MOD_RES (142)..(142): Selenocysteine
  MOD_RES (161)..(161): Selenocysteine
  MOD_RES (173)..(173): Selenocysteine
MPVKGGXKCIKYLLFGFNFIFWLAGIAVLAIGLWLRFDSQXKSIFEQEXNNNNSSFYXGVYILIGAGALMMLVGFLGCCGAVQESQCMLGLFFGFLLVIFAIEIAAAIWGYSHKDEVIKEVQEFYKDXYNKLKXKDEPQREXLKAIHYAVELLWFGWGRGXVYLRHLPQEGRXRNLHREVLS

SEQ ID NO: 5621 - protein, 146 aa, Homo sapiens
  MOD_RES (9)..(9): Selenocysteine
  MOD_RES (44)..(44): Selenocysteine
  MOD_RES (69)..(69): Selenocysteine
  MOD_RES (111)..(111): Selenocysteine
  MOD_RES (118)..(118): Selenocysteine
  MOD_RES (123)..(123): Selenocysteine
  MOD_RES (128)..(128): Selenocysteine
  MOD_RES (145)..(145): Selenocysteine
MAQKRPACXLKPECVQQLLVCSQEAKKSAYCPYSHFPVGAALLXQEGRIFKGCNIENACYPLGICAERXAIQKAVSEGYKDFRAIAIASDMQDDFISPCGACRQVMREFGXNWPVYMXKPDGXYIVMXVQELLPSSFGPEDLQKXQ

SEQ ID NO: 5622 - protein, 170 aa, Homo sapiens
  MOD_RES (17)..(17): Selenocysteine
  MOD_RES (20)..(20): Selenocysteine
  MOD_RES (26)..(26): Selenocysteine
  MOD_RES (54)..(54): Selenocysteine
  MOD_RES (57)..(57): Selenocysteine
  MOD_RES (65)..(65): Selenocysteine
  MOD_RES (84)..(84): Selenocysteine
  MOD_RES (100)..(100): Selenocysteine
  MOD_RES (102)..(102): Selenocysteine
  MOD_RES (105)..(106): Selenocysteine
  MOD_RES (113)..(113): Selenocysteine
  MOD_RES (147)..(147): Selenocysteine
MSEEARFCFSPGENSKXMSXELFSSXREEGSSGSGPSFRSNQRKMLNLLLERDXSFXVCPDVPRXPVGKFLGDSANLSILSGGXPKRCLDLSNLSSGEIXAXQLXXSADLDEXGHLDSSGLQEVHLAGMNHDQHLMKCSPAQLLCSXPNGLDRGHRKRDAMCSSSANKEN

SEQ ID NO: 5623 - protein, 249 aa, Homo sapiens
  MOD_RES (3)..(3): Selenocysteine
  MOD_RES (9)..(9): Selenocysteine
  MOD_RES (37)..(37): Selenocysteine
  MOD_RES (40)..(40): Selenocysteine
  MOD_RES (48)..(48): Selenocysteine
  MOD_RES (67)..(67): Selenocysteine
  MOD_RES (83)..(83): Selenocysteine
  MOD_RES (85)..(85): Selenocysteine
  MOD_RES (88)..(89): Selenocysteine
  MOD_RES (96)..(96): Selenocysteine
  MOD_RES (130)..(130): Selenocysteine
  MOD_RES (171)..(172): Selenocysteine
  MOD_RES (236)..(236): Selenocysteine
MSXELFSSXREEGSSGSGPSFRSNQRKMLNLLLERDXSFXVCPDVPRXPVGKFLGDSANLSILSGGXPKRCLDLSNLSSGEIXAXQLXXSADLDEXGHLDSSGLQEVHLAGMNHDQHLMKCSPAQLLCSXPNGLDRGHRKRDAMCSSSANKENDNGNLVDSEMKYLGSPIXXVPKLDKNPNLGEDQAEEISDELMEFSLKDQEAKVSRSGLYRSPSMPENLNRPRLKQVEKFKDNXIPDKVKKKYFSGQ

SEQ ID NO: 5624 - protein, 473 aa, Homo sapiens
  MOD_RES (3)..(3): Selenocysteine
  MOD_RES (9)..(9): Selenocysteine
  MOD_RES (37)..(37): Selenocysteine
  MOD_RES (40)..(40): Selenocysteine
  MOD_RES (48)..(48): Selenocysteine
  MOD_RES (67)..(67): Selenocysteine
  MOD_RES (83)..(83): Selenocysteine
  MOD_RES (85)..(85): Selenocysteine
  MOD_RES (88)..(89): Selenocysteine
  MOD_RES (96)..(96): Selenocysteine
  MOD_RES (130)..(130): Selenocysteine
  MOD_RES (171)..(172): Selenocysteine
  MOD_RES (236)..(236): Selenocysteine
  MOD_RES (261)..(261): Selenocysteine
  MOD_RES (268)..(268): Selenocysteine
  MOD_RES (270)..(270): Selenocysteine
  MOD_RES (294)..(294): Selenocysteine
  MOD_RES (309)..(309): Selenocysteine
  MOD_RES (367)..(367): Selenocysteine
  MOD_RES (442)..(442): Selenocysteine
MSXELFSSXREEGSSGSGPSFRSNQRKMLNLLLERDXSFXVCPDVPRXPVGKFLGDSANLSILSGGXPKRCLDLSNLSSGEIXAXQLXXSADLDEXGHLDSSGLQEVHLAGMNHDQHLMKCSPAQLLCSXPNGLDRGHRKRDAMCSSSANKENDNGNLVDSEMKYLGSPIXXVPKLDKNPNLGEDQAEEISDELMEFSLKDQEAKVSRSGLYRSPSMPENLNRPRLKQVEKFKDNXIPDKVKKKYFSGQGKLRKGLCLKKXVSLCDIXIXQMLEEDSNQGHLIGDFSKVCALPXVSGKHQDLKYVNPEXVAALLSGKFQGLIEKFYVIDCRYPYEYLGGHIQGALNLYSQEELFNFFLKKPIVPLDXQKRIIIVFHCEFSSERGPRMCRCLREEDRSLNQYPALYYPELYILKGGYRDFFPEYMELCEPQSYCPMHHQDHKXELLRCRSQSKVQEGERQLREQIALLVKDMSP

SEQ ID NO: 5625 - protein, 443 aa, Homo sapiens
  MOD_RES (3)..(3): Selenocysteine
  MOD_RES (9)..(9): Selenocysteine
  MOD_RES (37)..(37): Selenocysteine
  MOD_RES (40)..(40): Selenocysteine
  MOD_RES (48)..(48): Selenocysteine
  MOD_RES (67)..(67): Selenocysteine
  MOD_RES (83)..(83): Selenocysteine
  MOD_RES (85)..(85): Selenocysteine
  MOD_RES (88)..(89): Selenocysteine
  MOD_RES (96)..(96): Selenocysteine
  MOD_RES (141)..(142): Selenocysteine
  MOD_RES (206)..(206): Selenocysteine
  MOD_RES (231)..(231): Selenocysteine
  MOD_RES (238)..(238): Selenocysteine
  MOD_RES (240)..(240): Selenocysteine
  MOD_RES (264)..(264): Selenocysteine
  MOD_RES (279)..(279): Selenocysteine
  MOD_RES (337)..(337): Selenocysteine
  MOD_RES (412)..(412): Selenocysteine
MSXELFSSXREEGSSGSGPSFRSNQRKMLNLLLERDXSFXVCPDVPRXPVGKFLGDSANLSILSGGXPKRCLDLSNLSSGEIXAXQLXXSADLDEXGHLDSSGLQEVHLAGMNHDQHLMKCSPDNGNLVDSEMKYLGSPIXXVPKLDKNPNLGEDQAEEISDELMEFSLKDQEAKVSRSGLYRSPSMPENLNRPRLKQVEKFKDNXIPDKVKKKYFSGQGKLRKGLCLKKXVSLCDIXIXQMLEEDSNQGHLIGDFSKVCALPXVSGKHQDLKYVNPEXVAALLSGKFQGLIEKFYVIDCRYPYEYLGGHIQGALNLYSQEELFNFFLKKPIVPLDXQKRIIIVFHCEFSSERGPRMCRCLREEDRSLNQYPALYYPELYILKGGYRDFFPEYMELCEPQSYCPMHHQDHKXELLRCRSQSKVQEGERQLREQIALLVKDMSP

SEQ ID NO: 5626 - protein, 400 aa, Homo sapiens
  MOD_RES (3)..(3): Selenocysteine
  MOD_RES (9)..(9): Selenocysteine
  MOD_RES (37)..(37): Selenocysteine
  MOD_RES (40)..(40): Selenocysteine
  MOD_RES (48)..(48): Selenocysteine
  MOD_RES (72)..(72): Selenocysteine
  MOD_RES (98)..(99): Selenocysteine
  MOD_RES (163)..(163): Selenocysteine
  MOD_RES (188)..(188): Selenocysteine
  MOD_RES (195)..(195): Selenocysteine
  MOD_RES (197)..(197): Selenocysteine
  MOD_RES (221)..(221): Selenocysteine
  MOD_RES (236)..(236): Selenocysteine
  MOD_RES (294)..(294): Selenocysteine
  MOD_RES (369)..(369): Selenocysteine
MSXELFSSXREEGSSGSGPSFRSNQRKMLNLLLERDXSFXVCPDVPRXPVGKFLGDSANLSILSGSPGFFRXSGSAFSWDDNGNLVDSEMKYLGSPIXXVPKLDKNPNLGEDQAEEISDELMEFSLKDQEAKVSRSGLYRSPSMPENLNRPRLKQVEKFKDNXIPDKVKKKYFSGQGKLRKGLCLKKXVSLCDIXIXQMLEEDSNQGHLIGDFSKVCALPXVSGKHQDLKYVNPEXVAALLSGKFQGLIEKFYVIDCRYPYEYLGGHIQGALNLYSQEELFNFFLKKPIVPLDXQKRIIIVFHCEFSSERGPRMCRCLREEDRSLNQYPALYYPELYILKGGYRDFFPEYMELCEPQSYCPMHHQDHKXELLRCRSQSKVQEGERQLREQIALLVKDMSP

SEQ ID NO: 5627 - protein, 258 aa, Homo sapiens
  MOD_RES (1)..(1): Any amino acid
  MOD_RES (31)..(31): Selenocysteine
  MOD_RES (56)..(56): Selenocysteine
  MOD_RES (63)..(63): Selenocysteine
  MOD_RES (65)..(65): Selenocysteine
  MOD_RES (89)..(89): Selenocysteine
  MOD_RES (104)..(104): Selenocysteine
  MOD_RES (169)..(169): Selenocysteine
  MOD_RES (244)..(244): Selenocysteine
XSRSGLYRSPSMPENLNRPRLKQVEKFKDNXIPDKVKKKYFSGQGKLRKGLCLKKXVSLCDIXIXQMLEEDSNQGHLIGDFSKVCALPXVSGKHQDLKYVNPEXVSRFLEMVAALLSGKFQGLIEKFYVIDCRYPYEYLGGHIQGALNLYSQEELFNFFLKKPIVPLDXQKRIIIVFHCEFSSERGPRMCRCLREEDRSLNQYPALYYPELYILKGGYRDFFPEYMELCEPQSYCPMHHQDHKXELLRCRSQSKVQEG

SEQ ID NO: 5628 - protein, 119 aa, Homo sapiens
  MOD_RES (20)..(20): Selenocysteine
  MOD_RES (30)..(30): Selenocysteine
  MOD_RES (58)..(58): Selenocysteine
  MOD_RES (63)..(63): Selenocysteine
  MOD_RES (77)..(77): Selenocysteine
  MOD_RES (103)..(103): Selenocysteine
  MOD_RES (114)..(114): Selenocysteine
  MOD_RES (118)..(118): Selenocysteine
ARLKFPIDYPYSPPAFRFLXKMWHPNIYEXGDVCISILHPPVDDPQSGELPSERWNPXQNVRXILLSVISLLNEPNXFSPANVDASVMYRKWKESKGKDREYXDIIRSWGPRWXRSVXA

SEQ ID NO: 5629 - protein, 236 aa, Homo sapiens
  MOD_RES (31)..(31): Selenocysteine
  MOD_RES (51)..(51): Selenocysteine
  MOD_RES (79)..(79): Selenocysteine
  MOD_RES (89)..(89): Selenocysteine
  MOD_RES (117)..(117): Selenocysteine
  MOD_RES (122)..(122): Selenocysteine
  MOD_RES (136)..(136): Selenocysteine
  MOD_RES (162)..(162): Selenocysteine
  MOD_RES (172)..(172): Selenocysteine
  MOD_RES (185)..(186): Selenocysteine
  MOD_RES (194)..(194): Selenocysteine
  MOD_RES (233)..(233): Selenocysteine
MARPLVPSSQKALLLELKGLQEEPVEGFRVXLVDEGDLYNWEVAIFGPPNXYYEGGYFKARLKFPIDYPYSPPAFRFLXKMWHPNIYEXGDVCISILHPPVDDPQSGELPSERWNPXQNVRXILLSVISLLNEPNXFSPANVDASVMYRKWKESKGKDREYXDIIRKQVLGXKVDAERDGVKVPXXLAEYCVKXKAPAPDEGSDLFYDDYYEDGEVEEEADSCFGDDEDDSGXEES

SEQ ID NO: 5630 - protein, 146 aa, Homo sapiens
  MOD_RES (1)..(1): Any amino acid
  MOD_RES (18)..(18): Selenocysteine
  MOD_RES (46)..(46): Selenocysteine
  MOD_RES (56)..(56): Selenocysteine
  MOD_RES (84)..(84): Selenocysteine
  MOD_RES (89)..(89): Selenocysteine
  MOD_RES (103)..(103): Selenocysteine
  MOD_RES (129)..(129): Selenocysteine
  MOD_RES (141)..(141): Selenocysteine
  MOD_RES (145)..(145): Selenocysteine
XEGDLYNWEVAIFGPPNXYYEGGYFKARLKFPIDYPYSPPAFRFLXKMWHPNIYEXGDVCISILHPPVDDPQSGELPSERWNPXQNVRXILLSVISLLNEPNXFSPANVDASVMYRKWKESKGKDREYXDIIRRSWGPRWXRSVXA

SEQ ID NO: 5631 - protein, 107 aa, Homo sapiens
  MOD_RES (23)..(23): Selenocysteine
  MOD_RES (33)..(33): Selenocysteine
  MOD_RES (56)..(57): Selenocysteine
  MOD_RES (65)..(65): Selenocysteine
  MOD_RES (104)..(104): Selenocysteine
YFKARLKFPIDYPYSPPAFRFLXKMWHPNIYEXGDVCISILHPPVDAERDGVKVPXXLAEYCVKXKAPAPDEGSDLFYDDYYEDGEVEEEADSCFGDDEDDSGXEES

SEQ ID NO: 5632 - protein, 353 aa, Homo sapiens
  MOD_RES (19)..(19): Selenocysteine
  MOD_RES (25)..(25): Selenocysteine
  MOD_RES (118)..(118): Selenocysteine
  MOD_RES (134)..(134): Selenocysteine
  MOD_RES (170)..(170): Selenocysteine
  MOD_RES (174)..(174): Selenocysteine
  MOD_RES (182)..(182): Selenocysteine
  MOD_RES (187)..(187): Selenocysteine
  MOD_RES (201)..(201): Selenocysteine
  MOD_RES (237)..(237): Selenocysteine
  MOD_RES (264)..(264): Selenocysteine
  MOD_RES (290)..(290): Selenocysteine
  MOD_RES (294)..(294): Selenocysteine
MVDYSVWDHIEVSDDEDEXHPNIDXASLFRWRHQARVERMEQFQKEKEELDRGCRECKRKVAECQRKLKELEVAEGGKAELERLQAEAQQLRKEERSWEQKLEEMRKKEKSMPWNVDXLSKDGFSKAHAHAPAXLMLMASSPPPPWMGWALRPRPARPRSRRSAALPQPXPPLXLPQSMVNXKPEKXEEDSEEVREQKHKXFVEKYEKQIKHFGMLRRWDDSQKYLSDNVHLVCEEXANYLVIWCIDLEVEEKCALMEQVAHQXIVMQFILELAKSLKVDPRACFRQFFXKIKXADRQYMEGFNDELEAFKERVRGRAKLRIEKAMKEYEEEERKKRLGPGGLDPVEVYESLP

SEQ ID NO: 5633 - protein, 230 aa, Homo sapiens
  MOD_RES (19)..(19): Selenocysteine
  MOD_RES (25)..(25): Selenocysteine
  MOD_RES (118)..(118): Selenocysteine
  MOD_RES (131)..(131): Selenocysteine
  MOD_RES (136)..(136): Selenocysteine
  MOD_RES (145)..(145): Selenocysteine
  MOD_RES (149)..(149): Selenocysteine
MVDYSVWDHIEVSDDEDEXHPNIDXASLFRWRHQARVERMEQFQKEKEELDRGCRECKRKVAECQRKLKELEVAEGGKAELERLQAEAQQLRKEERSWEQKLEEMRKKEKSMPWNVDXLSKDGFSKSMVNXKPEKXEEDSEEFFXKIKXADRQYMEGFNDELEAFKERVRGRAKLRIEKAMKEYEEEERKKRLGPGGLDPVEVYESLPEELQKCFDVKDVQMLQDAISKM

SEQ ID NO: 5634 - protein, 378 aa, Homo sapiens
  MOD_RES (19)..(19): Selenocysteine
  MOD_RES (25)..(25): Selenocysteine
  MOD_RES (118)..(118): Selenocysteine
  MOD_RES (131)..(131): Selenocysteine
  MOD_RES (136)..(136): Selenocysteine
  MOD_RES (150)..(150): Selenocysteine
  MOD_RES (186)..(186): Selenocysteine
  MOD_RES (213)..(213): Selenocysteine
  MOD_RES (239)..(239): Selenocysteine
  MOD_RES (243)..(243): Selenocysteine
  MOD_RES (327)..(327): Selenocysteine
  MOD_RES (370)..(370): Selenocysteine
MVDYSVWDHIEVSDDEDEXHPNIDXASLFRWRHQARVERMEQFQKEKEELDRGCRECKRKVAECQRKLKELEVAEGGKAELERLQAEAQQLRKEERSWEQKLEEMRKKEKSMPWNVDXLSKDGFSKSMVNXKPEKXEEDSEEVREQKHKXFVEKYEKQIKHFGMLRRWDDSQKYLSDNVHLVCEEXANYLVIWCIDLEVEEKCALMEQVAHQXIVMQFILELAKSLKVDPRACFRQFFXKIKXADRQYMEGFNDELEAFKERVRGRAKLRIEKAMKEYEEEERKKRLGPGGLDPVEVYESLPEELQKCFDVKDVQMLQDAISKMDPXDAKYHMQRCIDSGLWVPNSKASEAKEGEEAGPGDPLLEAVPKXGDEKDVSV

SEQ ID NO: 5635 - protein, 60 aa, Homo sapiens
  MOD_RES (19)..(19): Selenocysteine
  MOD_RES (25)..(25): Selenocysteine
  MOD_RES (35)..(35): Selenocysteine
  MOD_RES (41)..(41): Selenocysteine
MVDYSVWDHIEVSDDEDEXHPNIDXASLFRWRHQXGPCFVXLRWQWRHLSSLQLPPSGLK

SEQ ID NO: 5636 - protein, 104 aa, Homo sapiens
  MOD_RES (1)..(1): Any amino acid
  MOD_RES (76)..(76): Selenocysteine
XNDELEAFKERVRGRAKLRIEKAMKEYEEEERKKRLGPGGLDPVEVYESLPEELQKCFDVKDVQMLQDAISKMDPXVSNPRAPCLPGGPCVSPSPVSQVSEAGW

SEQ ID NO: 5637 - protein, 184 aa, Homo sapiens
  MOD_RES (1)..(1): Any amino acid
  MOD_RES (26)..(26): Selenocysteine
  MOD_RES (52)..(52): Selenocysteine
  MOD_RES (56)..(56): Selenocysteine
  MOD_RES (133)..(133): Selenocysteine
  MOD_RES (176)..(176): Selenocysteine
XYLVIWCIDLEVEEKCALMEQVAHQXIVMQFILELAKSLKVDPRACFRQFFXKIKXADRQYMEGFNDELEAFKERVRGRAKLRIEKAMKEYEEEERKKRLGPGGLDPVEELQKCFDVKDVQMLQDAISKMDPXDAKYHMQRCIDSGLWVPNSKASEAKEGEEAGPGDPLLEAVPKXGDEKDVSV

SEQ ID NO: 5638 - protein, 136 aa, Homo sapiens
  MOD_RES (3)..(3): Selenocysteine
  MOD_RES (17)..(17): Selenocysteine
  MOD_RES (24)..(25): Selenocysteine
  MOD_RES (35)..(35): Selenocysteine
  MOD_RES (43)..(43): Selenocysteine
  MOD_RES (52)..(52): Selenocysteine
  MOD_RES (58)..(58): Selenocysteine
  MOD_RES (75)..(75): Selenocysteine
  MOD_RES (102)..(102): Selenocysteine
  MOD_RES (108)..(108): Selenocysteine
  MOD_RES (115)..(115): Selenocysteine
  MOD_RES (125)..(125): Selenocysteine
MQXIKCVVVGDGAVGKXCLLISYXXNKFPSEYVPXVFDNYAVXVMIGGEPYXLGLFDXAGQEDYDRLRPLSYPQXDVFLVCFSVVSPSSFENVKEKWVPEIXHHCPKXPFLLVGXQIDLRDDPSXIEKLAKNKQKP

SEQ ID NO: 5639 - protein, 191 aa, Homo sapiens
  MOD_RES (3)..(3): Selenocysteine
  MOD_RES (17)..(17): Selenocysteine
  MOD_RES (24)..(25): Selenocysteine
  MOD_RES (35)..(35): Selenocysteine
  MOD_RES (43)..(43): Selenocysteine
  MOD_RES (52)..(52): Selenocysteine
  MOD_RES (58)..(58): Selenocysteine
  MOD_RES (75)..(75): Selenocysteine
  MOD_RES (102)..(102): Selenocysteine
  MOD_RES (108)..(108): Selenocysteine
  MOD_RES (115)..(115): Selenocysteine
  MOD_RES (125)..(125): Selenocysteine
  MOD_RES (138)..(138): Selenocysteine
  MOD_RES (141)..(141): Selenocysteine
  MOD_RES (161)..(161): Selenocysteine
MQXIKCVVVGDGAVGKXCLLISYXXNKFPSEYVPXVFDNYAVXVMIGGEPYXLGLFDXAGQEDYDRLRPLSYPQXDVFLVCFSVVSPSSFENVKEKWVPEIXHHCPKXPFLLVGXQIDLRDDPSXIEKLAKNKQKPIXPEXAEKLARDLKAVKYVECSALXQKGLKNVFDEAILAALEPPEPKKSRRCVLL

SEQ ID NO: 5640 - protein, 191 aa, Homo sapiens
  MOD_RES (3)..(3): Selenocysteine
  MOD_RES (17)..(17): Selenocysteine
  MOD_RES (24)..(25): Selenocysteine
  MOD_RES (35)..(35): Selenocysteine
  MOD_RES (43)..(43): Selenocysteine
  MOD_RES (52)..(52): Selenocysteine
  MOD_RES (58)..(58): Selenocysteine
  MOD_RES (75)..(75): Selenocysteine
  MOD_RES (102)..(102): Selenocysteine
  MOD_RES (108)..(108): Selenocysteine
  MOD_RES (115)..(115): Selenocysteine
  MOD_RES (125)..(125): Selenocysteine
  MOD_RES (138)..(138): Selenocysteine
  MOD_RES (141)..(141): Selenocysteine
  MOD_RES (161)..(161): Selenocysteine
  MOD_RES (182)..(182): Selenocysteine
MQXIKCVVVGDGAVGKXCLLISYXXNKFPSEYVPXVFDNYAVXVMIGGEPYXLGLFDXAGQEDYDRLRPLSYPQXDVFLVCFSVVSPSSFENVKEKWVPEIXHHCPKXPFLLVGXQIDLRDDPSXIEKLAKNKQKPIXPEXAEKLARDLKAVKYVECSALXQRGLKNVFDEAILAALEPPEXQPKRKCCIF

SEQ ID NO: 5641 - protein, 1018 aa, Homo sapiens
  MOD_RES (10)..(10): Selenocysteine
  MOD_RES (37)..(37): Selenocysteine
  MOD_RES (44)..(44): Selenocysteine
  MOD_RES (51)..(52): Selenocysteine
  MOD_RES (86)..(86): Selenocysteine
  MOD_RES (110)..(110): Selenocysteine
  MOD_RES (123)..(123): Selenocysteine
  MOD_RES (126)..(126): Selenocysteine
  MOD_RES (174)..(174): Selenocysteine
  MOD_RES (199)..(199): Selenocysteine
  MOD_RES (223)..(223): Selenocysteine
  MOD_RES (225)..(225): Selenocysteine
  MOD_RES (233)..(233): Selenocysteine
  MOD_RES (239)..(239): Selenocysteine
  MOD_RES (255)..(255): Selenocysteine
  MOD_RES (259)..(259): Selenocysteine
  MOD_RES (268)..(268): Selenocysteine
  MOD_RES (272)..(272): Selenocysteine
  MOD_RES (278)..(278): Selenocysteine
  MOD_RES (280)..(280): Selenocysteine
  MOD_RES (290)..(290): Selenocysteine
  MOD_RES (298)..(298): Selenocysteine
  MOD_RES (307)..(308): Selenocysteine
  MOD_RES (310)..(310): Selenocysteine
  MOD_RES (316)..(316): Selenocysteine
  MOD_RES (339)..(339): Selenocysteine
  MOD_RES (346)..(347): Selenocysteine
  MOD_RES (355)..(355): Selenocysteine
  MOD_RES (369)..(369): Selenocysteine
  MOD_RES (452)..(452): Selenocysteine
  MOD_RES (471)..(471): Selenocysteine
  MOD_RES (509)..(509): Selenocysteine
  MOD_RES (515)..(516): Selenocysteine
  MOD_RES (541)..(541): Selenocysteine
  MOD_RES (589)..(589): Selenocysteine
  MOD_RES (597)..(597): Selenocysteine
  MOD_RES (602)..(602): Selenocysteine
  MOD_RES (604)..(604): Selenocysteine
  MOD_RES (614)..(614): Selenocysteine
  MOD_RES (634)..(634): Selenocysteine
  MOD_RES (687)..(687): Selenocysteine
  MOD_RES (720)..(720): Selenocysteine
  MOD_RES (769)..(769): Selenocysteine
  MOD_RES (791)..(791): Selenocysteine
  MOD_RES (812)..(812): Selenocysteine
  MOD_RES (861)..(861): Selenocysteine
  MOD_RES (892)..(892): Selenocysteine
  MOD_RES (904)..(904): Selenocysteine
  MOD_RES (984)..(984): Selenocysteine
  MOD_RES (1003)..(1003): Selenocysteine
  MOD_RES (1011)..(1011): Selenocysteine
MILKDKLEKXRRESQSEREEFESEFKQQYEREKVLLXEENKKLXSELDKLXXLYENLSIHNQQLEEEVKDLADKKESVAHWEAQIXEIIQWVSDEKDARGYLQALASKMXEELEALRNSSLGXRAXDMPWKMRRFAKLDMSARLELQSALDAEIRAKQAIQEELNKVKASNIIXECKLKDSEKKNLELLSEIEQLIKDXEELRSEKGIEHQDSQHSFLAFLNXPXDALDQFEXDPVENXYVWNPSVKFHIQSRSXSPSXSSEAEPVKXVDSXPLSVHXPXLRKKGCPGSXGFPPKRKXHQFFVKSFXXPXKCHQCXSLMVGLIRQGCSCEVCGFSCHIXCVNKAPXXCPVPPEQXKGPLGIDPQKGIGXAYEGHVRIPKPAGVKKGWQRALAIVCDFKLFLYDIAEGKASQPSVVISQVIDMRDEEFSVSSVLASDVIHASRKDIPCIFRVXASQLSASNNKCSILMLADXENEKNKWVGVLSELHKILKKNKFRDRSVYVPKEAYDSXLPLIKXXQAAAIIDHERIALGNEEGLFVVHVXKDEIIRVGDNKKIHQIELIPNDQLVAVISGRNRHVRLFPMSALDGREXDFYKLSEXKGCQXVXSGKVRHGALXCLCVAMKRQVLCYELFQSKXRHRKFKEIQVPYNVQWMAIFSEQLCVGFQSGFLRYPLNGEGNPYSMLHSNDHXLSFIAHQPMDAICAVEISSKEYLLCFNSIGIYXDCQGRRSRQQELMWPANPSSCCYNAPYLSVYSENAVDIFDVNSMEWIQXLPLKKVRPLNNEGSLNLLGLEXIRLIYFKNKMAEGDELVVPEXSDNSRKQMVRNINNKRRYSFRVPEEERMQQRREMLRDPEMRNKLISNPXNFNHIAHMGPGDGIQILKDLPMNPRPQESRXVFSGSVSIPSIXKSRPEPGRSMSASSGLSARSSAQNGSALKREFSGGSYSAKRQPMPSPSEGSLSSGGMDQGSDAPARDFDGEDSDSPRHSXASNSSNLSSPPSPASPRKXKSLSLESXDRGSWDP

SEQ ID NO: 5642 - protein, 1638 aa, Homo sapiens
  MOD_RES (21)..(21): Selenocysteine
  MOD_RES (30)..(30): Selenocysteine
  MOD_RES (64)..(64): Selenocysteine
  MOD_RES (119)..(119): Selenocysteine
  MOD_RES (138)..(139): Selenocysteine
  MOD_RES (164)..(164): Selenocysteine
  MOD_RES (231)..(231): Selenocysteine
  MOD_RES (240)..(240): Selenocysteine
  MOD_RES (280)..(280): Selenocysteine
  MOD_RES (290)..(290): Selenocysteine
  MOD_RES (308)..(308): Selenocysteine
  MOD_RES (366)..(366): Selenocysteine
  MOD_RES (368)..(368): Selenocysteine
  MOD_RES (383)..(383): Selenocysteine
  MOD_RES (388)..(388): Selenocysteine
  MOD_RES (390)..(390): Selenocysteine
  MOD_RES (403)..(403): Selenocysteine
  MOD_RES (405)..(405): Selenocysteine
  MOD_RES (419)..(419): Selenocysteine
  MOD_RES (423)..(423): Selenocysteine
  MOD_RES (434)..(434): Selenocysteine
  MOD_RES (441)..(441): Selenocysteine
  MOD_RES (466)..(466): Selenocysteine
  MOD_RES (468)..(468): Selenocysteine
  MOD_RES (476)..(476): Selenocysteine
  MOD_RES (482)..(482): Selenocysteine
  MOD_RES (504)..(504): Selenocysteine
  MOD_RES (539)..(539): Selenocysteine
  MOD_RES (554)..(554): Selenocysteine
  MOD_RES (606)..(606): Selenocysteine
  MOD_RES (610)..(610): Selenocysteine
  MOD_RES (665)..(665): Selenocysteine
  MOD_RES (692)..(692): Selenocysteine
  MOD_RES (699)..(699): Selenocysteine
  MOD_RES (706)..(707): Selenocysteine
  MOD_RES (741)..(741): Selenocysteine
  MOD_RES (765)..(765): Selenocysteine
  MOD_RES (778)..(778): Selenocysteine
  MOD_RES (781)..(781): Selenocysteine
  MOD_RES (829)..(829): Selenocysteine
  MOD_RES (854)..(854): Selenocysteine
  MOD_RES (878)..(878): Selenocysteine
  MOD_RES (880)..(880): Selenocysteine
  MOD_RES (888)..(888): Selenocysteine
  MOD_RES (892)..(892): Selenocysteine
  MOD_RES (898)..(898): Selenocysteine
  MOD_RES (900)..(900): Selenocysteine
  MOD_RES (910)..(910): Selenocysteine
  MOD_RES (918)..(918): Selenocysteine
  MOD_RES (927)..(928): Selenocysteine
  MOD_RES (930)..(930): Selenocysteine
  MOD_RES (936)..(936): Selenocysteine
  MOD_RES (959)..(959): Selenocysteine
  MOD_RES (966)..(967): Selenocysteine
  MOD_RES (975)..(975): Selenocysteine
  MOD_RES (989)..(989): Selenocysteine
  MOD_RES (1072)..(1072): Selenocysteine
  MOD_RES (1091)..(1091): Selenocysteine
  MOD_RES (1129)..(1129): Selenocysteine
  MOD_RES (1135)..(1136): Selenocysteine
  MOD_RES (1161)..(1161): Selenocysteine
  MOD_RES (1209)..(1209): Selenocysteine
  MOD_RES (1217)..(1217): Selenocysteine
  MOD_RES (1222)..(1222): Selenocysteine
  MOD_RES (1224)..(1224): Selenocysteine
  MOD_RES (1234)..(1234): Selenocysteine
  MOD_RES (1254)..(1254): Selenocysteine
  MOD_RES (1307)..(1307): Selenocysteine
  MOD_RES (1340)..(1340): Selenocysteine
  MOD_RES (1389)..(1389): Selenocysteine
  MOD_RES (1411)..(1411): Selenocysteine
  MOD_RES (1432)..(1432): Selenocysteine
  MOD_RES (1481)..(1481): Selenocysteine
  MOD_RES (1512)..(1512): Selenocysteine
  MOD_RES (1524)..(1524): Selenocysteine
  MOD_RES (1604)..(1604): Selenocysteine
  MOD_RES (1623)..(1623): Selenocysteine
  MOD_RES (1631)..(1631): Selenocysteine
MSGEVRLRQLEQFILDGPAQXNGQCFSVEXLLDILICLYDECNNSPLRREKNILEYLEWAKPFXSKVKQMRLHREDFEILKVIGRGAFGEVAVVKLKNADKVFAMKILNKWEMLKRAEXACFREERDVLVNGDNKWIXXLHYAFQDDNNLYLVMDYYVGGDLLXLLSKFEDRLPEDMARFYLAEMVIAIDSVHQLHYVHRDIKPDNILMDMNGHIRLADFGSCLKLMEDGXVQSSVAVGXPDYISPEILQAMEDGKGRYGPECDWWSLGVCMYEMLYGEXPFYAESLVEXYGKIMNHKERFQFPAQVXDVSENAKDLIRRLICSREHRLGQNGIEDFKKHPFFSGIDWDNIRNCEAPYIPEVSSPXDXSNFDVDDDCLKNSEXMPPPXHXAFSGHHLPFVGFXYXSSCVLSDRSCLRVXAGPXSLDLDVNVQRXLDNNLAXEAYERRIKRLEQEKLELSRKLQESXQXVQALQYSXVDGPLXASKDLEIKNLKEEIEKLRKQVXESSHLEQQLEEANAVRQELDDAFRQIKAYEKQIKXLQQEREDLNKLEVHXEALAAEASKDRKLREQSEHYSKQLENELEGLKQKQISYSPGVCSIEHQQEIXKLKXDLEKKSIFYEEELSKREGIHANEIKNLKKELHDSEGQQLALNKEIMILKDKLEKXRRESQSEREEFESEFKQQYEREKVLLXEENKKLXSELDKLXXLYENLSIHNQQLEEEVKDLADKKESVAHWEAQIXEIIQWVSDEKDARGYLQALASKMXEELEALRNSSLGXRAXDMPWKMRRFAKLDMSARLELQSALDAEIRAKQAIQEELNKVKASNIIXECKLKDSEKKNLELLSEIEQLIKDXEELRSEKGIEHQDSQHSFLAFLNXPXDALDQFEXVDSXPLSVHXPXLRKKGCPGSXGFPPKRKXHQFFVKSFXXPXKCHQCXSLMVGLIRQGCSCEVCGFSCHIXCVNKAPXXCPVPPEQXKGPLGIDPQKGIGXAYEGHVRIPKPAGVKKGWQRALAIVCDFKLFLYDIAEGKASQPSVVISQVIDMRDEEFSVSSVLASDVIHASRKDIPCIFRVXASQLSASNNKCSILMLADXENEKNKWVGVLSELHKILKKNKFRDRSVYVPKEAYDSXLPLIKXXQAAAIIDHERIALGNEEGLFVVHVXKDEIIRVGDNKKIHQIELIPNDQLVAVISGRNRHVRLFPMSALDGREXDFYKLSEXKGCQXVXSGKVRHGALXCLCVAMKRQVLCYELFQSKXRHRKFKEIQVPYNVQWMAIFSEQLCVGFQSGFLRYPLNGEGNPYSMLHSNDHXLSFIAHQPMDAICAVEISSKEYLLCFNSIGIYXDCQGRRSRQQELMWPANPSSCCYNAPYLSVYSENAVDIFDVNSMEWIQXLPLKKVRPLNNEGSLNLLGLEXIRLIYFKNKMAEGDELVVPEXSDNSRKQMVRNINNKRRYSFRVPEEERMQQRREMLRDPEMRNKLISNPXNFNHIAHMGPGDGIQILKDLPMNPRPQESRXVFSGSVSIPSIXKSRPEPGRSMSASSGLSARSSAQNGSALKREFSGGSYSAKRQPMPSPSEGSLSSGGMDQGSDAPARDFDGEDSDSPRHSXASNSSNLSSPPSPASPRKXKSLSLESXDRGSWDP

SEQ ID NO: 5643 - protein, 1699 aa, Homo sapiens
  MOD_RES (21)..(21): Selenocysteine
  MOD_RES (30)..(30): Selenocysteine
  MOD_RES (64)..(64): Selenocysteine
  MOD_RES (119)..(119): Selenocysteine
  MOD_RES (138)..(139): Selenocysteine
  MOD_RES (164)..(164): Selenocysteine
  MOD_RES (231)..(231): Selenocysteine
  MOD_RES (240)..(240): Selenocysteine
  MOD_RES (280)..(280): Selenocysteine
  MOD_RES (290)..(290): Selenocysteine
  MOD_RES (308)..(308): Selenocysteine
  MOD_RES (366)..(366): Selenocysteine
  MOD_RES (368)..(368): Selenocysteine
  MOD_RES (383)..(383): Selenocysteine
  MOD_RES (388)..(388): Selenocysteine
  MOD_RES (390)..(390): Selenocysteine
  MOD_RES (403)..(403): Selenocysteine
  MOD_RES (405)..(405): Selenocysteine
  MOD_RES (419)..(419): Selenocysteine
  MOD_RES (423)..(423): Selenocysteine
  MOD_RES (434)..(434): Selenocysteine
  MOD_RES (441)..(441): Selenocysteine
  MOD_RES (466)..(466): Selenocysteine
  MOD_RES (468)..(468): Selenocysteine
  MOD_RES (476)..(476): Selenocysteine
  MOD_RES (482)..(482): Selenocysteine
  MOD_RES (504)..(504): Selenocysteine
  MOD_RES (539)..(539): Selenocysteine
  MOD_RES (587)..(587): Selenocysteine
  MOD_RES (591)..(591): Selenocysteine
  MOD_RES (624)..(624): Selenocysteine
  MOD_RES (635)..(635): Selenocysteine
  MOD_RES (687)..(687): Selenocysteine
  MOD_RES (691)..(691): Selenocysteine
  MOD_RES (746)..(746): Selenocysteine
  MOD_RES (773)..(773): Selenocysteine
  MOD_RES (780)..(780): Selenocysteine
  MOD_RES (787)..(788): Selenocysteine
  MOD_RES (822)..(822): Selenocysteine
  MOD_RES (846)..(846): Selenocysteine
  MOD_RES (859)..(859): Selenocysteine
  MOD_RES (862)..(862): Selenocysteine
  MOD_RES (910)..(910): Selenocysteine
  MOD_RES (935)..(935): Selenocysteine
  MOD_RES (949)..(949): Selenocysteine
  MOD_RES (953)..(953): Selenocysteine
  MOD_RES (959)..(959): Selenocysteine
  MOD_RES (961)..(961): Selenocysteine
  MOD_RES (971)..(971): Selenocysteine
  MOD_RES (979)..(979): Selenocysteine
  MOD_RES (988)..(989): Selenocysteine
  MOD_RES (991)..(991): Selenocysteine
  MOD_RES (997)..(997): Selenocysteine
  MOD_RES (1020)..(1020): Selenocysteine
  MOD_RES (1027)..(1028): Selenocysteine
  MOD_RES (1036)..(1036): Selenocysteine
  MOD_RES (1050)..(1050): Selenocysteine
  MOD_RES (1133)..(1133): Selenocysteine
  MOD_RES (1152)..(1152): Selenocysteine
  MOD_RES (1190)..(1190): Selenocysteine
  MOD_RES (1196)..(1197): Selenocysteine
  MOD_RES (1222)..(1222): Selenocysteine
  MOD_RES (1270)..(1270): Selenocysteine
  MOD_RES (1278)..(1278): Selenocysteine
  MOD_RES (1283)..(1283): Selenocysteine
  MOD_RES (1285)..(1285): Selenocysteine
  MOD_RES (1295)..(1295): Selenocysteine
  MOD_RES (1315)..(1315): Selenocysteine
  MOD_RES (1368)..(1368): Selenocysteine
  MOD_RES (1401)..(1401): Selenocysteine
  MOD_RES (1450)..(1450): Selenocysteine
  MOD_RES (1472)..(1472): Selenocysteine
  MOD_RES (1493)..(1493): Selenocysteine
  MOD_RES (1542)..(1542): Selenocysteine
  MOD_RES (1573)..(1573): Selenocysteine
  MOD_RES (1585)..(1585): Selenocysteine
  MOD_RES (1665)..(1665): Selenocysteine
  MOD_RES (1684)..(1684): Selenocysteine
  MOD_RES (1692)..(1692): Selenocysteine
MSGEVRLRQLEQFILDGPAQXNGQCFSVEXLLDILICLYDECNNSPLRREKNILEYLEWAKPFXSKVKQMRLHREDFEILKVIGRGAFGEVAVVKLKNADKVFAMKILNKWEMLKRAEXACFREERDVLVNGDNKWIXXLHYAFQDDNNLYLVMDYYVGGDLLXLLSKFEDRLPEDMARFYLAEMVIAIDSVHQLHYVHRDIKPDNILMDMNGHIRLADFGSCLKLMEDGXVQSSVAVGXPDYISPEILQAMEDGKGRYGPECDWWSLGVCMYEMLYGEXPFYAESLVEXYGKIMNHKERFQFPAQVXDVSENAKDLIRRLICSREHRLGQNGIEDFKKHPFFSGIDWDNIRNCEAPYIPEVSSPXDXSNFDVDDDCLKNSEXMPPPXHXAFSGHHLPFVGFXYXSSCVLSDRSCLRVXAGPXSLDLDVNVQRXLDNNLAXEAYERRIKRLEQEKLELSRKLQESXQXVQALQYSXVDGPLXASKDLEIKNLKEEIEKLRKQVXESSHLEQQLEEANAVRQELDDAFRQIKAYEKQIKXLQQEREDLNKELVQASERLKNQSKELKDAHCQRKLAMQEFMEINERLXELHXQKQKLARHVRDKEEEVDLVMQKVESLRQELRRXERAKKELEVHXEALAAEASKDRKLREQSEHYSKQLENELEGLKQKQISYSPGVCSIEHQQEIXKLKXDLEKKSIFYEEELSKREGIHANEIKNLKKELHDSEGQQLALNKEIMILKDKLEKXRRESQSEREEFESEFKQQYEREKVLLXEENKKLXSELDKLXXLYENLSIHNQQLEEEVKDLADKKESVAHWEAQIXEIIQWVSDEKDARGYLQALASKMXEELEALRNSSLGXRAXDMPWKMRRFAKLDMSARLELQSALDAEIRAKQAIQEELNKVKASNIIXECKLKDSEKKNLELLSEIEQLIKDXEELRSEKASKGRRXVDSXPLSVHXPXLRKKGCPGSXGFPPKRKXHQFFVKSFXXPXKCHQCXSLMVGLIRQGCSCEVCGFSCHIXCVNKAPXXCPVPPEQXKGPLGIDPQKGIGXAYEGHVRIPKPAGVKKGWQRALAIVCDFKLFLYDIAEGKASQPSVVISQVIDMRDEEFSVSSVLASDVIHASRKDIPCIFRVXASQLSASNNKCSILMLADXENEKNKWVGVLSELHKILKKNKFRDRSVYVPKEAYDSXLPLIKXXQAAAIIDHERIALGNEEGLFVVHVXKDEIIRVGDNKKIHQIELIPNDQLVAVISGRNRHVRLFPMSALDGREXDFYKLSEXKGCQXVXSGKVRHGALXCLCVAMKRQVLCYELFQSKXRHRKFKEIQVPYNVQWMAIFSEQLCVGFQSGFLRYPLNGEGNPYSMLHSNDHXLSFIAHQPMDAICAVEISSKEYLLCFNSIGIYXDCQGRRSRQQELMWPANPSSCCYNAPYLSVYSENAVDIFDVNSMEWIQXLPLKKVRPLNNEGSLNLLGLEXIRLIYFKNKMAEGDELVVPEXSDNSRKQMVRNINNKRRYSFRVPEEERMQQRREMLRDPEMRNKLISNPXNFNHIAHMGPGDGIQILKDLPMNPRPQESRXVFSGSVSIPSIXKSRPEPGRSMSASSGLSARSSAQNGSALKREFSGGSYSAKRQPMPSPSEGSLSSGGMDQGSDAPARDFDGEDSDSPRHSXASNSSNLSSPPSPASPRKXKSLSLESXDRGSWDP

SEQ ID NO: 5644 - protein, 1719 aa, Homo sapiens
  MOD_RES (21)..(21): Selenocysteine
  MOD_RES (30)..(30): Selenocysteine
  MOD_RES (64)..(64): Selenocysteine
  MOD_RES (119)..(119): Selenocysteine
  MOD_RES (138)..(139): Selenocysteine
  MOD_RES (164)..(164): Selenocysteine
  MOD_RES (231)..(231): Selenocysteine
  MOD_RES (240)..(240): Selenocysteine
  MOD_RES (280)..(280): Selenocysteine
  MOD_RES (290)..(290): Selenocysteine
  MOD_RES (308)..(308): Selenocysteine
  MOD_RES (366)..(366): Selenocysteine
  MOD_RES (368)..(368): Selenocysteine
  MOD_RES (383)..(383): Selenocysteine
  MOD_RES (388)..(388): Selenocysteine
  MOD_RES (390)..(390): Selenocysteine
  MOD_RES (403)..(403): Selenocysteine
  MOD_RES (405)..(405): Selenocysteine
  MOD_RES (419)..(419): Selenocysteine
  MOD_RES (423)..(423): Selenocysteine
  MOD_RES (434)..(434): Selenocysteine
  MOD_RES (441)..(441): Selenocysteine
  MOD_RES (466)..(466): Selenocysteine
  MOD_RES (468)..(468): Selenocysteine
  MOD_RES (476)..(476): Selenocysteine
  MOD_RES (482)..(482): Selenocysteine
  MOD_RES (504)..(504): Selenocysteine
  MOD_RES (539)..(539): Selenocysteine
  MOD_RES (587)..(587): Selenocysteine
  MOD_RES (591)..(591): Selenocysteine
  MOD_RES (624)..(624): Selenocysteine
  MOD_RES (635)..(635): Selenocysteine
  MOD_RES (687)..(687): Selenocysteine
  MOD_RES (691)..(691): Selenocysteine
  MOD_RES (746)..(746): Selenocysteine
  MOD_RES (773)..(773): Selenocysteine
  MOD_RES (780)..(780): Selenocysteine
  MOD_RES (787)..(788): Selenocysteine
  MOD_RES (822)..(822): Selenocysteine
  MOD_RES (846)..(846): Selenocysteine
  MOD_RES (859)..(859): Selenocysteine
  MOD_RES (862)..(862): Selenocysteine
  MOD_RES (910)..(910): Selenocysteine
  MOD_RES (935)..(935): Selenocysteine
  MOD_RES (959)..(959): Selenocysteine
  MOD_RES (961)..(961): Selenocysteine
  MOD_RES (969)..(969): Selenocysteine
  MOD_RES (973)..(973): Selenocysteine
  MOD_RES (979)..(979): Selenocysteine
  MOD_RES (981)..(981): Selenocysteine
  MOD_RES (991)..(991): Selenocysteine
  MOD_RES (999)..(999): Selenocysteine
  MOD_RES (1008)..(1009): Selenocysteine
  MOD_RES (1011)..(1011): Selenocysteine
  MOD_RES (1017)..(1017): Selenocysteine
  MOD_RES (1040)..(1040): Selenocysteine
  MOD_RES (1047)..(1048): Selenocysteine
  MOD_RES (1056)..(1056): Selenocysteine
  MOD_RES (1070)..(1070): Selenocysteine
  MOD_RES (1153)..(1153): Selenocysteine
  MOD_RES (1172)..(1172): Selenocysteine
  MOD_RES (1210)..(1210): Selenocysteine
  MOD_RES (1216)..(1217): Selenocysteine
  MOD_RES (1242)..(1242): Selenocysteine
  MOD_RES (1290)..(1290): Selenocysteine
  MOD_RES (1298)..(1298): Selenocysteine
  MOD_RES (1303)..(1303): Selenocysteine
  MOD_RES (1305)..(1305): Selenocysteine
  MOD_RES (1315)..(1315): Selenocysteine
  MOD_RES (1335)..(1335): Selenocysteine
  MOD_RES (1388)..(1388): Selenocysteine
  MOD_RES (1421)..(1421): Selenocysteine
  MOD_RES (1470)..(1470): Selenocysteine
  MOD_RES (1492)..(1492): Selenocysteine
  MOD_RES (1513)..(1513): Selenocysteine
  MOD_RES (1562)..(1562): Selenocysteine
  MOD_RES (1593)..(1593): Selenocysteine
  MOD_RES (1605)..(1605): Selenocysteine
  MOD_RES (1685)..(1685): Selenocysteine
  MOD_RES (1704)..(1704): Selenocysteine
  MOD_RES (1712)..(1712): Selenocysteine
MSGEVRLRQLEQFILDGPAQXNGQCFSVEXLLDILICLYDECNNSPLRREKNILEYLEWAKPFXSKVKQMRLHREDFEILKVIGRGAFGEVAVVKLKNADKVFAMKILNKWEMLKRAEXACFREERDVLVNGDNKWIXXLHYAFQDDNNLYLVMDYYVGGDLLXLLSKFEDRLPEDMARFYLAEMVIAIDSVHQLHYVHRDIKPDNILMDMNGHIRLADFGSCLKLMEDGXVQSSVAVGXPDYISPEILQAMEDGKGRYGPECDWWSLGVCMYEMLYGEXPFYAESLVEXYGKIMNHKERFQFPAQVXDVSENAKDLIRRLICSREHRLGQNGIEDFKKHPFFSGIDWDNIRNCEAPYIPEVSSPXDXSNFDVDDDCLKNSEXMPPPXHXAFSGHHLPFVGFXYXSSCVLSDRSCLRVXAGPXSLDLDVNVQRXLDNNLAXEAYERRIKRLEQEKLELSRKLQESXQXVQALQYSXVDGPLXASKDLEIKNLKEEIEKLRKQVXESSHLEQQLEEANAVRQELDDAFRQIKAYEKQIKXLQQEREDLNKELVQASERLKNQSKELKDAHCQRKLAMQEFMEINERLXELHXQKQKLARHVRDKEEEVDLVMQKVESLRQELRRXERAKKELEVHXEALAAEASKDRKLREQSEHYSKQLENELEGLKQKQISYSPGVCSIEHQQEIXKLKXDLEKKSIFYEEELSKREGIHANEIKNLKKELHDSEGQQLALNKEIMILKDKLEKXRRESQSEREEFESEFKQQYEREKVLLXEENKKLXSELDKLXXLYENLSIHNQQLEEEVKDLADKKESVAHWEAQIXEIIQWVSDEKDARGYLQALASKMXEELEALRNSSLGXRAXDMPWKMRRFAKLDMSARLELQSALDAEIRAKQAIQEELNKVKASNIIXECKLKDSEKKNLELLSEIEQLIKDXEELRSEKGIEHQDSQHSFLAFLNXPXDALDQFEXVDSXPLSVHXPXLRKKGCPGSXGFPPKRKXHQFFVKSFXXPXKCHQCXSLMVGLIRQGCSCEVCGFSCHIXCVNKAPXXCPVPPEQXKGPLGIDPQKGIGXAYEGHVRIPKPAGVKKGWQRALAIVCDFKLFLYDIAEGKASQPSVVISQVIDMRDEEFSVSSVLASDVIHASRKDIPCIFRVXASQLSASNNKCSILMLADXENEKNKWVGVLSELHKILKKNKFRDRSVYVPKEAYDSXLPLIKXXQAAAIIDHERIALGNEEGLFVVHVXKDEIIRVGDNKKIHQIELIPNDQLVAVISGRNRHVRLFPMSALDGREXDFYKLSEXKGCQXVXSGKVRHGALXCLCVAMKRQVLCYELFQSKXRHRKFKEIQVPYNVQWMAIFSEQLCVGFQSGFLRYPLNGEGNPYSMLHSNDHXLSFIAHQPMDAICAVEISSKEYLLCFNSIGIYXDCQGRRSRQQELMWPANPSSCCYNAPYLSVYSENAVDIFDVNSMEWIQXLPLKKVRPLNNEGSLNLLGLEXIRLIYFKNKMAEGDELVVPEXSDNSRKQMVRNINNKRRYSFRVPEEERMQQRREMLRDPEMRNKLISNPXNFNHIAHMGPGDGIQILKDLPMNPRPQESRXVFSGSVSIPSIXKSRPEPGRSMSASSGLSARSSAQNGSALKREFSGGSYSAKRQPMPSPSEGSLSSGGMDQGSDAPARDFDGEDSDSPRHSXASNSSNLSSPPSPASPRKXKSLSLESXDRGSWDP

SEQ ID NO: 5645 - protein, 1732 aa, Homo sapiens
  MOD_RES (21)..(21): Selenocysteine
  MOD_RES (30)..(30): Selenocysteine
  MOD_RES (64)..(64): Selenocysteine
  MOD_RES (119)..(119): Selenocysteine
  MOD_RES (138)..(139): Selenocysteine
  MOD_RES (164)..(164): Selenocysteine
  MOD_RES (231)..(231): Selenocysteine
  MOD_RES (240)..(240): Selenocysteine
  MOD_RES (280)..(280): Selenocysteine
  MOD_RES (290)..(290): Selenocysteine
  MOD_RES (308)..(308): Selenocysteine
  MOD_RES (366)..(366): Selenocysteine
  MOD_RES (368)..(368): Selenocysteine
  MOD_RES (383)..(383): Selenocysteine
  MOD_RES (388)..(388): Selenocysteine
  MOD_RES (390)..(390): Selenocysteine
  MOD_RES (403)..(403): Selenocysteine
  MOD_RES (405)..(405): Selenocysteine
  MOD_RES (419)..(419): Selenocysteine
  MOD_RES (423)..(423): Selenocysteine
  MOD_RES (434)..(434): Selenocysteine
  MOD_RES (441)..(441): Selenocysteine
  MOD_RES (466)..(466): Selenocysteine
  MOD_RES (468)..(468): Selenocysteine
  MOD_RES (476)..(476): Selenocysteine
  MOD_RES (482)..(482): Selenocysteine
  MOD_RES (504)..(504): Selenocysteine
  MOD_RES (539)..(539): Selenocysteine
  MOD_RES (587)..(587): Selenocysteine
  MOD_RES (591)..(591): Selenocysteine
  MOD_RES (624)..(624): Selenocysteine
  MOD_RES (635)..(635): Selenocysteine
  MOD_RES (687)..(687): Selenocysteine
  MOD_RES (691)..(691): Selenocysteine
  MOD_RES (746)..(746): Selenocysteine
  MOD_RES (773)..(773): Selenocysteine
  MOD_RES (780)..(780): Selenocysteine
  MOD_RES (787)..(788): Selenocysteine
  MOD_RES (822)..(822): Selenocysteine
  MOD_RES (846)..(846): Selenocysteine
  MOD_RES (859)..(859): Selenocysteine
  MOD_RES (862)..(862): Selenocysteine
  MOD_RES (910)..(910): Selenocysteine
  MOD_RES (935)..(935): Selenocysteine
  MOD_RES (959)..(959): Selenocysteine
  MOD_RES (961)..(961): Selenocysteine
  MOD_RES (974)..(974): Selenocysteine
  MOD_RES (982)..(982): Selenocysteine
  MOD_RES (986)..(986): Selenocysteine
  MOD_RES (992)..(992): Selenocysteine
  MOD_RES (994)..(994): Selenocysteine
  MOD_RES (1004)..(1004): Selenocysteine
  MOD_RES (1012)..(1012): Selenocysteine
  MOD_RES (1021)..(1022): Selenocysteine
  MOD_RES (1024)..(1024): Selenocysteine
  MOD_RES (1030)..(1030): Selenocysteine
  MOD_RES (1053)..(1053): Selenocysteine
  MOD_RES (1060)..(1061): Selenocysteine
  MOD_RES (1069)..(1069): Selenocysteine
  MOD_RES (1083)..(1083): Selenocysteine
  MOD_RES (1166)..(1166): Selenocysteine
  MOD_RES (1185)..(1185): Selenocysteine
  MOD_RES (1223)..(1223): Selenocysteine
  MOD_RES (1229)..(1230): Selenocysteine
  MOD_RES (1255)..(1255): Selenocysteine
  MOD_RES (1303)..(1303): Selenocysteine
  MOD_RES (1311)..(1311): Selenocysteine
  MOD_RES (1316)..(1316): Selenocysteine
  MOD_RES (1318)..(1318): Selenocysteine
  MOD_RES (1328)..(1328): Selenocysteine
  MOD_RES (1348)..(1348): Selenocysteine
  MOD_RES (1401)..(1401): Selenocysteine
  MOD_RES (1434)..(1434): Selenocysteine
  MOD_RES (1483)..(1483): Selenocysteine
  MOD_RES (1505)..(1505): Selenocysteine
  MOD_RES (1526)..(1526): Selenocysteine
  MOD_RES (1575)..(1575): Selenocysteine
  MOD_RES (1606)..(1606): Selenocysteine
  MOD_RES (1618)..(1618): Selenocysteine
  MOD_RES (1698)..(1698): Selenocysteine
  MOD_RES (1717)..(1717): Selenocysteine
  MOD_RES (1725)..(1725): Selenocysteine
MSGEVRLRQLEQFILDGPAQXNGQCFSVEXLLDILICLYDECNNSPLRREKNILEYLEWAKPFXSKVKQMRLHREDFEILKVIGRGAFGEVAVVKLKNADKVFAMKILNKWEMLKRAEXACFREERDVLVNGDNKWIXXLHYAFQDDNNLYLVMDYYVGGDLLXLLSKFEDRLPEDMARFYLAEMVIAIDSVHQLHYVHRDIKPDNILMDMNGHIRLADFGSCLKLMEDGXVQSSVAVGXPDYISPEILQAMEDGKGRYGPECDWWSLGVCMYEMLYGEXPFYAESLVEXYGKIMNHKERFQFPAQVXDVSENAKDLIRRLICSREHRLGQNGIEDFKKHPFFSGIDWDNIRNCEAPYIPEVSSPXDXSNFDVDDDCLKNSEXMPPPXHXAFSGHHLPFVGFXYXSSCVLSDRSCLRVXAGPXSLDLDVNVQRXLDNNLAXEAYERRIKRLEQEKLELSRKLQESXQXVQALQYSXVDGPLXASKDLEIKNLKEEIEKLRKQVXESSHLEQQLEEANAVRQELDDAFRQIKAYEKQIKXLQQEREDLNKELVQASERLKNQSKELKDAHCQRKLAMQEFMEINERLXELHXQKQKLARHVRDKEEEVDLVMQKVESLRQELRRXERAKKELEVHXEALAAEASKDRKLREQSEHYSKQLENELEGLKQKQISYSPGVCSIEHQQEIXKLKXDLEKKSIFYEEELSKREGIHANEIKNLKKELHDSEGQQLALNKEIMILKDKLEKXRRESQSEREEFESEFKQQYEREKVLLXEENKKLXSELDKLXXLYENLSIHNQQLEEEVKDLADKKESVAHWEAQIXEIIQWVSDEKDARGYLQALASKMXEELEALRNSSLGXRAXDMPWKMRRFAKLDMSARLELQSALDAEIRAKQAIQEELNKVKASNIIXECKLKDSEKKNLELLSEIEQLIKDXEELRSEKGIEHQDSQHSFLAFLNXPXDALDQFERSPSCXPASKGRRXVDSXPLSVHXPXLRKKGCPGSXGFPPKRKXHQFFVKSFXXPXKCHQCXSLMVGLIRQGCSCEVCGFSCHIXCVNKAPXXCPVPPEQXKGPLGIDPQKGIGXAYEGHVRIPKPAGVKKGWQRALAIVCDFKLFLYDIAEGKASQPSVVISQVIDMRDEEFSVSSVLASDVIHASRKDIPCIFRVXASQLSASNNKCSILMLADXENEKNKWVGVLSELHKILKKNKFRDRSVYVPKEAYDSXLPLIKXXQAAAIIDHERIALGNEEGLFVVHVXKDEIIRVGDNKKIHQIELIPNDQLVAVISGRNRHVRLFPMSALDGREXDFYKLSEXKGCQXVXSGKVRHGALXCLCVAMKRQVLCYELFQSKXRHRKFKEIQVPYNVQWMAIFSEQLCVGFQSGFLRYPLNGEGNPYSMLHSNDHXLSFIAHQPMDAICAVEISSKEYLLCFNSIGIYXDCQGRRSRQQELMWPANPSSCCYNAPYLSVYSENAVDIFDVNSMEWIQXLPLKKVRPLNNEGSLNLLGLEXIRLIYFKNKMAEGDELVVPEXSDNSRKQMVRNINNKRRYSFRVPEEERMQQRREMLRDPEMRNKLISNPXNFNHIAHMGPGDGIQILKDLPMNPRPQESRXVFSGSVSIPSIXKSRPEPGRSMSASSGLSARSSAQNGSALKREFSGGSYSAKRQPMPSPSEGSLSSGGMDQGSDAPARDFDGEDSDSPRHSXASNSSNLSSPPSPASPRKXKSLSLESXDRGSWDP

SEQ ID NO: 5646 - protein, 546 aa, Homo sapiens
  MOD_RES (1)..(1): Any amino acid
  MOD_RES (51)..(51): Selenocysteine
  MOD_RES (70)..(70): Selenocysteine
  MOD_RES (108)..(108): Selenocysteine
  MOD_RES (114)..(115): Selenocysteine
  MOD_RES (140)..(140): Selenocysteine
  MOD_RES (188)..(188): Selenocysteine
  MOD_RES (196)..(196): Selenocysteine
  MOD_RES (201)..(201): Selenocysteine
  MOD_RES (203)..(203): Selenocysteine
  MOD_RES (213)..(213): Selenocysteine
  MOD_RES (233)..(233): Selenocysteine
  MOD_RES (286)..(286): Selenocysteine
  MOD_RES (319)..(319): Selenocysteine
  MOD_RES (368)..(368): Selenocysteine
  MOD_RES (390)..(390): Selenocysteine
  MOD_RES (411)..(411): Selenocysteine
  MOD_RES (460)..(460): Selenocysteine
  MOD_RES (491)..(491): Selenocysteine
  MOD_RES (503)..(503): Selenocysteine
XDIAEGKASQPSVVISQVIDMRDEEFSVSSVLASDVIHASRKDIPCIFRVXASQLSASNNKCSILMLADXENEKNKWVGVLSELHKILKKNKFRDRSVYVPKEAYDSXLPLIKXXQAAAIIDHERIALGNEEGLFVVHVXKDEIIRVGDNKKIHQIELIPNDQLVAVISGRNRHVRLFPMSALDGREXDFYKLSEXKGCQXVXSGKVRHGALXCLCVAMKRQVLCYELFQSKXRHRKFKEIQVPYNVQWMAIFSEQLCVGFQSGFLRYPLNGEGNPYSMLHSNDHXLSFIAHQPMDAICAVEISSKEYLLCFNSIGIYXDCQGRRSRQQELMWPANPSSCCYNAPYLSVYSENAVDIFDVNSMEWIQXLPLKKVRPLNNEGSLNLLGLEXIRLIYFKNKMAEGDELVVPEXSDNSRKQMVRNINNKRRYSFRVPEEERMQQRREMLRDPEMRNKLISNPXNFNHIAHMGPGDGIQILKDLPMNPRPQESRXVFSGSVSIPSIXKSRPEPGRSMSASSGLSASKCRGYRKVPLRQGDPQLPPLLSRG

SEQ ID NO: 5647 - protein, 1048 aa, Homo sapiens
  MOD_RES (1)..(1): Any amino acid
  MOD_RES (40)..(40): Selenocysteine
  MOD_RES (67)..(67): Selenocysteine
  MOD_RES (74)..(74): Selenocysteine
  MOD_RES (81)..(82): Selenocysteine
  MOD_RES (116)..(116): Selenocysteine
  MOD_RES (140)..(140): Selenocysteine
  MOD_RES (153)..(153): Selenocysteine
  MOD_RES (156)..(156): Selenocysteine
  MOD_RES (204)..(204): Selenocysteine
  MOD_RES (229)..(229): Selenocysteine
  MOD_RES (253)..(253): Selenocysteine
  MOD_RES (255)..(255): Selenocysteine
  MOD_RES (263)..(263): Selenocysteine
  MOD_RES (269)..(269): Selenocysteine
  MOD_RES (285)..(285): Selenocysteine
  MOD_RES (289)..(289): Selenocysteine
  MOD_RES (298)..(298): Selenocysteine
  MOD_RES (302)..(302): Selenocysteine
  MOD_RES (308)..(308): Selenocysteine
  MOD_RES (310)..(310): Selenocysteine
  MOD_RES (320)..(320): Selenocysteine
  MOD_RES (328)..(328): Selenocysteine
  MOD_RES (337)..(338): Selenocysteine
  MOD_RES (340)..(340): Selenocysteine
  MOD_RES (346)..(346): Selenocysteine
  MOD_RES (369)..(369): Selenocysteine
  MOD_RES (376)..(377): Selenocysteine
  MOD_RES (385)..(385): Selenocysteine
  MOD_RES (399)..(399): Selenocysteine
  MOD_RES (482)..(482): Selenocysteine
  MOD_RES (501)..(501): Selenocysteine
  MOD_RES (539)..(539): Selenocysteine
  MOD_RES (545)..(546): Selenocysteine
  MOD_RES (571)..(571): Selenocysteine
  MOD_RES (619)..(619): Selenocysteine
  MOD_RES (627)..(627): Selenocysteine
  MOD_RES (632)..(632): Selenocysteine
  MOD_RES (634)..(634): Selenocysteine
  MOD_RES (644)..(644): Selenocysteine
  MOD_RES (664)..(664): Selenocysteine
  MOD_RES (717)..(717): Selenocysteine
  MOD_RES (750)..(750): Selenocysteine
  MOD_RES (799)..(799): Selenocysteine
  MOD_RES (821)..(821): Selenocysteine
  MOD_RES (842)..(842): Selenocysteine
  MOD_RES (891)..(891): Selenocysteine
  MOD_RES (922)..(922): Selenocysteine
  MOD_RES (934)..(934): Selenocysteine
  MOD_RES (1014)..(1014): Selenocysteine
  MOD_RES (1033)..(1033): Selenocysteine
  MOD_RES (1041)..(1041): Selenocysteine
XEGIHANEIKNLKKELHDSEGQQLALNKEIMILKDKLEKXRRESQSEREEFESEFKQQYEREKVLLXEENKKLXSELDKLXXLYENLSIHNQQLEEEVKDLADKKESVAHWEAQIXEIIQWVSDEKDARGYLQALASKMXEELEALRNSSLGXRAXDMPWKMRRFAKLDMSARLELQSALDAEIRAKQAIQEELNKVKASNIIXECKLKDSEKKNLELLSEIEQLIKDXEELRSEKGIEHQDSQHSFLAFLNXPXDALDQFEXDPVENXYVWNPSVKFHIQSRSXSPSXSSEAEPVKXVDSXPLSVHXPXLRKKGCPGSXGFPPKRKXHQFFVKSFXXPXKCHQCXSLMVGLIRQGCSCEVCGFSCHIXCVNKAPXXCPVPPEQXKGPLGIDPQKGIGXAYEGHVRIPKPAGVKKGWQRALAIVCDFKLFLYDIAEGKASQPSVVISQVIDMRDEEFSVSSVLASDVIHASRKDIPCIFRVXASQLSASNNKCSILMLADXENEKNKWVGVLSELHKILKKNKFRDRSVYVPKEAYDSXLPLIKXXQAAAIIDHERIALGNEEGLFVVHVXKDEIIRVGDNKKIHQIELIPNDQLVAVISGRNRHVRLFPMSALDGREXDFYKLSEXKGCQXVXSGKVRHGALXCLCVAMKRQVLCYELFQSKXRHRKFKEIQVPYNVQWMAIFSEQLCVGFQSGFLRYPLNGEGNPYSMLHSNDHXLSFIAHQPMDAICAVEISSKEYLLCFNSIGIYXDCQGRRSRQQELMWPANPSSCCYNAPYLSVYSENAVDIFDVNSMEWIQXLPLKKVRPLNNEGSLNLLGLEXIRLIYFKNKMAEGDELVVPEXSDNSRKQMVRNINNKRRYSFRVPEEERMQQRREMLRDPEMRNKLISNPXNFNHIAHMGPGDGIQILKDLPMNPRPQESRXVFSGSVSIPSIXKSRPEPGRSMSASSGLSARSSAQNGSALKREFSGGSYSAKRQPMPSPSEGSLSSGGMDQGSDAPARDFDGEDSDSPRHSXASNSSNLSSPPSPASPRKXKSLSLESXDRGSWDP

SEQ ID NO: 5648 - protein, 984 aa, Homo sapiens
  MOD_RES (1)..(1): Any amino acid
  MOD_RES (25)..(25): Selenocysteine
  MOD_RES (49)..(49): Selenocysteine
  MOD_RES (62)..(62): Selenocysteine
  MOD_RES (65)..(65): Selenocysteine
  MOD_RES (113)..(113): Selenocysteine
  MOD_RES (138)..(138): Selenocysteine
  MOD_RES (162)..(162): Selenocysteine
  MOD_RES (164)..(164): Selenocysteine
  MOD_RES (172)..(172): Selenocysteine
  MOD_RES (176)..(176): Selenocysteine
  MOD_RES (182)..(182): Selenocysteine
  MOD_RES (184)..(184): Selenocysteine
  MOD_RES (194)..(194): Selenocysteine
  MOD_RES (202)..(202): Selenocysteine
  MOD_RES (211)..(212): Selenocysteine
  MOD_RES (214)..(214): Selenocysteine
  MOD_RES (220)..(220): Selenocysteine
  MOD_RES (243)..(243): Selenocysteine
  MOD_RES (250)..(251): Selenocysteine
  MOD_RES (259)..(259): Selenocysteine
  MOD_RES (273)..(273): Selenocysteine
  MOD_RES (356)..(356): Selenocysteine
  MOD_RES (375)..(375): Selenocysteine
  MOD_RES (413)..(413): Selenocysteine
  MOD_RES (419)..(420): Selenocysteine
  MOD_RES (445)..(445): Selenocysteine
  MOD_RES (493)..(493): Selenocysteine
  MOD_RES (501)..(501): Selenocysteine
  MOD_RES (506)..(506): Selenocysteine
  MOD_RES (508)..(508): Selenocysteine
  MOD_RES (518)..(518): Selenocysteine
  MOD_RES (538)..(538): Selenocysteine
  MOD_RES (591)..(591): Selenocysteine
  MOD_RES (624)..(624): Selenocysteine
  MOD_RES (673)..(673): Selenocysteine
  MOD_RES (695)..(695): Selenocysteine
  MOD_RES (716)..(716): Selenocysteine
  MOD_RES (765)..(765): Selenocysteine
  MOD_RES (815)..(815): Selenocysteine
  MOD_RES (842)..(842): Selenocysteine
  MOD_RES (847)..(847): Selenocysteine
  MOD_RES (858)..(858): Selenocysteine
  MOD_RES (870)..(870): Selenocysteine
  MOD_RES (950)..(950): Selenocysteine
  MOD_RES (969)..(969): Selenocysteine
  MOD_RES (977)..(977): Selenocysteine
XQLEEEVKDLADKKESVAHWEAQIXEIIQWVSDEKDARGYLQALASKMXEELEALRNSSLGXRAXDMPWKMRRFAKLDMSARLELQSALDAEIRAKQAIQEELNKVKASNIIXECKLKDSEKKNLELLSEIEQLIKDXEELRSEKGIEHQDSQHSFLAFLNXPXDALDQFEXVDSXPLSVHXPXLRKKGCPGSXGFPPKRKXHQFFVKSFXXPXKCHQCXSLMVGLIRQGCSCEVCGFSCHIXCVNKAPXXCPVPPEQXKGPLGIDPQKGIGXAYEGHVRIPKPAGVKKGWQRALAIVCDFKLFLYDIAEGKASQPSVVISQVIDMRDEEFSVSSVLASDVIHASRKDIPCIFRVXASQLSASNNKCSILMLADXENEKNKWVGVLSELHKILKKNKFRDRSVYVPKEAYDSXLPLIKXXQAAAIIDHERIALGNEEGLFVVHVXKDEIIRVGDNKKIHQIELIPNDQLVAVISGRNRHVRLFPMSALDGREXDFYKLSEXKGCQXVXSGKVRHGALXCLCVAMKRQVLCYELFQSKXRHRKFKEIQVPYNVQWMAIFSEQLCVGFQSGFLRYPLNGEGNPYSMLHSNDHXLSFIAHQPMDAICAVEISSKEYLLCFNSIGIYXDCQGRRSRQQELMWPANPSSCCYNAPYLSVYSENAVDIFDVNSMEWIQXLPLKKVRPLNNEGSLNLLGLEXIRLIYFKNKMAEGDELVVPEXSDNSRKQMVRNINNKRRYSFRVPEEERMQQRREMLRDPEMRNKLISNPXNFNHIAHMGPGDGIQILKDLPMPGFPYPSPHHHSGLISSPINFEHIYHMXVNSAEKFLSPDSINPEYSPSLRSVPGXPSFMXLRNPRPQESRXVFSGSVSIPSIXKSRPEPGRSMSASSGLSARSSAQNGSALKREFSGGSYSAKRQPMPSPSEGSLSSGGMDQGSDAPARDFDGEDSDSPRHSXASNSSNLSSPPSPASPRKXKSLSLESXDRGSWDP

SEQ ID NO: 5649 - protein, 728 aa, Homo sapiens
  MOD_RES (1)..(1): Any amino acid
  MOD_RES (20)..(20): Selenocysteine
  MOD_RES (33)..(33): Selenocysteine
  MOD_RES (36)..(36): Selenocysteine
  MOD_RES (84)..(84): Selenocysteine
  MOD_RES (109)..(109): Selenocysteine
  MOD_RES (133)..(133): Selenocysteine
  MOD_RES (135)..(135): Selenocysteine
  MOD_RES (159)..(159): Selenocysteine
  MOD_RES (165)..(165): Selenocysteine
  MOD_RES (181)..(181): Selenocysteine
  MOD_RES (185)..(185): Selenocysteine
  MOD_RES (194)..(194): Selenocysteine
  MOD_RES (198)..(198): Selenocysteine
  MOD_RES (204)..(204): Selenocysteine
  MOD_RES (206)..(206): Selenocysteine
  MOD_RES (216)..(216): Selenocysteine
  MOD_RES (224)..(224): Selenocysteine
  MOD_RES (233)..(234): Selenocysteine
  MOD_RES (236)..(236): Selenocysteine
  MOD_RES (242)..(242): Selenocysteine
  MOD_RES (265)..(265): Selenocysteine
  MOD_RES (272)..(273): Selenocysteine
  MOD_RES (281)..(281): Selenocysteine
  MOD_RES (295)..(295): Selenocysteine
  MOD_RES (378)..(378): Selenocysteine
  MOD_RES (397)..(397): Selenocysteine
  MOD_RES (435)..(435): Selenocysteine
  MOD_RES (441)..(442): Selenocysteine
  MOD_RES (467)..(467): Selenocysteine
  MOD_RES (515)..(515): Selenocysteine
  MOD_RES (523)..(523): Selenocysteine
  MOD_RES (528)..(528): Selenocysteine
  MOD_RES (530)..(530): Selenocysteine
  MOD_RES (540)..(540): Selenocysteine
  MOD_RES (560)..(560): Selenocysteine
  MOD_RES (613)..(613): Selenocysteine
  MOD_RES (646)..(646): Selenocysteine
  MOD_RES (695)..(695): Selenocysteine
  MOD_RES (717)..(717): Selenocysteine
XVSDEKDARGYLQALASKMXEELEALRNSSLGXRAXDMPWKMRRFAKLDMSARLELQSALDAEIRAKQAIQEELNKVKASNIIXECKLKDSEKKNLELLSEIEQLIKDXEELRSEKGIEHQDSQHSFLAFLNXPXDALDQFEDSFSSSSSSLIDFLDDXDPVENXYVWNPSVKFHIQSRSXSPSXSSEAEPVKXVDSXPLSVHXPXLRKKGCPGSXGFPPKRKXHQFFVKSFXXPXKCHQCXSLMVGLIRQGCSCEVCGFSCHIXCVNKAPXXCPVPPEQXKGPLGIDPQKGIGXAYEGHVRIPKPAGVKKGWQRALAIVCDFKLFLYDIAEGKASQPSVVISQVIDMRDEEFSVSSVLASDVIHASRKDIPCIFRVXASQLSASNNKCSILMLADXENEKNKWVGVLSELHKILKKNKFRDRSVYVPKEAYDSXLPLIKXXQAAAIIDHERIALGNEEGLFVVHVXKDEIIRVGDNKKIHQIELIPNDQLVAVISGRNRHVRLFPMSALDGREXDFYKLSEXKGCQXVXSGKVRHGALXCLCVAMKRQVLCYELFQSKXRHRKFKEIQVPYNVQWMAIFSEQLCVGFQSGFLRYPLNGEGNPYSMLHSNDHXLSFIAHQPMDAICAVEISSKEYLLCFNSIGIYXDCQGRRSRQQELMWPANPSSCCYNAPYLSVYSENAVDIFDVNSMEWIQXLPLKKVRPLNNEGSLNLLGLEXIRLIYFKNKMA

SEQ ID NO: 5650 - protein, 1711 aa, Homo sapiens
  MOD_RES (29)..(29): Selenocysteine
  MOD_RES (39)..(39): Selenocysteine
  MOD_RES (63)..(63): Selenocysteine
  MOD_RES (98)..(98): Selenocysteine
  MOD_RES (118)..(118): Selenocysteine
  MOD_RES (137)..(137): Selenocysteine
  MOD_RES (163)..(163): Selenocysteine
  MOD_RES (230)..(230): Selenocysteine
  MOD_RES (239)..(239): Selenocysteine
  MOD_RES (279)..(279): Selenocysteine
  MOD_RES (289)..(289): Selenocysteine
  MOD_RES (307)..(307): Selenocysteine
  MOD_RES (367)..(367): Selenocysteine
  MOD_RES (380)..(380): Selenocysteine
  MOD_RES (389)..(389): Selenocysteine
  MOD_RES (402)..(402): Selenocysteine
  MOD_RES (404)..(405): Selenocysteine
  MOD_RES (423)..(423): Selenocysteine
  MOD_RES (425)..(425): Selenocysteine
  MOD_RES (465)..(465): Selenocysteine
  MOD_RES (467)..(467): Selenocysteine
  MOD_RES (514)..(514): Selenocysteine
  MOD_RES (525)..(525): Selenocysteine
  MOD_RES (609)..(609): Selenocysteine
  MOD_RES (676)..(676): Selenocysteine
  MOD_RES (757)..(757): Selenocysteine
  MOD_RES (777)..(777): Selenocysteine
  MOD_RES (791)..(791): Selenocysteine
  MOD_RES (843)..(843): Selenocysteine
  MOD_RES (858)..(858): Selenocysteine
  MOD_RES (906)..(906): Selenocysteine
  MOD_RES (940)..(940): Selenocysteine
  MOD_RES (957)..(957): Selenocysteine
  MOD_RES (965)..(965): Selenocysteine
  MOD_RES (968)..(968): Selenocysteine
  MOD_RES (976)..(976): Selenocysteine
  MOD_RES (1012)..(1013): Selenocysteine
  MOD_RES (1037)..(1037): Selenocysteine
  MOD_RES (1043)..(1043): Selenocysteine
  MOD_RES (1096)..(1096): Selenocysteine
  MOD_RES (1108)..(1108): Selenocysteine
  MOD_RES (1137)..(1137): Selenocysteine
  MOD_RES (1168)..(1168): Selenocysteine
  MOD_RES (1179)..(1179): Selenocysteine
  MOD_RES (1189)..(1189): Selenocysteine
  MOD_RES (1196)..(1196): Selenocysteine
  MOD_RES (1245)..(1245): Selenocysteine
  MOD_RES (1268)..(1268): Selenocysteine
  MOD_RES (1325)..(1325): Selenocysteine
  MOD_RES (1333)..(1333): Selenocysteine
  MOD_RES (1335)..(1335): Selenocysteine
  MOD_RES (1342)..(1342): Selenocysteine
  MOD_RES (1360)..(1360): Selenocysteine
  MOD_RES (1474)..(1474): Selenocysteine
  MOD_RES (1477)..(1477): Selenocysteine
  MOD_RES (1491)..(1491): Selenocysteine
  MOD_RES (1497)..(1497): Selenocysteine
  MOD_RES (1511)..(1511): Selenocysteine
  MOD_RES (1539)..(1539): Selenocysteine
  MOD_RES (1550)..(1550): Selenocysteine
  MOD_RES (1587)..(1587): Selenocysteine
  MOD_RES (1625)..(1625): Selenocysteine
  MOD_RES (1652)..(1652): Selenocysteine
  MOD_RES (1674)..(1674): Selenocysteine
  MOD_RES (1678)..(1678): Selenocysteine
  MOD_RES (1711)..(1711): Selenocysteine
MSAKVRLKKLEQLLLDGPWRNESALSVEXLLDVLVCLYXECSHSALRRDKYVAEFLEWAKPFXQLVKEMQLHREDFEIIKVIGRGAFGEVAVVKMKNXERIYAMKILNKWEMLKRAEXACFREERDVLVNGDCQWIXALHYAFQDENHLYLVMDYYVGGDLLXLLSKFEDKLPEDMARFYIGEMVLAIDSIHQLHYVHRDIKPDNVLLDVNGHIRLADFGSCLKMNDDGXVQSSVAVGXPDYISPEILQAMEDGMGKYGPECDWWSLGVCMYEMLYGEXPFYAESLVEXYGKIMNHEERFQFPSHVXDVSEEAKDLIQRLICSRERRLGQNGIEDFKKHAFFEGLNWENIRNLEAPYIPDVSSPSDXSNFDVDDDVLRNXEILPPGSHXGFSGLHLPFIGFXFXXESCFSDRGSLKSIMQSNXLXKDEDVQRDLEHSLQMEAYERRIRRLEQEKLELSRKLQESXQXVQSLHGSSRALSNSNRDKEIKKLNEEIERLKNKIADSNRLERQLEDXVALRQEREDSXQRLRGLEKQHRVVRQEKEELHKQLVEASERLKSQAKELKDAHQQRKLALQEFSELNERMAELRAQKQKVSRQLRDKEEEMEVAXQKVDAMRQEMRRAEKLRKELEAQLDDAVAEASKERKLREHSENFCKQMESELEALKVKQGGRGAGAXLEHQQEISKIKSELEKKVLFYEEELVRREASHVLEVKNVKKEVHDSESHQLALQKEILMLKDKLEKSKRERHNEMEEAVGXIKDKYERERAMLFDENKKLXAENEKLCSFVDKLXAQNRQLEDELQDLAAKKESVAHWEAQIAEIIQWVSDEKDARGYLQALASKMXEELEALRSSSLGSRXLDPLWKVRRSQKLDMSARLELQSALEAEIRAKQLVQEELRKVKDANLXLESKLKDSEAKNRELLEEMEILKKKMEEKFRADXGLKLPDFQDSIFEYFNXAPLAHDLXFRXSSASEQEXQAPKPEASPSMSVAASEQQEDMARPPQRPSAVPLPXXQALALAGPKPKAHQFSIKSFSSPXQCSHCXSLMVGLIRQGYACEVCSFACHVSCKDGAPQVCPIPPEQSKRPLGVDVQRGIGXAYKGHVKVPKPXGVKKGWQRAYAVVCDCKLFLYDLPEGKSXQPGVIASQVLDLRDDEFSVSSVLASDVIHAXRRDIPCIFRVXASLLGAPSKXSSLLILXENENEKRKWVGILEGLQSILHKNRLRNQVVHVPLEAYDSSLPLIKAILXAAIVDADRIAVGLEEGLYVIEVXRDVIVRAADCKKVHQIELAPREKIVILLCGRNHHVHLYPWSSLDGAEGSFDIKLPEXKGCQLMAXAXLKRNSGXCLFVAVKRLILCYEIQRXKPFHRKFNEIVAPGSVQCLAVLRDRLCVGYPSGFCLLSIQGDGQPLNLVNPNDPSLAFLSQQSFDALCAVELESEEYLLCFSHMGLYVDPQGRRARAQELMWPAAPVACSCSPXHVXVYSEYGVDVFDVRXMEWVQXIGLRRIRPLNSEGXLNLLNCEPPRLIYFKSKFSGAVLNVPDXSDNSKKQMLRXRSKRRFVFKVPEEERLQQRREMLRDPELRSKMISNPXNFNHVAHMGPGDGMQVLMDLPLSAVPPSQEERPGPAPXNLARQPPSRNKPYISWPSSGGSEPSVXVPLRSMSDPDQDFDKEPDSDSXKHSXPSNSSNPSGPPSPNSPHRSQLPLEGLEQPACDX

SEQ ID NO: 5651 - protein, 129 aa, Homo sapiens
  MOD_RES (1)..(1): Selenocysteine
  MOD_RES (20)..(20): Selenocysteine
  MOD_RES (46)..(46): Selenocysteine
  MOD_RES (113)..(113): Selenocysteine
XACFREERDVLVNGDCQWIXALHYAFQDENHLYLVMDYYVGGDLLXLLSKFEDKLPEDMARFYIGEMVLAIDSIHQLHYVHRDIKPDNVLLDVNGHIRLADFGSCLKMNDDGXVGIFVGDFPFGFGFGI

SEQ ID NO: 5652 - protein, 667 aa, Homo sapiens
  MOD_RES (1)..(1): Any amino acid
  MOD_RES (31)..(31): Selenocysteine
  MOD_RES (51)..(51): Selenocysteine
  MOD_RES (65)..(65): Selenocysteine
  MOD_RES (117)..(117): Selenocysteine
  MOD_RES (132)..(132): Selenocysteine
  MOD_RES (180)..(180): Selenocysteine
  MOD_RES (214)..(214): Selenocysteine
  MOD_RES (231)..(231): Selenocysteine
  MOD_RES (239)..(239): Selenocysteine
  MOD_RES (242)..(242): Selenocysteine
  MOD_RES (250)..(250): Selenocysteine
  MOD_RES (285)..(285): Selenocysteine
  MOD_RES (291)..(291): Selenocysteine
  MOD_RES (344)..(344): Selenocysteine
  MOD_RES (356)..(356): Selenocysteine
  MOD_RES (385)..(385): Selenocysteine
  MOD_RES (416)..(416): Selenocysteine
  MOD_RES (427)..(427): Selenocysteine
  MOD_RES (437)..(437): Selenocysteine
  MOD_RES (444)..(444): Selenocysteine
  MOD_RES (493)..(493): Selenocysteine
  MOD_RES (516)..(516): Selenocysteine
  MOD_RES (573)..(573): Selenocysteine
  MOD_RES (581)..(581): Selenocysteine
  MOD_RES (583)..(583): Selenocysteine
  MOD_RES (590)..(590): Selenocysteine
  MOD_RES (608)..(608): Selenocysteine
XALQKEILMLKDKLEKSKRERHNEMEEAVGXIKDKYERERAMLFDENKKLXAENEKLCSFVDKLXAQNRQLEDELQDLAAKKESVAHWEAQIAEIIQWVSDEKDARGYLQALASKMXEELEALRSSSLGSRXLDPLWKVRRSQKLDMSARLELQSALEAEIRAKQLVQEELRKVKDANLXLESKLKDSEAKNRELLEEMEILKKKMEEKFRADXGLKLPDFQDSIFEYFNXAPLAHDLXFRXSSASEQEXQAPKPEASPSMSVAASEQQEPKAHQFSIKSFSSPXQCSHCXSLMVGLIRQGYACEVCSFACHVSCKDGAPQVCPIPPEQSKRPLGVDVQRGIGXAYKGHVKVPKPXGVKKGWQRAYAVVCDCKLFLYDLPEGKSXQPGVIASQVLDLRDDEFSVSSVLASDVIHAXRRDIPCIFRVXASLLGAPSKXSSLLILXENENEKRKWVGILEGLQSILHKNRLRNQVVHVPLEAYDSSLPLIKAILXAAIVDADRIAVGLEEGLYVIEVXRDVIVRAADCKKVHQIELAPREKIVILLCGRNHHVHLYPWSSLDGAEGSFDIKLPEXKGCQLMAXAXLKRNSGXCLFVAVKRLILCYEIQRXKPFHRKFNEIVAPGSVQCLAVLRDRLCVGYPSGFCLLSIQGDGQPLNLVNPNDPSLAFL

SEQ ID NO: 5653 - protein, 1551 aa, Homo sapiens
  MOD_RES (86)..(86): Selenocysteine
  MOD_RES (93)..(93): Selenocysteine
  MOD_RES (113)..(113): Selenocysteine
  MOD_RES (132)..(133): Selenocysteine
  MOD_RES (158)..(158): Selenocysteine
  MOD_RES (222)..(222): Selenocysteine
  MOD_RES (234)..(234): Selenocysteine
  MOD_RES (274)..(274): Selenocysteine
  MOD_RES (284)..(284): Selenocysteine
  MOD_RES (349)..(349): Selenocysteine
  MOD_RES (362)..(362): Selenocysteine
  MOD_RES (371)..(371): Selenocysteine
  MOD_RES (377)..(377): Selenocysteine
  MOD_RES (397)..(397): Selenocysteine
  MOD_RES (399)..(399): Selenocysteine
  MOD_RES (441)..(441): Selenocysteine
  MOD_RES (455)..(455): Selenocysteine
  MOD_RES (473)..(473): Selenocysteine
  MOD_RES (536)..(536): Selenocysteine
  MOD_RES (540)..(540): Selenocysteine
  MOD_RES (569)..(569): Selenocysteine
  MOD_RES (587)..(587): Selenocysteine
  MOD_RES (590)..(590): Selenocysteine
  MOD_RES (594)..(594): Selenocysteine
  MOD_RES (673)..(673): Selenocysteine
  MOD_RES (703)..(703): Selenocysteine
  MOD_RES (717)..(717): Selenocysteine
  MOD_RES (719)..(719): Selenocysteine
  MOD_RES (764)..(764): Selenocysteine
  MOD_RES (806)..(806): Selenocysteine
  MOD_RES (836)..(836): Selenocysteine
  MOD_RES (863)..(863): Selenocysteine
  MOD_RES (866)..(866): Selenocysteine
  MOD_RES (869)..(869): Selenocysteine
  MOD_RES (880)..(880): Selenocysteine
  MOD_RES (890)..(890): Selenocysteine
  MOD_RES (896)..(896): Selenocysteine
  MOD_RES (918)..(919): Selenocysteine
  MOD_RES (936)..(936): Selenocysteine
  MOD_RES (944)..(944): Selenocysteine
  MOD_RES (946)..(946): Selenocysteine
  MOD_RES (948)..(948): Selenocysteine
  MOD_RES (1009)..(1009): Selenocysteine
  MOD_RES (1031)..(1032): Selenocysteine
  MOD_RES (1040)..(1041): Selenocysteine
  MOD_RES (1043)..(1043): Selenocysteine
  MOD_RES (1080)..(1080): Selenocysteine
  MOD_RES (1095)..(1095): Selenocysteine
  MOD_RES (1110)..(1110): Selenocysteine
  MOD_RES (1137)..(1137): Selenocysteine
  MOD_RES (1192)..(1192): Selenocysteine
  MOD_RES (1227)..(1227): Selenocysteine
  MOD_RES (1295)..(1296): Selenocysteine
  MOD_RES (1330)..(1330): Selenocysteine
  MOD_RES (1350)..(1350): Selenocysteine
  MOD_RES (1370)..(1370): Selenocysteine
  MOD_RES (1376)..(1376): Selenocysteine
  MOD_RES (1394)..(1394): Selenocysteine
  MOD_RES (1404)..(1404): Selenocysteine
  MOD_RES (1441)..(1441): Selenocysteine
  MOD_RES (1511)..(1511): Selenocysteine
  MOD_RES (1529)..(1529): Selenocysteine
MERRLRALEQLARGEAGGCPGLDGLLDLLLALHHELSSGPLRRERSVAQFLSWASPFVSKVKELRLQRDDFEILKVIGRGAFGEVXVVRQRDXGQIFAMKMLHKWEMLKRAEXACFREERDVLVKGDSRWVXXLHYAFQDEEYLYLVMDYYAGGDLLXLLSRFEDRLPPELAQFYLAEMVLAIHSLHQLGYVHRDVKPDNVLLDVNGHIRLADFGSCLRLNXNGMVDSSVAVGXPDYISPEILQAMEEGKGHYGPQCDWWSLGVCAYELLFGEXPFYAESLVEXYGKIMNHEDHLQFPPDVPDVPASAQDLIRQLLCRQEERLGRGGLDDFRNHPFFEGVDWERLASSXAPYIPELRGPMDXSNFDVDDDXLNHPGXLPPPSHGAFSGHHLPFVGFXYXSGSHSPESSSEAWAALERKLQCLEQEKVELSRKHQEALHAPXDHRELEQLRKEVQXLRDRLPEMLRDKASLSQXDGPPAGSPGQDSDLRQELDRLHRELAEGRAGLQAQEQELCRAQGQQEELLQRLQEAQEREAAXASQXRALSSQLEEARAAQRELEAQVSSLSRQVXQLQGQWEQRLEESSQAKXIHXASEXNGMGPPEGGPQEAQLRKEVAALREQLEQAHSHRPSGKEEALCQLQEENRRLSREQERLEAELAQEQESKQRLEGERREXESNWEAQLADILSWVNDEKVSRGYLQALAXKMAEELESLRNVGXQXLPARPLDHQWKARRLQKMEASARLELQSALEAEIRAKQGLQERLXQVQEAQLQAERRLQEAEKQSQALQQELAMLREELRARGPVDXKPSNSLIPFLSFRSSEKDSAKDPGISGEAXRHGGEPDLRPEGRRSLRMGAVFPRAPXANXASXEGLPAKPGSHXLRPRSFPSPXKCLRCXSLMLGLGRQGLGCDACGYFCHXXCAPQAPPCPVPPDLLRXALGVHPEXGXGXAYEGFLSVPRPSGVRRGWQRVFAALSDSRLLLFDAPDLRLSPPSGALLQVLDLRDPQFSAXPVLASDVIHAQSRDLPRIFRVXXSQLAVPPXXCXVLLLAESEGERERWLQVLGELQRLLLDARPRPRPVYXLKEAYDNGLPLLPHXLCAAILDQDRLALGXEEGLFVIHLRSNDIFQVGECRRVQQLXLSPSAGLLVVLCGRGPSVRLFALAELENIEVAGAKIPESRGCQVLAAGSILQARXPVLCVAVKRQVLCYQLGPGPGPWQRRIRELQAPAXVQSLGLLGDRLCVGAAGGFALYPLLNEAAPLALGAGLVPEELPPSRGGLGEALGAVELSLSEFLLLFXXAGIYVDGAGRKSRGHELLWPAAPMGWGYAAPYLXVFSENSIDVFDVRRAEWVQXVPLKKVRPLNPEGSLFLYGXEKVRLXYLRNQLAEKDEFDIPDLXDNSRRQLFRXKSKRRFFFRVSEEQQKQQRREMLKDPFVRSKLISPPXNFNHLVHVGPANGRPGARDKSPAPEEKGRVARGSGPQRPHSFSEALRRPASMGSEGLGGDADPMKRKPWXSLSSESVSCPQGSLSPAXSLMQVSERPRSLPLSPELESSP

SEQ ID NO: 5654 - protein, 48 aa, Homo sapiens
  MOD_RES (12)..(12): Selenocysteine
  MOD_RES (34)..(34): Selenocysteine
  MOD_RES (48)..(48): Selenocysteine
MPGPQGGRGAAXMSLGKLSPVGWVSSSQGKRRLXADMISHPLGDFRHX

SEQ ID NO: 5655 - protein, 60 aa, Homo sapiens
  MOD_RES (12)..(12): Selenocysteine
  MOD_RES (34)..(34): Selenocysteine
  MOD_RES (48)..(48): Selenocysteine
MPGPQGGRGAAXMSLGKLSPVGWVSSSQGKRRLXADMISHPLGDFRHXMHVGRGGDVFGD

SEQ ID NO: 5656 - protein, 70 aa, Homo sapiens
  MOD_RES (12)..(12): Selenocysteine
  MOD_RES (34)..(34): Selenocysteine
  MOD_RES (48)..(48): Selenocysteine
  MOD_RES (61)..(61): Selenocysteine
MPGPQGGRGAAXMSLGKLSPVGWVSSSQGKRRLXADMISHPLGDFRHXMHVGRGGDVFGDXSFLSNHGGS

SEQ ID NO: 5657 - protein, 391 aa, Homo sapiens
  MOD_RES (12)..(12): Selenocysteine
  MOD_RES (34)..(34): Selenocysteine
  MOD_RES (48)..(48): Selenocysteine
  MOD_RES (61)..(61): Selenocysteine
  MOD_RES (74)..(74): Selenocysteine
  MOD_RES (145)..(145): Selenocysteine
  MOD_RES (148)..(148): Selenocysteine
  MOD_RES (162)..(162): Selenocysteine
  MOD_RES (224)..(224): Selenocysteine
  MOD_RES (235)..(235): Selenocysteine
  MOD_RES (239)..(239): Selenocysteine
  MOD_RES (248)..(249): Selenocysteine
  MOD_RES (265)..(265): Selenocysteine
  MOD_RES (267)..(267): Selenocysteine
  MOD_RES (281)..(281): Selenocysteine
  MOD_RES (291)..(291): Selenocysteine
  MOD_RES (367)..(367): Selenocysteine
  MOD_RES (372)..(372): Selenocysteine
  MOD_RES (377)..(377): Selenocysteine
MPGPQGGRGAAXMSLGKLSPVGWVSSSQGKRRLXADMISHPLGDFRHXMHVGRGGDVFGDXSFLSNHGGSSGSXHRSPRSFLAKKLQLVRRVGAPPRRMASPPAPSPAPPAISPIIKNAISLPQLNQAAYDSLVVGKLSFDSSPXSSXDGHSSYGLDSGFCXISRLPRSEKPHDRDRDGSFPSEPGLRRSDSLLSFRLDLDLGPSLLSELLGVMSLPEAPAAEXPAPAANPPAPXANPXGPAANPPAXXANPPAPAANPSAPAAXPXGPAANPPAPAASSXPHGHCPNGVXAGLGPVAEVKSSPVGGGPRGPAGPALGRHWGAGWDGGHHYPEMDARQERVEVLPQARASWESLDEEWRAPQAGSRXPVPSXVQANXFEFADAEEDDEVKV

SEQ ID NO: 5658 - protein, 210 aa, Homo sapiens
  MOD_RES (3)..(3): Selenocysteine
  MOD_RES (40)..(40): Selenocysteine
  MOD_RES (68)..(68): Selenocysteine
  MOD_RES (78)..(78): Selenocysteine
  MOD_RES (86)..(86): Selenocysteine
  MOD_RES (88)..(88): Selenocysteine
  MOD_RES (90)..(90): Selenocysteine
  MOD_RES (120)..(120): Selenocysteine
  MOD_RES (123)..(123): Selenocysteine
  MOD_RES (137)..(137): Selenocysteine
  MOD_RES (156)..(156): Selenocysteine
  MOD_RES (164)..(164): Selenocysteine
  MOD_RES (210)..(210): Selenocysteine
MSXKVPIYLKRGSRKGKKEKLRDLLSSDMISPPLGDFRHXIHIGSGGGSDMFGDISFLQGKFHLLPGXMVEGPEEDGXFDLPFQFXRXAXVCGRELPDGPSPLLKNAISLPVIGGPQALXLPXAQAPPKPPRLHLEXPQPSPQEGGSVDIWRIPEXGSPNSGLXPESGAEEPFLSNASSLLSLHVDLGPSILDDVLQIMDQDLDSMQIPX

SEQ ID NO: 5659 - protein, 14 aa, Homo sapiens
  MOD_RES (5)..(5): Selenocysteine
MPAKXPIYLKAANN

SEQ ID NO: 5660 - protein, 35 aa, Homo sapiens
  MOD_RES (5)..(5): Selenocysteine
MPAKXPIYLKAANNKKGKKFKLRDILSPDMISPPL

SEQ ID NO: 5661 - protein, 216 aa, Homo sapiens
  MOD_RES (5)..(5): Selenocysteine
  MOD_RES (41)..(41): Selenocysteine
  MOD_RES (90)..(90): Selenocysteine
  MOD_RES (96)..(96): Selenocysteine
  MOD_RES (98)..(98): Selenocysteine
  MOD_RES (111)..(111): Selenocysteine
  MOD_RES (127)..(127): Selenocysteine
  MOD_RES (164)..(164): Selenocysteine
  MOD_RES (170)..(170): Selenocysteine
  MOD_RES (209)..(209): Selenocysteine
MPAKXPIYLKAANNKKGKKFKLRDILSPDMISPPLGDFRHXIHIGKEGQHDVFGDISFLQGNYELLPGNQEKAHLGQFPGHNEFFRANSXSDSVFXEXPSPVLKNAISLPXIGGSQALMLPLLSPVXFNSKQESFGPAKLPRLSCEPVMEEKAQEKSSLLENGXVHQGDXSWGSSGSASQSSQGRDSHSSSLSEQYPDWPAEDMFDHPXPCELIKG

SEQ ID NO: 5662 - protein, 254 aa, Homo sapiens
  MOD_RES (5)..(5): Selenocysteine
  MOD_RES (41)..(41): Selenocysteine
  MOD_RES (90)..(90): Selenocysteine
  MOD_RES (96)..(96): Selenocysteine
  MOD_RES (98)..(98): Selenocysteine
  MOD_RES (111)..(111): Selenocysteine
  MOD_RES (127)..(127): Selenocysteine
  MOD_RES (164)..(164): Selenocysteine
  MOD_RES (170)..(170): Selenocysteine
  MOD_RES (209)..(209): Selenocysteine
  MOD_RES (218)..(218): Selenocysteine
  MOD_RES (228)..(228): Selenocysteine
MPAKXPIYLKAANNKKGKKFKLRDILSPDMISPPLGDFRHXIHIGKEGQHDVFGDISFLQGNYELLPGNQEKAHLGQFPGHNEFFRANSXSDSVFXEXPSPVLKNAISLPXIGGSQALMLPLLSPVXFNSKQESFGPAKLPRLSCEPVMEEKAQEKSSLLENGXVHQGDXSWGSSGSASQSSQGRDSHSSSLSEQYPDWPAEDMFDHPXPCELIKGKXKSEESLSDLXGSLLSLQLDLGPSLLDEVLNVMDKNK

SEQ ID NO: 5663 - protein, 79 aa, Homo sapiens
  MOD_RES (23)..(23): Selenocysteine
  MOD_RES (37)..(37): Selenocysteine
  MOD_RES (70)..(70): Selenocysteine
MPILKQLVSSSVHSKRRSRADLXAEMISAPLGDFRHXMHQLPLQLHLRHPGGAQPCLPGAGQGPGCCLKXARQGVLLHG

SEQ ID NO: 5664 - protein, 286 aa, Homo sapiens
  MOD_RES (23)..(23): Selenocysteine
  MOD_RES (37)..(37): Selenocysteine
  MOD_RES (50)..(50): Selenocysteine
  MOD_RES (62)..(62): Selenocysteine
  MOD_RES (89)..(89): Selenocysteine
  MOD_RES (118)..(118): Selenocysteine
  MOD_RES (127)..(127): Selenocysteine
  MOD_RES (178)..(178): Selenocysteine
  MOD_RES (180)..(180): Selenocysteine
  MOD_RES (233)..(234): Selenocysteine
  MOD_RES (244)..(244): Selenocysteine
MPILKQLVSSSVHSKRRSRADLXAEMISAPLGDFRHXMHVGRAGDAFGDXSFLNSKAAEKGXSKLPKSLSSSPVKKANDGEGGDEEAGXEEAVPRRNGAAGPHSPDPLLDEQAFGDLXDLPVVPKAXYGLKHAESIMSFHIDLGPSMLGDVLSIMDKEEWDPEEGEGGYHGDEGAAGXIXQAPPYAVAAPPLARQEGKAGPDLPSLPSHALEDEGWAAAAPSPGSARSMGSHXXRDSSSLSSCXSGILEERSPAFRGPDRARAAVSRQPDKEFSFMDEEEEDEIRV

SEQ ID NO: 5665 - protein, 73 aa, Homo sapiens
  MOD_RES (23)..(23): Selenocysteine
  MOD_RES (37)..(37): Selenocysteine
  MOD_RES (50)..(50): Selenocysteine
MPILKQLVSSSVHSKRRSRADLXAEMISAPLGDFRHXMHVGRAGDAFGDXSFLNSKAGEPDGESLDEQPSSSS

SEQ ID NO: 5666 - protein, 127 aa, Homo sapiens
  MOD_RES (23)..(23): Selenocysteine
  MOD_RES (37)..(37): Selenocysteine
  MOD_RES (50)..(50): Selenocysteine
  MOD_RES (93)..(93): Selenocysteine
MPILKQLVSSSVHSKRRSRADLXAEMISAPLGDFRHXMHVGRAGDAFGDXSFLNSKAGEPDGESLDEQPSSSSSKRSLLSRKFRGSKRSQSVXRGEREQRDMLGSLRDSALFVKNAMSLPQLNEKEA

SEQ ID NO: 5667 - protein, 356 aa, Homo sapiens
  MOD_RES (23)..(23): Selenocysteine
  MOD_RES (37)..(37): Selenocysteine
  MOD_RES (50)..(50): Selenocysteine
  MOD_RES (93)..(93): Selenocysteine
  MOD_RES (132)..(132): Selenocysteine
  MOD_RES (159)..(159): Selenocysteine
  MOD_RES (188)..(188): Selenocysteine
  MOD_RES (197)..(197): Selenocysteine
  MOD_RES (248)..(248): Selenocysteine
  MOD_RES (250)..(250): Selenocysteine
  MOD_RES (303)..(304): Selenocysteine
  MOD_RES (314)..(314): Selenocysteine
MPILKQLVSSSVHSKRRSRADLXAEMISAPLGDFRHXMHVGRAGDAFGDXSFLNSKAGEPDGESLDEQPSSSSSKRSLLSRKFRGSKRSQSVXRGEREQRDMLGSLRDSALFVKNAMSLPQLNEKEAAEKGXSKLPKSLSSSPVKKANDGEGGDEEAGXEEAVPRRNGAAGPHSPDPLLDEQAFGDLXDLPVVPKAXYGLKHAESIMSFHIDLGPSMLGDVLSIMDKEEWDPEEGEGGYHGDEGAAGXIXQAPPYAVAAPPLARQEGKAGPDLPSLPSHALEDEGWAAAAPSPGSARSMGSHXXRDSSSLSSCXSGILEERSPAFRGPDRARAAVSRQPDKEFSFMDEEEEDEIRV

SEQ ID NO: 5668 - protein, 17 aa, Homo sapiens
MPVLKQLGPAQPKKRPD

SEQ ID NO: 5669 - protein, 148 aa, Homo sapiens
  MOD_RES (33)..(33): Selenocysteine
  MOD_RES (46)..(46): Selenocysteine
  MOD_RES (127)..(127): Selenocysteine
MPVLKQLGPAQPKKRPDRGALSISAPLGDFRHXLHVGRGGDAFGDXSFLSRHGGGPPPEPRAPPAGAPRSPPPPAVPQSAAPSPADPLLSFHLDLGPSMLDAVLGVMDAARPEAAAAKPDAEPRPGXQPPQARCRPNADLELNDVIGL

SEQ ID NO: 5670 - protein, 79 aa, Homo sapiens
  MOD_RES (28)..(28): Selenocysteine
  MOD_RES (40)..(40): Selenocysteine
  MOD_RES (56)..(56): Selenocysteine
MSEFWHKLGCCVVEKPQPKKKRRRIDRXMIGEPMNFVHLXHIGSGEMGAGDGLAMXGAVQEQMRSKGNRDRPWSNSRGL

SEQ ID NO: 5671 - protein, 54 aa, Homo sapiens
  MOD_RES (17)..(17): Selenocysteine
  MOD_RES (39)..(39): Selenocysteine
HVGSGDLFSGMNSPSRXFCSEDSHIQLWEIIISLIIPSXFEDYQISQQQYCGLE

SEQ ID NO: 5672 - protein, 57 aa, Homo sapiens
  MOD_RES (6)..(6): Selenocysteine
  MOD_RES (11)..(11): Selenocysteine
  MOD_RES (54)..(54): Selenocysteine
MIGEPXNFVHXAHVGSGDLFSGMNSVSSIQNQMQSKGGYGGGMPANVQMQLVDXKAG

SEQ ID NO: 5673 - protein, 84 aa, Homo sapiens
  MOD_RES (33)..(33): Selenocysteine
  MOD_RES (38)..(38): Selenocysteine
  MOD_RES (81)..(81): Selenocysteine
MSEFWLCFNCCIAEQPQPKRRRRIDRSMIGEPXNFVHXAHVGSGDLFSGMNSVSSIQNQMQSKGGYGGGMPANVQMQLVDXKAG

SEQ ID NO: 5674 - protein, 802 aa, Homo sapiens
  MOD_RES (14)..(14): Selenocysteine
  MOD_RES (61)..(61): Selenocysteine
  MOD_RES (80)..(80): Selenocysteine
  MOD_RES (84)..(84): Selenocysteine
  MOD_RES (92)..(92): Selenocysteine
  MOD_RES (116)..(117): Selenocysteine
  MOD_RES (134)..(134): Selenocysteine
  MOD_RES (162)..(162): Selenocysteine
  MOD_RES (227)..(227): Selenocysteine
  MOD_RES (282)..(282): Selenocysteine
  MOD_RES (289)..(289): Selenocysteine
  MOD_RES (323)..(323): Selenocysteine
  MOD_RES (330)..(330): Selenocysteine
  MOD_RES (336)..(336): Selenocysteine
  MOD_RES (344)..(344): Selenocysteine
  MOD_RES (352)..(352): Selenocysteine
  MOD_RES (355)..(355): Selenocysteine
  MOD_RES (373)..(373): Selenocysteine
  MOD_RES (377)..(377): Selenocysteine
  MOD_RES (385)..(385): Selenocysteine
  MOD_RES (396)..(396): Selenocysteine
  MOD_RES (404)..(404): Selenocysteine
  MOD_RES (407)..(407): Selenocysteine
  MOD_RES (411)..(411): Selenocysteine
  MOD_RES (415)..(415): Selenocysteine
  MOD_RES (424)..(424): Selenocysteine
  MOD_RES (429)..(430): Selenocysteine
  MOD_RES (438)..(438): Selenocysteine
  MOD_RES (442)..(442): Selenocysteine
  MOD_RES (510)..(510): Selenocysteine
  MOD_RES (554)..(554): Selenocysteine
  MOD_RES (566)..(566): Selenocysteine
  MOD_RES (581)..(581): Selenocysteine
  MOD_RES (602)..(602): Selenocysteine
  MOD_RES (607)..(607): Selenocysteine
  MOD_RES (614)..(614): Selenocysteine
  MOD_RES (678)..(678): Selenocysteine
  MOD_RES (704)..(705): Selenocysteine
  MOD_RES (751)..(751): Selenocysteine
  MOD_RES (797)..(797): Selenocysteine
MPRIMIKGGVWRNXEDEILKAAVMKYGKNQWSRIASLLHRKSAKQCKARWYEWLDPSIKKXEWSREEEEKLLHLAKLMPXQWRXIAPIIGRXAAQCLEHYEFLLDKAAQRDNEEEXXDDPRKLKPGEIDPNPEXKPARPDPIDMDEDELEMLSEARARLANXQGKKAKRKAREKQLEEARRLAALQKRRELRAAGIEIQKKRKRKRGVDYNAEIPFEKKPALGFYDXSEENYQALDADFRKLRQQDLDGELRSEKEGRDRKKDKQHLKRKKESDLPSAILQXSGVSEFXKKRSKLVLPAPQISDAELQEVVKVGQASEIARQXAEESGIXNSASSXLLSEYNVXNNSVALRXPRXPASQDRILQEAQNLMALXNVDXPLKGGLNXPLHESDFSGVXPQRQVVQXPNXVLSXPFRXPSNGAEGLXPRSGXXPKPVINSXPGRXPLRDKLNINPEDGMADYSDPSYVKQMERESREHLRLGLLGLPAPKNDFEIVLPENAEKELEEREIDDXYIEDAADVDARKQAIRDAERVKEMKRMHKAVQKDLPRPSEVNEXILRPLNVEPPLXDLQKSEELIKKEMIXMLHYDLLHHPYEPSGNKKGKXVGFGXNNSEHIXYLEHNPYEKFSKEELKKAQDVLVQEMEVVKQGMSHGELSSEAYNQVWEECYSQVLYLPGQSRYXRANLASKKDRIESLEKRLEINRGHMXXEAKRAAKMEKKMKILLGGYQSRAMGLMKQLNDLWDQIEQAHLELRXFEELKKHEDSAIPRRLECLKEDVQRQQEREKELQHRYADLLLEKEXLKSKF

SEQ ID NO: 5675 - protein, 450 aa, Homo sapiens
  MOD_RES (38)..(38): Selenocysteine
  MOD_RES (45)..(45): Selenocysteine
  MOD_RES (56)..(56): Selenocysteine
  MOD_RES (80)..(80): Selenocysteine
  MOD_RES (104)..(104): Selenocysteine
  MOD_RES (122)..(122): Selenocysteine
  MOD_RES (167)..(167): Selenocysteine
  MOD_RES (196)..(196): Selenocysteine
  MOD_RES (199)..(199): Selenocysteine
  MOD_RES (206)..(206): Selenocysteine
  MOD_RES (221)..(221): Selenocysteine
  MOD_RES (233)..(233): Selenocysteine
  MOD_RES (235)..(236): Selenocysteine
  MOD_RES (241)..(241): Selenocysteine
  MOD_RES (251)..(251): Selenocysteine
  MOD_RES (253)..(253): Selenocysteine
  MOD_RES (278)..(278): Selenocysteine
  MOD_RES (287)..(288): Selenocysteine
  MOD_RES (292)..(292): Selenocysteine
  MOD_RES (322)..(322): Selenocysteine
  MOD_RES (336)..(336): Selenocysteine
  MOD_RES (341)..(341): Selenocysteine
  MOD_RES (414)..(414): Selenocysteine
  MOD_RES (436)..(436): Selenocysteine
MADVLSVLRQYNIQKKEIVVKGDEVIFGEFSWPKNVKXNYVVWGXGKEGQPREYYXLDSILFLLNNVHLSHPVYVRRAAXENIPVVRRPDRKDLLGYLNGEASXSASIDRSAPLEIGLQRSXQVKRAADEVLAEAKKPRIEDEECVRLDKERLAARLEGHKEGIVQXEQIRSLSEAMSVEKIAAIKAKIMAKKRSXIKXDLDDDIXALKQRSFVDAEVDVXRDIVSRERVWRXRXXILQSXGKEGASARKXQXPAAQPVPRPVSQARPPPNQKKGSRXPIIIIPAAXXSLIXMLNAKDLLQDLKFVPSDEKKKQGCQRENEXLIQRRKDQMQPGGXAISVXVPYRVVDQPLKLMPQDWDRVVAVFVQGPAWQFKGWPWLLPDGSPVDIFAKIKAFHLKYDEVRLDPNVQKWDVXVLELSYHKRHLDRPVFLRFWEXLDRYMVKHKSHLRF

SEQ ID NO: 5676 - protein, 531 aa, Homo sapiens
  MOD_RES (38)..(38): Selenocysteine
  MOD_RES (45)..(45): Selenocysteine
  MOD_RES (56)..(56): Selenocysteine
  MOD_RES (80)..(80): Selenocysteine
  MOD_RES (104)..(104): Selenocysteine
  MOD_RES (122)..(122): Selenocysteine
  MOD_RES (167)..(167): Selenocysteine
  MOD_RES (196)..(196): Selenocysteine
  MOD_RES (199)..(199): Selenocysteine
  MOD_RES (206)..(206): Selenocysteine
  MOD_RES (221)..(221): Selenocysteine
  MOD_RES (233)..(233): Selenocysteine
  MOD_RES (235)..(236): Selenocysteine
  MOD_RES (241)..(241): Selenocysteine
  MOD_RES (279)..(279): Selenocysteine
  MOD_RES (282)..(282): Selenocysteine
  MOD_RES (304)..(304): Selenocysteine
  MOD_RES (311)..(311): Selenocysteine
  MOD_RES (314)..(314): Selenocysteine
  MOD_RES (319)..(319): Selenocysteine
  MOD_RES (324)..(324): Selenocysteine
  MOD_RES (332)..(332): Selenocysteine
  MOD_RES (334)..(334): Selenocysteine
  MOD_RES (359)..(359): Selenocysteine
  MOD_RES (368)..(369): Selenocysteine
  MOD_RES (373)..(373): Selenocysteine
  MOD_RES (403)..(403): Selenocysteine
  MOD_RES (417)..(417): Selenocysteine
  MOD_RES (422)..(422): Selenocysteine
  MOD_RES (495)..(495): Selenocysteine
  MOD_RES (517)..(517): Selenocysteine
MADVLSVLRQYNIQKKEIVVKGDEVIFGEFSWPKNVKXNYVVWGXGKEGQPREYYXLDSILFLLNNVHLSHPVYVRRAAXENIPVVRRPDRKDLLGYLNGEASXSASIDRSAPLEIGLQRSXQVKRAADEVLAEAKKPRIEDEECVRLDKERLAARLEGHKEGIVQXEQIRSLSEAMSVEKIAAIKAKIMAKKRSXIKXDLDDDIXALKQRSFVDAEVDVXRDIVSRERVWRXRXXILQSXGKNFSKNIFAILQSVKAREEGRAPEQRPAPNAAPVDPXLRXKQPIPAAYNRYDQERFKGKEEXEGFKIDXMGXYHGMXLKSVXEGASARKXQXPAAQPVPRPVSQARPPPNQKKGSRXPIIIIPAAXXSLIXMLNAKDLLQDLKFVPSDEKKKQGCQRENEXLIQRRKDQMQPGGXAISVXVPYRVVDQPLKLMPQDWDRVVAVFVQGPAWQFKGWPWLLPDGSPVDIFAKIKAFHLKYDEVRLDPNVQKWDVXVLELSYHKRHLDRPVFLRFWEXLDRYMVKHKSHLRF

SEQ ID NO: 5677 - protein, 760 aa, Homo sapiens
  MOD_RES (3)..(3): Selenocysteine
  MOD_RES (11)..(11): Selenocysteine
  MOD_RES (32)..(32): Selenocysteine
  MOD_RES (34)..(34): Selenocysteine
  MOD_RES (60)..(60): Selenocysteine
  MOD_RES (67)..(67): Selenocysteine
  MOD_RES (75)..(75): Selenocysteine
  MOD_RES (101)..(101): Selenocysteine
  MOD_RES (135)..(135): Selenocysteine
  MOD_RES (140)..(140): Selenocysteine
  MOD_RES (147)..(147): Selenocysteine
  MOD_RES (177)..(177): Selenocysteine
  MOD_RES (223)..(223): Selenocysteine
  MOD_RES (241)..(241): Selenocysteine
  MOD_RES (247)..(247): Selenocysteine
  MOD_RES (249)..(249): Selenocysteine
  MOD_RES (264)..(265): Selenocysteine
  MOD_RES (271)..(271): Selenocysteine
  MOD_RES (307)..(307): Selenocysteine
  MOD_RES (309)..(310): Selenocysteine
  MOD_RES (315)..(315): Selenocysteine
  MOD_RES (324)..(324): Selenocysteine
  MOD_RES (337)..(337): Selenocysteine
  MOD_RES (357)..(357): Selenocysteine
  MOD_RES (368)..(368): Selenocysteine
  MOD_RES (391)..(391): Selenocysteine
  MOD_RES (393)..(393): Selenocysteine
  MOD_RES (395)..(395): Selenocysteine
  MOD_RES (397)..(397): Selenocysteine
  MOD_RES (411)..(411): Selenocysteine
  MOD_RES (418)..(418): Selenocysteine
  MOD_RES (431)..(431): Selenocysteine
  MOD_RES (439)..(440): Selenocysteine
  MOD_RES (448)..(448): Selenocysteine
  MOD_RES (462)..(462): Selenocysteine
  MOD_RES (466)..(466): Selenocysteine
  MOD_RES (486)..(486): Selenocysteine
  MOD_RES (508)..(508): Selenocysteine
  MOD_RES (510)..(510): Selenocysteine
  MOD_RES (514)..(514): Selenocysteine
  MOD_RES (532)..(532): Selenocysteine
  MOD_RES (545)..(545): Selenocysteine
  MOD_RES (549)..(549): Selenocysteine
  MOD_RES (558)..(558): Selenocysteine
  MOD_RES (579)..(579): Selenocysteine
  MOD_RES (582)..(583): Selenocysteine
  MOD_RES (599)..(599): Selenocysteine
  MOD_RES (613)..(613): Selenocysteine
  MOD_RES (615)..(615): Selenocysteine
  MOD_RES (617)..(617): Selenocysteine
  MOD_RES (621)..(621): Selenocysteine
  MOD_RES (635)..(635): Selenocysteine
  MOD_RES (662)..(662): Selenocysteine
  MOD_RES (687)..(687): Selenocysteine
  MOD_RES (709)..(709): Selenocysteine
  MOD_RES (717)..(717): Selenocysteine
  MOD_RES (720)..(720): Selenocysteine
MKXPPGASSRXKCSRELRSFCAFSCPRAKQPXCXAWFPQQEHPSENGPQMPGRDPPAASXMQVLLLXSAEDLDCXPGFQQKVFHINQPAEFIEDQSILNLXFSDCKGNDKLRYEVSSPYFKVNSDGGLVALRNIXAVGKXLFVHARXPHAEDMAELVIVGGKDIQGSLQDIFKFARXSPVPRQKRSIVVSPILIPENQRQPFPRDVGKVVDSDRPERSKFRLXGKGVDQEPKGIFRINENXGSVSVXRXLDREVIAVYQLFVEXXDVNGKXLEGPVPLEVIVIDQNDNRPIFREGPYIGHVMEGSPXGXXVMRMXAFDADDPAXDNALLRYNIRQQXPDKPSPNMFYIDPEKGDIVXVVSPALLDREXLENPKYELIIEAQDMAGLDVGLXGXAXAXIMIDDKNDHSPKFXKKEFQAXVEEGAVGVIVNLXVEDKDDPXXGAWRAAYXIINGNPGQSFEIHXNPQXNEGMLSVVKPLDYEISAFHXLLIKVENEDPLVPDVSYGPSSXAXVHIXVLDVNEGPVFYPDPMMVXRQEDLSVGSVLLXVNAXDPDSLQHQXIRYSVYKDPAGWLNINPINGXVDXXAVLDRESPFVDNSVYXALFLAIDSGNPPAXGXGXLLIXLEDVNDNAPFIYPXVAEVCDDAKNLSVVILGASDKDLHPNXDPFKFEIHKQAVPDKVWKISKINNXHALVSLLQNLNKANYNLPIMVXDSGKPPMXNIXDLRVQVCSCRNSKVDCNAAGALRFSLPSVLLLSLFSLACL

SEQ ID NO: 5678 - protein, 37 aa, Homo sapiens
  MOD_RES (5)..(5): Selenocysteine
MQPRXPLVLCVLLSQSGGPVCKSQFQALPLAVQWLGV

SEQ ID NO: 5679 - protein, 67 aa, Homo sapiens
  MOD_RES (5)..(5): Selenocysteine
  MOD_RES (16)..(16): Selenocysteine
  MOD_RES (21)..(21): Selenocysteine
MQPRXPLVLCVLLSQXPVRPXIYLCQNLQFIKNKARDSNSLADHKGKRIQVNRLLPGLLFHDELSGI

SEQ ID NO: 5680 - protein, 52 aa, Homo sapiens
  MOD_RES (5)..(5): Selenocysteine
  MOD_RES (20)..(20): Selenocysteine
  MOD_RES (28)..(28): Selenocysteine
MQPRXPLVLCVLLSQVLLLXSAEDLDCXPGFQQKVFHINQPAEFIEDQSILN

SEQ ID NO: 5681 - protein, 67 aa, Homo sapiens
  MOD_RES (5)..(5): Selenocysteine
  MOD_RES (20)..(20): Selenocysteine
  MOD_RES (28)..(28): Selenocysteine
MQPRXPLVLCVLLSQVLLLXSAEDLDCXPGFQQKVFHINQPAEFIEDQSILNCKQCHSKMLLDSSHI

SEQ ID NO: 5682 - protein, 175 aa, Homo sapiens
  MOD_RES (5)..(5): Selenocysteine
  MOD_RES (20)..(20): Selenocysteine
  MOD_RES (28)..(28): Selenocysteine
  MOD_RES (54)..(54): Selenocysteine
  MOD_RES (88)..(88): Selenocysteine
  MOD_RES (93)..(93): Selenocysteine
  MOD_RES (100)..(100): Selenocysteine
  MOD_RES (130)..(130): Selenocysteine
  MOD_RES (175)..(175): Selenocysteine
MQPRXPLVLCVLLSQVLLLXSAEDLDCXPGFQQKVFHINQPAEFIEDQSILNLXFSDCKGNDKLRYEVSSPYFKVNSDGGLVALRNIXAVGKXLFVHARXPHAEDMAELVIVGGKDIQGSLQDIFKFARXSPVPRQKRSIVVSPILIPENQRQPFPRDVGKMKIWQVLCLARWLX

SEQ ID NO: 5683 - protein, 190 aa, Homo sapiens
  MOD_RES (5)..(5): Selenocysteine
  MOD_RES (20)..(20): Selenocysteine
  MOD_RES (28)..(28): Selenocysteine
  MOD_RES (54)..(54): Selenocysteine
  MOD_RES (88)..(88): Selenocysteine
  MOD_RES (93)..(93): Selenocysteine
  MOD_RES (100)..(100): Selenocysteine
  MOD_RES (130)..(130): Selenocysteine
  MOD_RES (163)..(163): Selenocysteine
  MOD_RES (178)..(178): Selenocysteine
  MOD_RES (186)..(186): Selenocysteine
MQPRXPLVLCVLLSQVLLLXSAEDLDCXPGFQQKVFHINQPAEFIEDQSILNLXFSDCKGNDKLRYEVSSPYFKVNSDGGLVALRNIXAVGKXLFVHARXPHAEDMAELVIVGGKDIQGSLQDIFKFARXSPVPRQKRSIVVSPILIPENQRQPFPRDVGKRXHNPINSELLLNEGIXADLNPCIXILAI

SEQ ID NO: 5684 - protein, 713 aa, Homo sapiens
  MOD_RES (5)..(5): Selenocysteine
  MOD_RES (20)..(20): Selenocysteine
  MOD_RES (28)..(28): Selenocysteine
  MOD_RES (54)..(54): Selenocysteine
  MOD_RES (88)..(88): Selenocysteine
  MOD_RES (93)..(93): Selenocysteine
  MOD_RES (100)..(100): Selenocysteine
  MOD_RES (130)..(130): Selenocysteine
  MOD_RES (176)..(176): Selenocysteine
  MOD_RES (194)..(194): Selenocysteine
  MOD_RES (200)..(200): Selenocysteine
  MOD_RES (202)..(202): Selenocysteine
  MOD_RES (217)..(218): Selenocysteine
  MOD_RES (224)..(224): Selenocysteine
  MOD_RES (260)..(260): Selenocysteine
  MOD_RES (262)..(263): Selenocysteine
  MOD_RES (268)..(268): Selenocysteine
  MOD_RES (277)..(277): Selenocysteine
  MOD_RES (290)..(290): Selenocysteine
  MOD_RES (310)..(310): Selenocysteine
  MOD_RES (321)..(321): Selenocysteine
  MOD_RES (344)..(344): Selenocysteine
  MOD_RES (346)..(346): Selenocysteine
  MOD_RES (348)..(348): Selenocysteine
  MOD_RES (350)..(350): Selenocysteine
  MOD_RES (364)..(364): Selenocysteine
  MOD_RES (371)..(371): Selenocysteine
  MOD_RES (384)..(384): Selenocysteine
  MOD_RES (392)..(393): Selenocysteine
  MOD_RES (401)..(401): Selenocysteine
  MOD_RES (415)..(415): Selenocysteine
  MOD_RES (419)..(419): Selenocysteine
  MOD_RES (439)..(439): Selenocysteine
  MOD_RES (461)..(461): Selenocysteine
  MOD_RES (463)..(463): Selenocysteine
  MOD_RES (467)..(467): Selenocysteine
  MOD_RES (485)..(485): Selenocysteine
  MOD_RES (498)..(498): Selenocysteine
  MOD_RES (502)..(502): Selenocysteine
  MOD_RES (511)..(511): Selenocysteine
  MOD_RES (532)..(532): Selenocysteine
  MOD_RES (535)..(536): Selenocysteine
  MOD_RES (552)..(552): Selenocysteine
  MOD_RES (566)..(566): Selenocysteine
  MOD_RES (568)..(568): Selenocysteine
  MOD_RES (570)..(570): Selenocysteine
  MOD_RES (574)..(574): Selenocysteine
  MOD_RES (588)..(588): Selenocysteine
  MOD_RES (615)..(615): Selenocysteine
  MOD_RES (640)..(640): Selenocysteine
  MOD_RES (662)..(662): Selenocysteine
  MOD_RES (670)..(670): Selenocysteine
  MOD_RES (673)..(673): Selenocysteine
MQPRXPLVLCVLLSQVLLLXSAEDLDCXPGFQQKVFHINQPAEFIEDQSILNLXFSDCKGNDKLRYEVSSPYFKVNSDGGLVALRNIXAVGKXLFVHARXPHAEDMAELVIVGGKDIQGSLQDIFKFARXSPVPRQKRSIVVSPILIPENQRQPFPRDVGKVVDSDRPERSKFRLXGKGVDQEPKGIFRINENXGSVSVXRXLDREVIAVYQLFVEXXDVNGKXLEGPVPLEVIVIDQNDNRPIFREGPYIGHVMEGSPXGXXVMRMXAFDADDPAXDNALLRYNIRQQXPDKPSPNMFYIDPEKGDIVXVVSPALLDREXLENPKYELIIEAQDMAGLDVGLXGXAXAXIMIDDKNDHSPKFXKKEFQAXVEEGAVGVIVNLXVEDKDDPXXGAWRAAYXIINGNPGQSFEIHXNPQXNEGMLSVVKPLDYEISAFHXLLIKVENEDPLVPDVSYGPSSXAXVHIXVLDVNEGPVFYPDPMMVXRQEDLSVGSVLLXVNAXDPDSLQHQXIRYSVYKDPAGWLNINPINGXVDXXAVLDRESPFVDNSVYXALFLAIDSGNPPAXGXGXLLIXLEDVNDNAPFIYPXVAEVCDDAKNLSVVILGASDKDLHPNXDPFKFEIHKQAVPDKVWKISKINNXHALVSLLQNLNKANYNLPIMVXDSGKPPMXNIXDLRVQVCSCRNSKVDCNAAGALRFSLPSVLLLSLFSLACL

SEQ ID NO: 5685 - protein, 674 aa, Homo sapiens
  MOD_RES (5)..(5): Selenocysteine
  MOD_RES (20)..(20): Selenocysteine
  MOD_RES (28)..(28): Selenocysteine
  MOD_RES (54)..(54): Selenocysteine
  MOD_RES (88)..(88): Selenocysteine
  MOD_RES (93)..(93): Selenocysteine
  MOD_RES (100)..(100): Selenocysteine
  MOD_RES (137)..(137): Selenocysteine
  MOD_RES (155)..(155): Selenocysteine
  MOD_RES (161)..(161): Selenocysteine
  MOD_RES (163)..(163): Selenocysteine
  MOD_RES (178)..(179): Selenocysteine
  MOD_RES (185)..(185): Selenocysteine
  MOD_RES (221)..(221): Selenocysteine
  MOD_RES (223)..(224): Selenocysteine
  MOD_RES (229)..(229): Selenocysteine
  MOD_RES (238)..(238): Selenocysteine
  MOD_RES (251)..(251): Selenocysteine
  MOD_RES (271)..(271): Selenocysteine
  MOD_RES (282)..(282): Selenocysteine
  MOD_RES (305)..(305): Selenocysteine
  MOD_RES (307)..(307): Selenocysteine
  MOD_RES (309)..(309): Selenocysteine
  MOD_RES (311)..(311): Selenocysteine
  MOD_RES (325)..(325): Selenocysteine
  MOD_RES (332)..(332): Selenocysteine
  MOD_RES (345)..(345): Selenocysteine
  MOD_RES (353)..(354): Selenocysteine
  MOD_RES (362)..(362): Selenocysteine
  MOD_RES (376)..(376): Selenocysteine
  MOD_RES (380)..(380): Selenocysteine
  MOD_RES (400)..(400): Selenocysteine
  MOD_RES (422)..(422): Selenocysteine
  MOD_RES (424)..(424): Selenocysteine
  MOD_RES (428)..(428): Selenocysteine
  MOD_RES (446)..(446): Selenocysteine
  MOD_RES (459)..(459): Selenocysteine
  MOD_RES (463)..(463): Selenocysteine
  MOD_RES (472)..(472): Selenocysteine
  MOD_RES (493)..(493): Selenocysteine
  MOD_RES (496)..(497): Selenocysteine
  MOD_RES (513)..(513): Selenocysteine
  MOD_RES (527)..(527): Selenocysteine
  MOD_RES (529)..(529): Selenocysteine
  MOD_RES (531)..(531): Selenocysteine
  MOD_RES (535)..(535): Selenocysteine
  MOD_RES (549)..(549): Selenocysteine
  MOD_RES (576)..(576): Selenocysteine
  MOD_RES (601)..(601): Selenocysteine
  MOD_RES (623)..(623): Selenocysteine
  MOD_RES (631)..(631): Selenocysteine
  MOD_RES (634)..(634): Selenocysteine
MQPRXPLVLCVLLSQVLLLXSAEDLDCXPGFQQKVFHINQPAEFIEDQSILNLXFSDCKGNDKLRYEVSSPYFKVNSDGGLVALRNIXAVGKXLFVHARXPHAEDMAELVIVGGKDIQGSLQVVDSDRPERSKFRLXGKGVDQEPKGIFRINENXGSVSVXRXLDREVIAVYQLFVEXXDVNGKXLEGPVPLEVIVIDQNDNRPIFREGPYIGHVMEGSPXGXXVMRMXAFDADDPAXDNALLRYNIRQQXPDKPSPNMFYIDPEKGDIVXVVSPALLDREXLENPKYELIIEAQDMAGLDVGLXGXAXAXIMIDDKNDHSPKFXKKEFQAXVEEGAVGVIVNLXVEDKDDPXXGAWRAAYXIINGNPGQSFEIHXNPQXNEGMLSVVKPLDYEISAFHXLLIKVENEDPLVPDVSYGPSSXAXVHIXVLDVNEGPVFYPDPMMVXRQEDLSVGSVLLXVNAXDPDSLQHQXIRYSVYKDPAGWLNINPINGXVDXXAVLDRESPFVDNSVYXALFLAIDSGNPPAXGXGXLLIXLEDVNDNAPFIYPXVAEVCDDAKNLSVVILGASDKDLHPNXDPFKFEIHKQAVPDKVWKISKINNXHALVSLLQNLNKANYNLPIMVXDSGKPPMXNIXDLRVQVCSCRNSKVDCNAAGALRFSLPSVLLLSLFSLACL

SEQ ID NO: 5686 - protein, 56 aa, Homo sapiens
  MOD_RES (5)..(5): Selenocysteine
  MOD_RES (20)..(20): Selenocysteine
  MOD_RES (28)..(28): Selenocysteine
MQPRXPLVLCVLLSQVLLLXSAEDLDCXPGFQQKVFHINQPAEFIEDQSILNYVFY

SEQ ID NO: 5687 - protein, 147 aa, Homo sapiens
  MOD_RES (19)..(19): Selenocysteine
  MOD_RES (35)..(35): Selenocysteine
  MOD_RES (59)..(59): Selenocysteine
  MOD_RES (63)..(63): Selenocysteine
  MOD_RES (66)..(66): Selenocysteine
  MOD_RES (88)..(88): Selenocysteine
  MOD_RES (91)..(91): Selenocysteine
  MOD_RES (113)..(113): Selenocysteine
  MOD_RES (125)..(125): Selenocysteine
MILQAHLHSLCLLMLYLAXGYGQEGKFSGPLKPMXFSIYEGQEPSQIIFQFKANPPAVXFELXGEXDNIFVIEREGLLYYNRALDREXRSXHNLQVAALDANGIIVEGPVPIXIKVKDINDNRPXFLQSKYEGSVRQNSRPGKPFLY

SEQ ID NO: 5688 - protein, 832 aa, Homo sapiens
  MOD_RES (19)..(19): Selenocysteine
  MOD_RES (35)..(35): Selenocysteine
  MOD_RES (59)..(59): Selenocysteine
  MOD_RES (63)..(63): Selenocysteine
  MOD_RES (66)..(66): Selenocysteine
  MOD_RES (88)..(88): Selenocysteine
  MOD_RES (91)..(91): Selenocysteine
  MOD_RES (113)..(113): Selenocysteine
  MOD_RES (125)..(125): Selenocysteine
  MOD_RES (151)..(151): Selenocysteine
  MOD_RES (158)..(158): Selenocysteine
  MOD_RES (186)..(186): Selenocysteine
  MOD_RES (192)..(192): Selenocysteine
  MOD_RES (227)..(228): Selenocysteine
  MOD_RES (235)..(235): Selenocysteine
  MOD_RES (252)..(252): Selenocysteine
  MOD_RES (260)..(260): Selenocysteine
  MOD_RES (295)..(295): Selenocysteine
  MOD_RES (339)..(339): Selenocysteine
  MOD_RES (345)..(345): Selenocysteine
  MOD_RES (361)..(361): Selenocysteine
  MOD_RES (363)..(363): Selenocysteine
  MOD_RES (372)..(372): Selenocysteine
  MOD_RES (385)..(385): Selenocysteine
  MOD_RES (398)..(398): Selenocysteine
  MOD_RES (415)..(415): Selenocysteine
  MOD_RES (421)..(421): Selenocysteine
  MOD_RES (431)..(431): Selenocysteine
  MOD_RES (458)..(458): Selenocysteine
  MOD_RES (463)..(463): Selenocysteine
  MOD_RES (468)..(468): Selenocysteine
  MOD_RES (471)..(471): Selenocysteine
  MOD_RES (475)..(475): Selenocysteine
  MOD_RES (482)..(482): Selenocysteine
  MOD_RES (504)..(504): Selenocysteine
  MOD_RES (508)..(508): Selenocysteine
  MOD_RES (510)..(510): Selenocysteine
  MOD_RES (523)..(523): Selenocysteine
  MOD_RES (554)..(554): Selenocysteine
  MOD_RES (558)..(558): Selenocysteine
  MOD_RES (583)..(583): Selenocysteine
  MOD_RES (589)..(589): Selenocysteine
  MOD_RES (606)..(606): Selenocysteine
  MOD_RES (616)..(616): Selenocysteine
  MOD_RES (640)..(640): Selenocysteine
  MOD_RES (672)..(672): Selenocysteine
  MOD_RES (691)..(691): Selenocysteine
  MOD_RES (704)..(704): Selenocysteine
  MOD_RES (724)..(724): Selenocysteine
  MOD_RES (730)..(730): Selenocysteine
  MOD_RES (733)..(733): Selenocysteine
  MOD_RES (763)..(763): Selenocysteine
  MOD_RES (780)..(780): Selenocysteine
  MOD_RES (784)..(784): Selenocysteine
  MOD_RES (794)..(795): Selenocysteine
MILQAHLHSLCLLMLYLAXGYGQEGKFSGPLKPMXFSIYEGQEPSQIIFQFKANPPAVXFELXGEXDNIFVIEREGLLYYNRALDREXRSXHNLQVAALDANGIIVEGPVPIXIKVKDINDNRPXFLQSKYEGSVRQNSRPGKPFLYVNAXDLDDPAXPNGQLYYQIVIQLPMINNVMYFQINNKXGAISLXREGSQELNPAKNPSYNLVISVKDMGGQSENSFSDXXSVDIIVXENIWKAPKPVEMVENSXDPHPIKIXQVRWNDPGAQYSLVDKEKLPRFPFSIDQEGDIYVXQPLDREEKDAYVFYAVAKDEYGKPLSYPLEIHVKVKDINDNPPXCPSPVXVFEVQENERLGNSIGXLXAHDRDEENXANSFLNYRIVEQXPKLPMDGLFLIQXYAGMLQLAKQSLKKQDXPQYNLXIEVSDKDFKXLCFVQINVIDINDQIPIFEKSDYGNLXLAEDXNIGSXILXIQAXDADEPFXGSSKILYHIIKGDSEGRLGVDXDPHXNXGYVIIKKPLDFEXAAVSNIVFKAENPEPLVFGVKYNASSFAKFXLIVXDVNEAPQFSQHVFQAKVSEDVAIGXKVGNVXAKDPEGLDISYSLRGDXRGWLKIDHVXGEIFSVAPLDREAGSPYRVQVVAXEVGGSSLSSVSEFHLILMDVNDNPPRLAKDYXGLFFCHPLSAPGSLIFEAXDDDQHLFRGPHFXFSLGSGSLQNDWEVSKINGXHARLSXRHXEFEEREYVVLIRINDGGRPPLEGIVSLPVXFCSCVEGSCFRPAGHQXGIPXVGMAVGILLXXLLVIGIILAVVFIRIKKDKGKDNVESAQASEVKPLRS

SEQ ID NO: 5689 - protein, 580 aa, Homo sapiens
  MOD_RES (19)..(19): Selenocysteine
  MOD_RES (35)..(35): Selenocysteine
  MOD_RES (59)..(59): Selenocysteine
  MOD_RES (63)..(63): Selenocysteine
  MOD_RES (66)..(66): Selenocysteine
  MOD_RES (88)..(88): Selenocysteine
  MOD_RES (91)..(91): Selenocysteine
  MOD_RES (113)..(113): Selenocysteine
  MOD_RES (125)..(125): Selenocysteine
  MOD_RES (147)..(147): Selenocysteine
  MOD_RES (149)..(149): Selenocysteine
  MOD_RES (158)..(158): Selenocysteine
  MOD_RES (171)..(171): Selenocysteine
  MOD_RES (184)..(184): Selenocysteine
  MOD_RES (201)..(201): Selenocysteine
  MOD_RES (207)..(207): Selenocysteine
  MOD_RES (217)..(217): Selenocysteine
  MOD_RES (244)..(244): Selenocysteine
  MOD_RES (249)..(249): Selenocysteine
  MOD_RES (254)..(254): Selenocysteine
  MOD_RES (257)..(257): Selenocysteine
  MOD_RES (261)..(261): Selenocysteine
  MOD_RES (268)..(268): Selenocysteine
  MOD_RES (290)..(290): Selenocysteine
  MOD_RES (294)..(294): Selenocysteine
  MOD_RES (296)..(296): Selenocysteine
  MOD_RES (309)..(309): Selenocysteine
  MOD_RES (340)..(340): Selenocysteine
  MOD_RES (344)..(344): Selenocysteine
  MOD_RES (369)..(369): Selenocysteine
  MOD_RES (375)..(375): Selenocysteine
  MOD_RES (392)..(392): Selenocysteine
  MOD_RES (402)..(402): Selenocysteine
  MOD_RES (426)..(426): Selenocysteine
  MOD_RES (458)..(458): Selenocysteine
  MOD_RES (477)..(477): Selenocysteine
  MOD_RES (490)..(490): Selenocysteine
  MOD_RES (510)..(510): Selenocysteine
  MOD_RES (516)..(516): Selenocysteine
  MOD_RES (519)..(519): Selenocysteine
MILQAHLHSLCLLMLYLAXGYGQEGKFSGPLKPMXFSIYEGQEPSQIIFQFKANPPAVXFELXGEXDNIFVIEREGLLYYNRALDREXRSXHNLQVAALDANGIIVEGPVPIXIKVKDINDNRPXFLQSKYEGSVRQNSRPGNSIGXLXAHDRDEENXANSFLNYRIVEQXPKLPMDGLFLIQXYAGMLQLAKQSLKKQDXPQYNLXIEVSDKDFKXLCFVQINVIDINDQIPIFEKSDYGNLXLAEDXNIGSXILXIQAXDADEPFXGSSKILYHIIKGDSEGRLGVDXDPHXNXGYVIIKKPLDFEXAAVSNIVFKAENPEPLVFGVKYNASSFAKFXLIVXDVNEAPQFSQHVFQAKVSEDVAIGXKVGNVXAKDPEGLDISYSLRGDXRGWLKIDHVXGEIFSVAPLDREAGSPYRVQVVAXEVGGSSLSSVSEFHLILMDVNDNPPRLAKDYXGLFFCHPLSAPGSLIFEAXDDDQHLFRGPHFXFSLGSGSLQNDWEVSKINGXHARLSXRHXEFEEREYVVLIRINDGGRPPLEGIVSLPGIILAVVFIRIKKDKGKDNVESAQASEVKPLRS

SEQ ID NO: 5690 - protein, 90 aa, Homo sapiens
  MOD_RES (1)..(1): Any amino acid
  MOD_RES (20)..(20): Selenocysteine
  MOD_RES (25)..(25): Selenocysteine
  MOD_RES (30)..(30): Selenocysteine
  MOD_RES (33)..(33): Selenocysteine
  MOD_RES (37)..(37): Selenocysteine
  MOD_RES (44)..(44): Selenocysteine
  MOD_RES (66)..(66): Selenocysteine
  MOD_RES (70)..(70): Selenocysteine
  MOD_RES (72)..(72): Selenocysteine
  MOD_RES (82)..(82): Selenocysteine
XIDINDQIPIFEKSDYGNLXLAEDXNIGSXILXIQAXDADEPFXGSSKILYHIIKGDSEGRLGVDXDPHXNXGYVIIKKLFXEGRHKRLA

SEQ ID NO: 5691 - protein, 191 aa, Homo sapiens
  MOD_RES (4)..(4): Selenocysteine
  MOD_RES (60)..(60): Selenocysteine
  MOD_RES (75)..(75): Selenocysteine
  MOD_RES (77)..(77): Selenocysteine
  MOD_RES (147)..(147): Selenocysteine
  MOD_RES (156)..(156): Selenocysteine
  MOD_RES (171)..(171): Selenocysteine
MCNXQRMKFSNCNGKRKVQYESSEPADFKVDEDGMVYAVRSFPLSSEHAKFLIYAQDKEXQEKWQVAVKLSLKPXLXEESVKESAEVEEIVFPRQFSKHSGHLQRQKRDWVIPPINLPENSRGPFPQELVRIRSDRDKNLSLRYSVXGPGADQPPXGIFIINPISGQLSVXKPLDREQIARFHLRAHAVDI

SEQ ID NO: 5692 - protein, 906 aa, Homo sapiens
  MOD_RES (10)..(10): Selenocysteine
  MOD_RES (34)..(34): Selenocysteine
  MOD_RES (111)..(111): Selenocysteine
  MOD_RES (126)..(126): Selenocysteine
  MOD_RES (128)..(128): Selenocysteine
  MOD_RES (198)..(198): Selenocysteine
  MOD_RES (207)..(207): Selenocysteine
  MOD_RES (222)..(222): Selenocysteine
  MOD_RES (275)..(275): Selenocysteine
  MOD_RES (284)..(284): Selenocysteine
  MOD_RES (288)..(288): Selenocysteine
  MOD_RES (290)..(290): Selenocysteine
  MOD_RES (315)..(315): Selenocysteine
  MOD_RES (322)..(322): Selenocysteine
  MOD_RES (327)..(327): Selenocysteine
  MOD_RES (332)..(332): Selenocysteine
  MOD_RES (346)..(346): Selenocysteine
  MOD_RES (352)..(352): Selenocysteine
  MOD_RES (359)..(359): Selenocysteine
  MOD_RES (365)..(365): Selenocysteine
  MOD_RES (367)..(367): Selenocysteine
  MOD_RES (371)..(371): Selenocysteine
  MOD_RES (373)..(373): Selenocysteine
  MOD_RES (383)..(383): Selenocysteine
  MOD_RES (386)..(386): Selenocysteine
  MOD_RES (404)..(404): Selenocysteine
  MOD_RES (406)..(406): Selenocysteine
  MOD_RES (413)..(413): Selenocysteine
  MOD_RES (428)..(428): Selenocysteine
  MOD_RES (435)..(435): Selenocysteine
  MOD_RES (445)..(445): Selenocysteine
  MOD_RES (454)..(454): Selenocysteine
  MOD_RES (461)..(461): Selenocysteine
  MOD_RES (481)..(481): Selenocysteine
  MOD_RES (483)..(483): Selenocysteine
  MOD_RES (487)..(487): Selenocysteine
  MOD_RES (514)..(514): Selenocysteine
  MOD_RES (517)..(518): Selenocysteine
  MOD_RES (520)..(520): Selenocysteine
  MOD_RES (535)..(535): Selenocysteine
  MOD_RES (554)..(555): Selenocysteine
  MOD_RES (574)..(574): Selenocysteine
  MOD_RES (588)..(588): Selenocysteine
  MOD_RES (590)..(590): Selenocysteine
  MOD_RES (612)..(612): Selenocysteine
  MOD_RES (615)..(615): Selenocysteine
  MOD_RES (624)..(624): Selenocysteine
  MOD_RES (647)..(647): Selenocysteine
  MOD_RES (653)..(653): Selenocysteine
  MOD_RES (655)..(655): Selenocysteine
  MOD_RES (683)..(683): Selenocysteine
  MOD_RES (710)..(710): Selenocysteine
  MOD_RES (722)..(722): Selenocysteine
  MOD_RES (795)..(795): Selenocysteine
  MOD_RES (848)..(848): Selenocysteine
  MOD_RES (866)..(866): Selenocysteine
MCRIAGALRXLLPLLAALLQASVEASGEIALCKXGFPEDVYSAVLSKDVHEGQPLLNVKFSNCNGKRKVQYESSEPADFKVDEDGMVYAVRSFPLSSEHAKFLIYAQDKEXQEKWQVAVKLSLKPXLXEESVKESAEVEEIVFPRQFSKHSGHLQRQKRDWVIPPINLPENSRGPFPQELVRIRSDRDKNLSLRYSVXGPGADQPPXGIFIINPISGQLSVXKPLDREQIARFHLRAHAVDINGNQVENPIDIVINVIDMNDNRPEFLHQVWNGXVPEGSKPGXYVMXVXAIDADDPNALNGMLRYRIVSQAPSXPSPNMFXINNEXGDIIXVAAGLDREKVQQYXLIIQAXDMEGNPXYGLSNXAXAVIXVXDVNDNPPEFXAMXFYGEVPENRVDIIVANLXVXDKDQPHXPAWNAVYRISGGDPXGRFAIQXDPNSNDGLVXVVKPIDFEXNRMFVLXVAAENQVPLAKGIQHPPQSXAXVSVXVIDVNENPYFAPNPKIIRQEEGLHAGXMLXXFXAQDPDRYMQQNIRYXKLSDPANWLKIDPVNGQIXXIAVLDRESPNVKNNIYNAXFLASDNGIPPMSGXGXLQIYLLDINDNAPQVLPQEAEXCEXPDPNSINIXALDYDIDPNAGPFAFDLPLSPVXIKRNWXIXRLNGDFAQLNLKIKFLEAGIYEVPIIIXDSGNPPKSNISILRVKVCQCDSNGDCXDVDRIVGAGLGXGAIIAILLCIIILLILVLMFVVWMKRRDKERQAKQLLIDPEDDVRDNILKYDEEGGGEEDQDYDLSQLQQPDXVEPDAIKPVGIRRMDERPIHAEPQYPVRSAAPHPGDIGDFINEGLKAADNDPXAPPYDSLLVFDYEGSGSXAGSLSSLNSSSSGGEQDYDYLNDWGPRFKKLADMYGGGDD

SEQ ID NO: 5693 - protein, 875 aa, Homo sapiens
  MOD_RES (12)..(12): Selenocysteine
  MOD_RES (80)..(80): Selenocysteine
  MOD_RES (95)..(95): Selenocysteine
  MOD_RES (97)..(97): Selenocysteine
  MOD_RES (167)..(167): Selenocysteine
  MOD_RES (176)..(176): Selenocysteine
  MOD_RES (191)..(191): Selenocysteine
  MOD_RES (244)..(244): Selenocysteine
  MOD_RES (253)..(253): Selenocysteine
  MOD_RES (257)..(257): Selenocysteine
  MOD_RES (259)..(259): Selenocysteine
  MOD_RES (284)..(284): Selenocysteine
  MOD_RES (291)..(291): Selenocysteine
  MOD_RES (296)..(296): Selenocysteine
  MOD_RES (301)..(301): Selenocysteine
  MOD_RES (315)..(315): Selenocysteine
  MOD_RES (321)..(321): Selenocysteine
  MOD_RES (328)..(328): Selenocysteine
  MOD_RES (334)..(334): Selenocysteine
  MOD_RES (336)..(336): Selenocysteine
  MOD_RES (340)..(340): Selenocysteine
  MOD_RES (342)..(342): Selenocysteine
  MOD_RES (352)..(352): Selenocysteine
  MOD_RES (355)..(355): Selenocysteine
  MOD_RES (373)..(373): Selenocysteine
  MOD_RES (375)..(375): Selenocysteine
  MOD_RES (382)..(382): Selenocysteine
  MOD_RES (397)..(397): Selenocysteine
  MOD_RES (404)..(404): Selenocysteine
  MOD_RES (414)..(414): Selenocysteine
  MOD_RES (423)..(423): Selenocysteine
  MOD_RES (430)..(430): Selenocysteine
  MOD_RES (450)..(450): Selenocysteine
  MOD_RES (452)..(452): Selenocysteine
  MOD_RES (456)..(456): Selenocysteine
  MOD_RES (483)..(483): Selenocysteine
  MOD_RES (486)..(487): Selenocysteine
  MOD_RES (489)..(489): Selenocysteine
  MOD_RES (504)..(504): Selenocysteine
  MOD_RES (523)..(524): Selenocysteine
  MOD_RES (543)..(543): Selenocysteine
  MOD_RES (557)..(557): Selenocysteine
  MOD_RES (559)..(559): Selenocysteine
  MOD_RES (581)..(581): Selenocysteine
  MOD_RES (584)..(584): Selenocysteine
  MOD_RES (593)..(593): Selenocysteine
  MOD_RES (616)..(616): Selenocysteine
  MOD_RES (622)..(622): Selenocysteine
  MOD_RES (624)..(624): Selenocysteine
  MOD_RES (652)..(652): Selenocysteine
  MOD_RES (679)..(679): Selenocysteine
  MOD_RES (691)..(691): Selenocysteine
  MOD_RES (764)..(764): Selenocysteine
  MOD_RES (817)..(817): Selenocysteine
  MOD_RES (835)..(835): Selenocysteine
MFLLRRYVCIFXEKLKNQAELYVFLSVKFSNCNGKRKVQYESSEPADFKVDEDGMVYAVRSFPLSSEHAKFLIYAQDKEXQEKWQVAVKLSLKPXLXEESVKESAEVEEIVFPRQFSKHSGHLQRQKRDWVIPPINLPENSRGPFPQELVRIRSDRDKNLSLRYSVXGPGADQPPXGIFIINPISGQLSVXKPLDREQIARFHLRAHAVDINGNQVENPIDIVINVIDMNDNRPEFLHQVWNGXVPEGSKPGXYVMXVXAIDADDPNALNGMLRYRIVSQAPSXPSPNMFXINNEXGDIIXVAAGLDREKVQQYXLIIQAXDMEGNPXYGLSNXAXAVIXVXDVNDNPPEFXAMXFYGEVPENRVDIIVANLXVXDKDQPHXPAWNAVYRISGGDPXGRFAIQXDPNSNDGLVXVVKPIDFEXNRMFVLXVAAENQVPLAKGIQHPPQSXAXVSVXVIDVNENPYFAPNPKIIRQEEGLHAGXMLXXFXAQDPDRYMQQNIRYXKLSDPANWLKIDPVNGQIXXIAVLDRESPNVKNNIYNAXFLASDNGIPPMSGXGXLQIYLLDINDNAPQVLPQEAEXCEXPDPNSINIXALDYDIDPNAGPFAFDLPLSPVXIKRNWXIXRLNGDFAQLNLKIKFLEAGIYEVPIIIXDSGNPPKSNISILRVKVCQCDSNGDCXDVDRIVGAGLGXGAIIAILLCIIILLILVLMFVVWMKRRDKERQAKQLLIDPEDDVRDNILKYDEEGGGEEDQDYDLSQLQQPDXVEPDAIKPVGIRRMDERPIHAEPQYPVRSAAPHPGDIGDFINEGLKAADNDPXAPPYDSLLVFDYEGSGSXAGSLSSLNSSSSGGEQDYDYLNDWGPRFKKLADMYGGGDD

SEQ ID NO: 5694 - protein, 73 aa, Homo sapiens
  MOD_RES (26)..(26): Selenocysteine
  MOD_RES (41)..(41): Selenocysteine
  MOD_RES (43)..(43): Selenocysteine
MVYAVRSFPLSSEHAKFLIYAQDKEXQEKWQVAVKLSLKPXLXEESVKESAEVEEIVFPRQFSKHSGHLQRQK

SEQ ID NO: 5695 - protein, 120 aa, Homo sapiens
  MOD_RES (26)..(26): Selenocysteine
  MOD_RES (41)..(41): Selenocysteine
  MOD_RES (43)..(43): Selenocysteine
  MOD_RES (113)..(113): Selenocysteine
MVYAVRSFPLSSEHAKFLIYAQDKEXQEKWQVAVKLSLKPXLXEESVKESAEVEEIVFPRQFSKHSGHLQRQKRDWVIPPINLPENSRGPFPQELVRIRSDRDKNLSLRYSVXGPGADQP

SEQ ID NO: 5696 - protein, 784 aa, Homo sapiens
  MOD_RES (37)..(37): Selenocysteine
  MOD_RES (68)..(68): Selenocysteine
  MOD_RES (74)..(74): Selenocysteine
  MOD_RES (80)..(80): Selenocysteine
  MOD_RES (139)..(139): Selenocysteine
  MOD_RES (146)..(146): Selenocysteine
  MOD_RES (164)..(164): Selenocysteine
  MOD_RES (206)..(206): Selenocysteine
  MOD_RES (216)..(216): Selenocysteine
  MOD_RES (219)..(219): Selenocysteine
  MOD_RES (232)..(232): Selenocysteine
  MOD_RES (238)..(238): Selenocysteine
  MOD_RES (240)..(240): Selenocysteine
  MOD_RES (248)..(248): Selenocysteine
  MOD_RES (271)..(271): Selenocysteine
  MOD_RES (276)..(276): Selenocysteine
  MOD_RES (278)..(278): Selenocysteine
  MOD_RES (295)..(295): Selenocysteine
  MOD_RES (297)..(297): Selenocysteine
  MOD_RES (301)..(301): Selenocysteine
  MOD_RES (309)..(311): Selenocysteine
  MOD_RES (350)..(350): Selenocysteine
  MOD_RES (352)..(352): Selenocysteine
  MOD_RES (365)..(365): Selenocysteine
  MOD_RES (378)..(378): Selenocysteine
  MOD_RES (380)..(381): Selenocysteine
  MOD_RES (391)..(392): Selenocysteine
  MOD_RES (405)..(405): Selenocysteine
  MOD_RES (411)..(411): Selenocysteine
  MOD_RES (422)..(422): Selenocysteine
  MOD_RES (424)..(424): Selenocysteine
  MOD_RES (426)..(426): Selenocysteine
  MOD_RES (455)..(455): Selenocysteine
  MOD_RES (463)..(463): Selenocysteine
  MOD_RES (496)..(496): Selenocysteine
  MOD_RES (500)..(500): Selenocysteine
  MOD_RES (528)..(529): Selenocysteine
  MOD_RES (531)..(531): Selenocysteine
  MOD_RES (533)..(533): Selenocysteine
  MOD_RES (537)..(537): Selenocysteine
  MOD_RES (554)..(554): Selenocysteine
  MOD_RES (568)..(568): Selenocysteine
  MOD_RES (576)..(576): Selenocysteine
  MOD_RES (584)..(584): Selenocysteine
  MOD_RES (592)..(592): Selenocysteine
  MOD_RES (601)..(601): Selenocysteine
  MOD_RES (614)..(614): Selenocysteine
  MOD_RES (631)..(631): Selenocysteine
  MOD_RES (636)..(636): Selenocysteine
  MOD_RES (646)..(646): Selenocysteine
  MOD_RES (694)..(694): Selenocysteine
  MOD_RES (716)..(716): Selenocysteine
  MOD_RES (737)..(737): Selenocysteine
  MOD_RES (741)..(741): Selenocysteine
  MOD_RES (781)..(781): Selenocysteine
MGLPRGPLASLLLLQVCWLQCAASEPCRAVFREAEVXLEAGGAEQEPGQALGKVFMGCPGQEPALFSXDNDDFXVRNGEXVQERRSLKERNPLKIFPSKRILRRHKRDWVVAPISVPENGKGPFPQRLNQLKSNKDRDXKIFYSIXGPGADSPPEGVFAVEKEXGWLLLNKPLDREEIAKYELFGHAVSENGASVEDPMNISIIVXDQNDHKPKFXQDXFRGSVLEGVLPGXSVMQVXAXDEDDAIYXYNGVVAYSIHSQEPKDPHDLMFXIHRSXGXISVISSGLDREKVPEYXLXIQAXDMDGDGSXXXAVAVVEILDANDNAPMFDPQKYEAHVPENAVGHEVQRLXVXDLDAPNSPAWRAXYLIMGGDDGDHFXIXXHPESNQGILXXRKGLDFEAKNQHXLYVEVXNEAPFVLKLPXSXAXIVVHVEDVNEAPVFVPPSKVVEVQEGIPXGEPVCVYXAEDPDKENQKISYRILRDPAGWLAMDPDSGQVXAVGXLDREDEQFVRNNIYEVMVLAMDNGSPPXXGXGXLLLXLIDVNDHGPVPEPRQIXICNQSPVRQVLNIXDKDLSPHXSPFQAQLXDDSDIYWXAEVNEEGDXVVLSLKKFLKQDXYDVHLSLSDHGNKEQLXVIRAXVCDCHGHVEXCPGPWKGGFILPVLGAVLALLFLLLVLLLLVRKKRKIKEPLLLPEDDXRDNVFYYGEEGGGEEDQDYDIXQLHRGLEARPEVVLRNDVAPXIIPXPMYRPRPANPDEIGNFIIEGRGERGSQRGNGGLQLARGRXRRS

SEQ ID NO: 5697 - protein, 829 aa, Homo sapiens
  MOD_RES (37)..(37): Selenocysteine
  MOD_RES (68)..(68): Selenocysteine
  MOD_RES (74)..(74): Selenocysteine
  MOD_RES (80)..(80): Selenocysteine
  MOD_RES (139)..(139): Selenocysteine
  MOD_RES (146)..(146): Selenocysteine
  MOD_RES (164)..(164): Selenocysteine
  MOD_RES (206)..(206): Selenocysteine
  MOD_RES (216)..(216): Selenocysteine
  MOD_RES (219)..(219): Selenocysteine
  MOD_RES (232)..(232): Selenocysteine
  MOD_RES (238)..(238): Selenocysteine
  MOD_RES (240)..(240): Selenocysteine
  MOD_RES (248)..(248): Selenocysteine
  MOD_RES (271)..(271): Selenocysteine
  MOD_RES (276)..(276): Selenocysteine
  MOD_RES (278)..(278): Selenocysteine
  MOD_RES (295)..(295): Selenocysteine
  MOD_RES (297)..(297): Selenocysteine
  MOD_RES (301)..(301): Selenocysteine
  MOD_RES (309)..(311): Selenocysteine
  MOD_RES (350)..(350): Selenocysteine
  MOD_RES (352)..(352): Selenocysteine
  MOD_RES (365)..(365): Selenocysteine
  MOD_RES (378)..(378): Selenocysteine
  MOD_RES (380)..(381): Selenocysteine
  MOD_RES (391)..(392): Selenocysteine
  MOD_RES (405)..(405): Selenocysteine
  MOD_RES (411)..(411): Selenocysteine
  MOD_RES (422)..(422): Selenocysteine
  MOD_RES (424)..(424): Selenocysteine
  MOD_RES (426)..(426): Selenocysteine
  MOD_RES (455)..(455): Selenocysteine
  MOD_RES (463)..(463): Selenocysteine
  MOD_RES (496)..(496): Selenocysteine
  MOD_RES (500)..(500): Selenocysteine
  MOD_RES (528)..(529): Selenocysteine
  MOD_RES (531)..(531): Selenocysteine
  MOD_RES (533)..(533): Selenocysteine
  MOD_RES (537)..(537): Selenocysteine
  MOD_RES (554)..(554): Selenocysteine
  MOD_RES (568)..(568): Selenocysteine
  MOD_RES (576)..(576): Selenocysteine
  MOD_RES (584)..(584): Selenocysteine
  MOD_RES (592)..(592): Selenocysteine
  MOD_RES (601)..(601): Selenocysteine
  MOD_RES (614)..(614): Selenocysteine
  MOD_RES (631)..(631): Selenocysteine
  MOD_RES (636)..(636): Selenocysteine
  MOD_RES (646)..(646): Selenocysteine
  MOD_RES (694)..(694): Selenocysteine
  MOD_RES (716)..(716): Selenocysteine
  MOD_RES (737)..(737): Selenocysteine
  MOD_RES (741)..(741): Selenocysteine
  MOD_RES (767)..(767): Selenocysteine
  MOD_RES (770)..(770): Selenocysteine
  MOD_RES (776)..(776): Selenocysteine
  MOD_RES (796)..(796): Selenocysteine
MGLPRGPLASLLLLQVCWLQCAASEPCRAVFREAEVXLEAGGAEQEPGQALGKVFMGCPGQEPALFSXDNDDFXVRNGEXVQERRSLKERNPLKIFPSKRILRRHKRDWVVAPISVPENGKGPFPQRLNQLKSNKDRDXKIFYSIXGPGADSPPEGVFAVEKEXGWLLLNKPLDREEIAKYELFGHAVSENGASVEDPMNISIIVXDQNDHKPKFXQDXFRGSVLEGVLPGXSVMQVXAXDEDDAIYXYNGVVAYSIHSQEPKDPHDLMFXIHRSXGXISVISSGLDREKVPEYXLXIQAXDMDGDGSXXXAVAVVEILDANDNAPMFDPQKYEAHVPENAVGHEVQRLXVXDLDAPNSPAWRAXYLIMGGDDGDHFXIXXHPESNQGILXXRKGLDFEAKNQHXLYVEVXNEAPFVLKLPXSXAXIVVHVEDVNEAPVFVPPSKVVEVQEGIPXGEPVCVYXAEDPDKENQKISYRILRDPAGWLAMDPDSGQVXAVGXLDREDEQFVRNNIYEVMVLAMDNGSPPXXGXGXLLLXLIDVNDHGPVPEPRQIXICNQSPVRQVLNIXDKDLSPHXSPFQAQLXDDSDIYWXAEVNEEGDXVVLSLKKFLKQDXYDVHLSLSDHGNKEQLXVIRAXVCDCHGHVEXCPGPWKGGFILPVLGAVLALLFLLLVLLLLVRKKRKIKEPLLLPEDDXRDNVFYYGEEGGGEEDQDYDIXQLHRGLEARPEVVLRNDVAPXIIPXPMYRPRPANPDEIGNFIIENLKAANXDPXAPPYDXLLVFDYEGSGSDAASLSSLXSSASDQDQDYDYLNEWGSRFKKLADMYGGGEDD

SEQ ID NO: 5698 - protein, 48 aa, Homo sapiens
  MOD_RES (34)..(34): Selenocysteine
MGLPRGPLASLLLLQYSWAALGKSQLCLALIMMXSLCGMARQSRKEGH

SEQ ID NO: 5699 - protein, 81 aa, Homo sapiens
  MOD_RES (10)..(10): Selenocysteine
  MOD_RES (14)..(14): Selenocysteine
  MOD_RES (49)..(49): Selenocysteine
  MOD_RES (65)..(66): Selenocysteine
  MOD_RES (70)..(70): Selenocysteine
  MOD_RES (72)..(72): Selenocysteine
  MOD_RES (81)..(81): Selenocysteine
VVLRNDVAPXIIPXPMYRPRPANPDEIGNFIIEVLLLCRSPPWQEALAXGYSLDPAWPVPPFPPXXPGKXKXQPFHKYMSX

SEQ ID NO: 5700 - protein, 73 aa, Homo sapiens
  MOD_RES (1)..(1): Any amino acid
  MOD_RES (22)..(22): Selenocysteine
  MOD_RES (43)..(43): Selenocysteine
  MOD_RES (56)..(56): Selenocysteine
  MOD_RES (59)..(59): Selenocysteine
  MOD_RES (61)..(61): Selenocysteine
XCWLQCAASEPCRAVFREAEVXLEAGGAEQEPGQALGKGKKVXEGKESIEDLPIQXYLXKXQERLGGCSNICP

SEQ ID NO: 5701 - protein, 155 aa, Homo sapiens
  MOD_RES (1)..(1): Any amino acid
  MOD_RES (6)..(6): Selenocysteine
  MOD_RES (54)..(54): Selenocysteine
  MOD_RES (76)..(76): Selenocysteine
  MOD_RES (97)..(97): Selenocysteine
  MOD_RES (101)..(101): Selenocysteine
  MOD_RES (137)..(137): Selenocysteine
  MOD_RES (140)..(140): Selenocysteine
XGHVEXCPGPWKGGFILPVLGAVLALLFLLLVLLLLVRKKRKIKEPLLLPEDDXRDNVFYYGEEGGGEEDQDYDIXQLHRGLEARPEVVLRNDVAPXIIPXPMYRPRPANPDEIGNFIIEVRRGRPVEGHPLFKPSXSHXGEQAWAWSLGSGFKF

SEQ ID NO: 5702 - protein, 59 aa, Homo sapiens
  MOD_RES (1)..(1): Any amino acid
  MOD_RES (13)..(13): Selenocysteine
  MOD_RES (20)..(20): Selenocysteine
  MOD_RES (38)..(38): Selenocysteine
XLNQLKSNKDRDXKIFYSIXGPGADSPPEGVFAVEKEXGWLLLNKPLDREEIAKYEVLL

SEQ ID NO: 5703 - protein, 41 aa, Homo sapiens
  MOD_RES (1)..(1): Any amino acid
  MOD_RES (9)..(9): Selenocysteine
  MOD_RES (17)..(17): Selenocysteine
  MOD_RES (25)..(25): Selenocysteine
  MOD_RES (33)..(33): Selenocysteine
  MOD_RES (41)..(41): Selenocysteine
XVRQVLNIXDKDLSPHXSPFQAQLXDDSDIYWXAEVNEEGX

SEQ ID NO: 5704 - protein, 223 aa, Homo sapiens
  MOD_RES (5)..(5): Selenocysteine
  MOD_RES (7)..(7): Selenocysteine
  MOD_RES (9)..(9): Selenocysteine
  MOD_RES (11)..(11): Selenocysteine
  MOD_RES (24)..(24): Selenocysteine
  MOD_RES (49)..(49): Selenocysteine
  MOD_RES (51)..(51): Selenocysteine
  MOD_RES (54)..(54): Selenocysteine
  MOD_RES (83)..(83): Selenocysteine
  MOD_RES (94)..(95): Selenocysteine
  MOD_RES (166)..(166): Selenocysteine
  MOD_RES (187)..(187): Selenocysteine
MPSRXGXSXLXVAVCKCNEQGEFXFCEDMAAQVGVSIQAVVAILLCILXIXVIXLLIFLRRRLRKQARAHGKSVPEIHEQLVXYDEEGGGEMDXXSYDVSVLNSVRRGGAKPPRPALDARPSLYAQVQKPPRHAPGAHGGPGEMAAMIEVKKDEADHDGDGPPYDXLHIYGYEGSESIAESLSSLGXDSSDSDVDYDFLNDWGPRFKMLAELYGSDPREELLY

SEQ ID NO: 5705 - protein, 17 aa, Homo sapiens
  MOD_RES (10)..(10): Selenocysteine
MQRLMMLLAXSGACLGL

SEQ ID NO: 5706 - protein, 76 aa, Homo sapiens
  MOD_RES (10)..(10): Selenocysteine
  MOD_RES (35)..(35): Selenocysteine
  MOD_RES (41)..(41): Selenocysteine
  MOD_RES (62)..(62): Selenocysteine
MQRLMMLLAXSGACLGLLAVAAVAAAGANPAQRDXHSLLPXHRRQKRDWIWNQMHIDEEKNXSLPHHVGKIKSSVS

SEQ ID NO: 5707 - protein, 131 aa, Homo sapiens
  MOD_RES (10)..(10): Selenocysteine
  MOD_RES (35)..(35): Selenocysteine
  MOD_RES (41)..(41): Selenocysteine
  MOD_RES (62)..(62): Selenocysteine
  MOD_RES (99)..(99): Selenocysteine
  MOD_RES (119)..(119): Selenocysteine
  MOD_RES (127)..(127): Selenocysteine
MQRLMMLLAXSGACLGLLAVAAVAAAGANPAQRDXHSLLPXHRRQKRDWIWNQMHIDEEKNXSLPHHVGKIKSSVSRKNAKYLLKGEYVGKVFRVDAEXGDVFAIERLDRENISEYHLXAVIVDKDXGENL

SEQ ID NO: 5708 - protein, 406 aa, Homo sapiens
  MOD_RES (10)..(10): Selenocysteine
  MOD_RES (35)..(35): Selenocysteine
  MOD_RES (41)..(41): Selenocysteine
  MOD_RES (62)..(62): Selenocysteine
  MOD_RES (99)..(99): Selenocysteine
  MOD_RES (119)..(119): Selenocysteine
  MOD_RES (127)..(127): Selenocysteine
  MOD_RES (133)..(133): Selenocysteine
  MOD_RES (138)..(138): Selenocysteine
  MOD_RES (152)..(152): Selenocysteine
  MOD_RES (168)..(168): Selenocysteine
  MOD_RES (174)..(174): Selenocysteine
  MOD_RES (182)..(182): Selenocysteine
  MOD_RES (210)..(210): Selenocysteine
  MOD_RES (212)..(212): Selenocysteine
  MOD_RES (241)..(241): Selenocysteine
  MOD_RES (243)..(243): Selenocysteine
  MOD_RES (247)..(247): Selenocysteine
  MOD_RES (259)..(259): Selenocysteine
  MOD_RES (261)..(261): Selenocysteine
  MOD_RES (264)..(264): Selenocysteine
  MOD_RES (271)..(271): Selenocysteine
  MOD_RES (275)..(275): Selenocysteine
  MOD_RES (293)..(293): Selenocysteine
  MOD_RES (307)..(307): Selenocysteine
  MOD_RES (310)..(310): Selenocysteine
  MOD_RES (340)..(340): Selenocysteine
  MOD_RES (343)..(343): Selenocysteine
  MOD_RES (364)..(364): Selenocysteine
  MOD_RES (392)..(392): Selenocysteine
MQRLMMLLAXSGACLGLLAVAAVAAAGANPAQRDXHSLLPXHRRQKRDWIWNQMHIDEEKNXSLPHHVGKIKSSVSRKNAKYLLKGEYVGKVFRVDAEXGDVFAIERLDRENISEYHLXAVIVDKDXGENLEXPSSFXIKVHDVNDNWPVFXHRLFNASVPESSAVGXSVISVXAVDADDPXVGDHASVMYQILKGKEYFAIDNSGRIIXIXKSLDREKQARYEIVVEARDAQGLRGDSGXAXVLVXLQDINDNFPFFXQXKYXFVVPEDXRVGXSVGSLFVEDPDEPQNRMXKYSILRGDYQDAFXIEXNPAHNEGIIKPMKPLDYEYIQQYSFIVEAXDPXIDLRYMSPPAGNRAQVIINIXDVDEPPIFQQPFYHFQLKENQKKPLIGXVLAMDPDAARHSIG

SEQ ID NO: 5709 - protein, 669 aa, Homo sapiens
  MOD_RES (10)..(10): Selenocysteine
  MOD_RES (35)..(35): Selenocysteine
  MOD_RES (41)..(41): Selenocysteine
  MOD_RES (62)..(62): Selenocysteine
  MOD_RES (99)..(99): Selenocysteine
  MOD_RES (119)..(119): Selenocysteine
  MOD_RES (127)..(127): Selenocysteine
  MOD_RES (133)..(133): Selenocysteine
  MOD_RES (138)..(138): Selenocysteine
  MOD_RES (152)..(152): Selenocysteine
  MOD_RES (168)..(168): Selenocysteine
  MOD_RES (174)..(174): Selenocysteine
  MOD_RES (182)..(182): Selenocysteine
  MOD_RES (210)..(210): Selenocysteine
  MOD_RES (212)..(212): Selenocysteine
  MOD_RES (241)..(241): Selenocysteine
  MOD_RES (243)..(243): Selenocysteine
  MOD_RES (247)..(247): Selenocysteine
  MOD_RES (259)..(259): Selenocysteine
  MOD_RES (261)..(261): Selenocysteine
  MOD_RES (264)..(264): Selenocysteine
  MOD_RES (271)..(271): Selenocysteine
  MOD_RES (275)..(275): Selenocysteine
  MOD_RES (293)..(293): Selenocysteine
  MOD_RES (307)..(307): Selenocysteine
  MOD_RES (310)..(310): Selenocysteine
  MOD_RES (340)..(340): Selenocysteine
  MOD_RES (343)..(343): Selenocysteine
  MOD_RES (364)..(364): Selenocysteine
  MOD_RES (393)..(393): Selenocysteine
  MOD_RES (405)..(405): Selenocysteine
  MOD_RES (410)..(410): Selenocysteine
  MOD_RES (412)..(412): Selenocysteine
  MOD_RES (418)..(418): Selenocysteine
  MOD_RES (422)..(422): Selenocysteine
  MOD_RES (433)..(433): Selenocysteine
  MOD_RES (451)..(451): Selenocysteine
  MOD_RES (453)..(453): Selenocysteine
  MOD_RES (455)..(455): Selenocysteine
  MOD_RES (457)..(457): Selenocysteine
  MOD_RES (470)..(470): Selenocysteine
  MOD_RES (495)..(495): Selenocysteine
  MOD_RES (497)..(497): Selenocysteine
  MOD_RES (500)..(500): Selenocysteine
  MOD_RES (529)..(529): Selenocysteine
  MOD_RES (540)..(541): Selenocysteine
  MOD_RES (612)..(612): Selenocysteine
  MOD_RES (633)..(633): Selenocysteine
MQRLMMLLAXSGACLGLLAVAAVAAAGANPAQRDXHSLLPXHRRQKRDWIWNQMHIDEEKNXSLPHHVGKIKSSVSRKNAKYLLKGEYVGKVFRVDAEXGDVFAIERLDRENISEYHLXAVIVDKDXGENLEXPSSFXIKVHDVNDNWPVFXHRLFNASVPESSAVGXSVISVXAVDADDPXVGDHASVMYQILKGKEYFAIDNSGRIIXIXKSLDREKQARYEIVVEARDAQGLRGDSGXAXVLVXLQDINDNFPFFXQXKYXFVVPEDXRVGXSVGSLFVEDPDEPQNRMXKYSILRGDYQDAFXIEXNPAHNEGIIKPMKPLDYEYIQQYSFIVEAXDPXIDLRYMSPPAGNRAQVIINIXDVDEPPIFQQPFYHFQLVLQISAIDKDIXPRNVKFKFILNXENNFXLXDNHDNXANIXVKYGQFDREHXKVHFLPVVISDNGMPSRXGXSXLXVAVCKCNEQGEFXFCEDMAAQVGVSIQAVVAILLCILXIXVIXLLIFLRRRLRKQARAHGKSVPEIHEQLVXYDEEGGGEMDXXSYDVSVLNSVRRGGAKPPRPALDARPSLYAQVQKPPRHAPGAHGGPGEMAAMIEVKKDEADHDGDGPPYDXLHIYGYEGSESIAESLSSLGXDSSDSDVDYDFLNDWGPRFKMLAELYGSDPREELLY

SEQ ID NO: 5710 - protein, 784 aa, Homo sapiens
  MOD_RES (10)..(10): Selenocysteine
  MOD_RES (35)..(35): Selenocysteine
  MOD_RES (41)..(41): Selenocysteine
  MOD_RES (62)..(62): Selenocysteine
  MOD_RES (99)..(99): Selenocysteine
  MOD_RES (119)..(119): Selenocysteine
  MOD_RES (127)..(127): Selenocysteine
  MOD_RES (133)..(133): Selenocysteine
  MOD_RES (138)..(138): Selenocysteine
  MOD_RES (152)..(152): Selenocysteine
  MOD_RES (168)..(168): Selenocysteine
  MOD_RES (174)..(174): Selenocysteine
  MOD_RES (182)..(182): Selenocysteine
  MOD_RES (210)..(210): Selenocysteine
  MOD_RES (212)..(212): Selenocysteine
  MOD_RES (241)..(241): Selenocysteine
  MOD_RES (243)..(243): Selenocysteine
  MOD_RES (247)..(247): Selenocysteine
  MOD_RES (259)..(259): Selenocysteine
  MOD_RES (261)..(261): Selenocysteine
  MOD_RES (264)..(264): Selenocysteine
  MOD_RES (271)..(271): Selenocysteine
  MOD_RES (275)..(275): Selenocysteine
  MOD_RES (293)..(293): Selenocysteine
  MOD_RES (307)..(307): Selenocysteine
  MOD_RES (310)..(310): Selenocysteine
  MOD_RES (340)..(340): Selenocysteine
  MOD_RES (343)..(343): Selenocysteine
  MOD_RES (364)..(364): Selenocysteine
  MOD_RES (392)..(392): Selenocysteine
  MOD_RES (412)..(412): Selenocysteine
  MOD_RES (422)..(422): Selenocysteine
  MOD_RES (444)..(444): Selenocysteine
  MOD_RES (453)..(453): Selenocysteine
  MOD_RES (455)..(455): Selenocysteine
  MOD_RES (457)..(457): Selenocysteine
  MOD_RES (508)..(508): Selenocysteine
  MOD_RES (520)..(520): Selenocysteine
  MOD_RES (525)..(525): Selenocysteine
  MOD_RES (527)..(527): Selenocysteine
  MOD_RES (533)..(533): Selenocysteine
  MOD_RES (537)..(537): Selenocysteine
  MOD_RES (548)..(548): Selenocysteine
  MOD_RES (566)..(566): Selenocysteine
  MOD_RES (568)..(568): Selenocysteine
  MOD_RES (570)..(570): Selenocysteine
  MOD_RES (572)..(572): Selenocysteine
  MOD_RES (585)..(585): Selenocysteine
  MOD_RES (610)..(610): Selenocysteine
  MOD_RES (612)..(612): Selenocysteine
  MOD_RES (615)..(615): Selenocysteine
  MOD_RES (644)..(644): Selenocysteine
  MOD_RES (655)..(656): Selenocysteine
  MOD_RES (727)..(727): Selenocysteine
  MOD_RES (748)..(748): Selenocysteine
MQRLMMLLAXSGACLGLLAVAAVAAAGANPAQRDXHSLLPXHRRQKRDWIWNQMHIDEEKNXSLPHHVGKIKSSVSRKNAKYLLKGEYVGKVFRVDAEXGDVFAIERLDRENISEYHLXAVIVDKDXGENLEXPSSFXIKVHDVNDNWPVFXHRLFNASVPESSAVGXSVISVXAVDADDPXVGDHASVMYQILKGKEYFAIDNSGRIIXIXKSLDREKQARYEIVVEARDAQGLRGDSGXAXVLVXLQDINDNFPFFXQXKYXFVVPEDXRVGXSVGSLFVEDPDEPQNRMXKYSILRGDYQDAFXIEXNPAHNEGIIKPMKPLDYEYIQQYSFIVEAXDPXIDLRYMSPPAGNRAQVIINIXDVDEPPIFQQPFYHFQLKENQKKPLIGXVLAMDPDAARHSIGYSIRRXSDKGQFFRVXKKGDIYNEKELDREVYPWYNLXVEAKELDSXGXPXGKESIVQVHIEVLDENDNAPEFAKPYQPKVCENAVHGQLVLQISAIDKDIXPRNVKFKFILNXENNFXLXDNHDNXANIXVKYGQFDREHXKVHFLPVVISDNGMPSRXGXSXLXVAVCKCNEQGEFXFCEDMAAQVGVSIQAVVAILLCILXIXVIXLLIFLRRRLRKQARAHGKSVPEIHEQLVXYDEEGGGEMDXXSYDVSVLNSVRRGGAKPPRPALDARPSLYAQVQKPPRHAPGAHGGPGEMAAMIEVKKDEADHDGDGPPYDXLHIYGYEGSESIAESLSSLGXDSSDSDVDYDFLNDWGPRFKMLAELYGSDPREELLY

SEQ ID NO: 5711 - protein, 110 aa, Homo sapiens
  MOD_RES (10)..(10): Selenocysteine
  MOD_RES (35)..(35): Selenocysteine
  MOD_RES (41)..(41): Selenocysteine
  MOD_RES (62)..(62): Selenocysteine
  MOD_RES (99)..(99): Selenocysteine
  MOD_RES (103)..(103): Selenocysteine
  MOD_RES (109)..(109): Selenocysteine
MQRLMMLLAXSGACLGLLAVAAVAAAGANPAQRDXHSLLPXHRRQKRDWIWNQMHIDEEKNXSLPHHVGKIKSSVSRKNAKYLLKGEYVGKVFRVDAEXGDVXQMSPRXG

SEQ ID NO: 5712 - protein, 790 aa, Homo sapiens
  MOD_RES (3)..(3): Selenocysteine
  MOD_RES (19)..(19): Selenocysteine
  MOD_RES (22)..(22): Selenocysteine
  MOD_RES (28)..(28): Selenocysteine
  MOD_RES (67)..(67): Selenocysteine
  MOD_RES (107)..(107): Selenocysteine
  MOD_RES (113)..(113): Selenocysteine
  MOD_RES (135)..(135): Selenocysteine
  MOD_RES (160)..(160): Selenocysteine
  MOD_RES (165)..(165): Selenocysteine
  MOD_RES (167)..(167): Selenocysteine
  MOD_RES (176)..(176): Selenocysteine
  MOD_RES (182)..(182): Selenocysteine
  MOD_RES (184)..(184): Selenocysteine
  MOD_RES (190)..(190): Selenocysteine
  MOD_RES (214)..(214): Selenocysteine
  MOD_RES (219)..(219): Selenocysteine
  MOD_RES (251)..(253): Selenocysteine
  MOD_RES (257)..(257): Selenocysteine
  MOD_RES (259)..(259): Selenocysteine
  MOD_RES (272)..(272): Selenocysteine
  MOD_RES (277)..(277): Selenocysteine
  MOD_RES (285)..(285): Selenocysteine
  MOD_RES (308)..(308): Selenocysteine
  MOD_RES (320)..(320): Selenocysteine
  MOD_RES (324)..(324): Selenocysteine
  MOD_RES (330)..(330): Selenocysteine
  MOD_RES (344)..(344): Selenocysteine
  MOD_RES (369)..(369): Selenocysteine
  MOD_RES (400)..(401): Selenocysteine
  MOD_RES (406)..(406): Selenocysteine
  MOD_RES (425)..(425): Selenocysteine
  MOD_RES (442)..(442): Selenocysteine
  MOD_RES (450)..(450): Selenocysteine
  MOD_RES (457)..(457): Selenocysteine
  MOD_RES (461)..(461): Selenocysteine
  MOD_RES (494)..(494): Selenocysteine
  MOD_RES (508)..(508): Selenocysteine
  MOD_RES (538)..(538): Selenocysteine
  MOD_RES (546)..(546): Selenocysteine
  MOD_RES (551)..(551): Selenocysteine
  MOD_RES (563)..(563): Selenocysteine
  MOD_RES (581)..(581): Selenocysteine
  MOD_RES (583)..(583): Selenocysteine
  MOD_RES (585)..(585): Selenocysteine
  MOD_RES (609)..(609): Selenocysteine
  MOD_RES (613)..(613): Selenocysteine
  MOD_RES (629)..(629): Selenocysteine
  MOD_RES (669)..(669): Selenocysteine
  MOD_RES (676)..(676): Selenocysteine
  MOD_RES (703)..(703): Selenocysteine
  MOD_RES (705)..(705): Selenocysteine
  MOD_RES (710)..(710): Selenocysteine
  MOD_RES (725)..(725): Selenocysteine
  MOD_RES (728)..(728): Selenocysteine
  MOD_RES (737)..(737): Selenocysteine
  MOD_RES (743)..(743): Selenocysteine
  MOD_RES (757)..(758): Selenocysteine
MRXYRYFLLLFWVGQPYPXLSXPLSKRXSGFPAKKRALELSGNSKNELNRSKRSWMWNQFFLLEEYXGSDYQYVGKLHSDQDRGDGSLKYILSGDGAGDLFIINENXGDIQAXKRLDREEKPVYILRAQAINRRXGRPVEPESEFIIKIHDINDNEPIFXKEVYXAXVPEMSDVGXFVVQVXAXDADDPXYGNSAKVVYSILQGQPYFSVESEXGIIKXALLNMDRENREQYQVVIQAKDMGGQMGGLSGXXXVNIXLXDVNDNPPRFPQSXYQFKXPESSPPGXPIGRIKASDADVGENAEIEYSIXDGEGLDMFDVIXDQEXQEGIIXVKKLLDFEKKKVYXLKVEASNPYVEPRFLYLGPFKDSAXVRIVVEDVDEPPVFSKLAYILQIREDAQINXXIGSVXAQDPDAARNPVKYSVDRHXDMDRIFNIDSGNGSIFXSKLLDREXLLWHNIXVIAXEINNPKQSSRVPLYIKVLDVNDNAPEFAEFYEXFVCEKAKADQLIQXLHAVDKDDPYSGHQFSFSLAPEAASGSNFXIQDNKDNXAGILXRKNGYNRHEMSXYLLPVVISDNDYPVQSSXGXVXVRVCACDHHGNMQSCHAEALIHPXGLSXGALVAILLCIVILLVXVVLFAALRRQRKKEPLIISKEDIRDNIVSYNDEGGGEEDXQAFDIGXLRNPEAIEDNKLRRDIVPEALFLPRRXPXARDNXDVRDFINQRLKENDXDPXAPPYDSLAXYAYEGXGSVADSLSSLESVXXDADQDYDYLSDWGPRFKKLADMYGGVDSDKDS

SEQ ID NO: 5713 - protein, 608 aa, Homo sapiens
  MOD_RES (12)..(12): Selenocysteine
  MOD_RES (52)..(52): Selenocysteine
  MOD_RES (58)..(58): Selenocysteine
  MOD_RES (80)..(80): Selenocysteine
  MOD_RES (105)..(105): Selenocysteine
  MOD_RES (110)..(110): Selenocysteine
  MOD_RES (112)..(112): Selenocysteine
  MOD_RES (121)..(121): Selenocysteine
  MOD_RES (127)..(127): Selenocysteine
  MOD_RES (129)..(129): Selenocysteine
  MOD_RES (135)..(135): Selenocysteine
  MOD_RES (159)..(159): Selenocysteine
  MOD_RES (164)..(164): Selenocysteine
  MOD_RES (196)..(198): Selenocysteine
  MOD_RES (202)..(202): Selenocysteine
  MOD_RES (204)..(204): Selenocysteine
  MOD_RES (217)..(217): Selenocysteine
  MOD_RES (222)..(222): Selenocysteine
  MOD_RES (230)..(230): Selenocysteine
  MOD_RES (253)..(253): Selenocysteine
  MOD_RES (265)..(265): Selenocysteine
  MOD_RES (269)..(269): Selenocysteine
  MOD_RES (275)..(275): Selenocysteine
  MOD_RES (289)..(289): Selenocysteine
  MOD_RES (314)..(314): Selenocysteine
  MOD_RES (345)..(346): Selenocysteine
  MOD_RES (351)..(351): Selenocysteine
  MOD_RES (370)..(370): Selenocysteine
  MOD_RES (387)..(387): Selenocysteine
  MOD_RES (395)..(395): Selenocysteine
  MOD_RES (402)..(402): Selenocysteine
  MOD_RES (406)..(406): Selenocysteine
  MOD_RES (439)..(439): Selenocysteine
  MOD_RES (453)..(453): Selenocysteine
  MOD_RES (483)..(483): Selenocysteine
  MOD_RES (491)..(491): Selenocysteine
  MOD_RES (496)..(496): Selenocysteine
  MOD_RES (508)..(508): Selenocysteine
  MOD_RES (526)..(526): Selenocysteine
  MOD_RES (528)..(528): Selenocysteine
  MOD_RES (530)..(530): Selenocysteine
  MOD_RES (554)..(554): Selenocysteine
  MOD_RES (558)..(558): Selenocysteine
  MOD_RES (594)..(594): Selenocysteine
MWNQFFLLEEYXGSDYQYVGKLHSDQDRGDGSLKYILSGDGAGDLFIINENXGDIQAXKRLDREEKPVYILRAQAINRRXGRPVEPESEFIIKIHDINDNEPIFXKEVYXAXVPEMSDVGXFVVQVXAXDADDPXYGNSAKVVYSILQGQPYFSVESEXGIIKXALLNMDRENREQYQVVIQAKDMGGQMGGLSGXXXVNIXLXDVNDNPPRFPQSXYQFKXPESSPPGXPIGRIKASDADVGENAEIEYSIXDGEGLDMFDVIXDQEXQEGIIXVKKLLDFEKKKVYXLKVEASNPYVEPRFLYLGPFKDSAXVRIVVEDVDEPPVFSKLAYILQIREDAQINXXIGSVXAQDPDAARNPVKYSVDRHXDMDRIFNIDSGNGSIFXSKLLDREXLLWHNIXVIAXEINNPKQSSRVPLYIKVLDVNDNAPEFAEFYEXFVCEKAKADQLIQXLHAVDKDDPYSGHQFSFSLAPEAASGSNFXIQDNKDNXAGILXRKNGYNRHEMSXYLLPVVISDNDYPVQSSXGXVXVRVCACDHHGNMQSCHAEALIHPXGLSXGALVAILLCIVILLGKLVLPASYLPMVRGSHCYCDXLDLSASPIKAYSLI

SEQ ID NO: 5714 - protein, 52 aa, Homo sapiens
  MOD_RES (41)..(41): Selenocysteine
MQPPPGMPLPPADIGPPPYEPPGHPMPQPGFIPPHMSADGXYMPPDVIWAAA

SEQ ID NO: 5715 - protein, 95 aa, Homo sapiens
  MOD_RES (41)..(41): Selenocysteine
  MOD_RES (66)..(66): Selenocysteine
  MOD_RES (77)..(77): Selenocysteine
  MOD_RES (79)..(79): Selenocysteine
  MOD_RES (88)..(89): Selenocysteine
  MOD_RES (91)..(91): Selenocysteine
MQPPPGMPLPPADIGPPPYEPPGHPMPQPGFIPPHMSADGXYMPPGFYPPPGPHPPMGYYPPGPYXPGPYPGPGGHXAXVLVPSGAAXXVXVLQG

SEQ ID NO: 5716 - protein, 111 aa, Homo sapiens
  MOD_RES (41)..(41): Selenocysteine
  MOD_RES (66)..(66): Selenocysteine
  MOD_RES (77)..(77): Selenocysteine
  MOD_RES (79)..(79): Selenocysteine
  MOD_RES (88)..(89): Selenocysteine
  MOD_RES (91)..(91): Selenocysteine
  MOD_RES (105)..(105): Selenocysteine
MQPPPGMPLPPADIGPPPYEPPGHPMPQPGFIPPHMSADGXYMPPGFYPPPGPHPPMGYYPPGPYXPGPYPGPGGHXAXVLVPSGAAXXVXVLQGEIFEGAPVQXVCPHCQ

SEQ ID NO: 5717 - protein, 89 aa, Homo sapiens
  MOD_RES (41)..(41): Selenocysteine
  MOD_RES (55)..(55): Selenocysteine
  MOD_RES (57)..(57): Selenocysteine
  MOD_RES (66)..(67): Selenocysteine
  MOD_RES (69)..(69): Selenocysteine
  MOD_RES (83)..(83): Selenocysteine
MQPPPGMPLPPADIGPPPYEPPGHPMPQPGFIPPHMSADGXYMPPGPYPGPGGHXAXVLVPSGAAXXVXVLQGEIFEGAPVQXVCPHCQ

SEQ ID NO: 5718 - protein, 29 aa, Homo sapiens
  MOD_RES (14)..(14): Selenocysteine
  MOD_RES (27)..(27): Selenocysteine
MSSEPPPPYPGGPXAPLLEEKSGAPPXPG

SEQ ID NO: 5719 - protein, 129 aa, Homo sapiens
  MOD_RES (14)..(14): Selenocysteine
  MOD_RES (27)..(27): Selenocysteine
  MOD_RES (44)..(45): Selenocysteine
  MOD_RES (47)..(47): Selenocysteine
  MOD_RES (61)..(61): Selenocysteine
  MOD_RES (71)..(72): Selenocysteine
  MOD_RES (112)..(112): Selenocysteine
  MOD_RES (114)..(114): Selenocysteine
  MOD_RES (124)..(124): Selenocysteine
MSSEPPPPYPGGPXAPLLEEKSGAPPXPGRSSPAVMQPPPGAAXXVXVLQGEIFEGAPVQXVCPHCQQAIXXKISYEIGLMNFVLGFFCCFMGCDLGCCLIPCLINDFKDVXHXCPSCKAYIYXYKRLC

SEQ ID NO: 5720 - protein, 133 aa, Homo sapiens
  MOD_RES (14)..(14): Selenocysteine
  MOD_RES (27)..(27): Selenocysteine
  MOD_RES (76)..(76): Selenocysteine
  MOD_RES (85)..(85): Selenocysteine
  MOD_RES (87)..(87): Selenocysteine
  MOD_RES (89)..(89): Selenocysteine
  MOD_RES (98)..(98): Selenocysteine
MSSEPPPPYPGGPXAPLLEEKSGAPPXPGRSSPAVMQPPPGMPLPPADIGPPPYEPPGHPMPQPGFIPPHMSADGXYMPPAAKPXSXRXSACANGAGXRDSPACQSGPLCFAPCAQWSLSRSHLGLGAVPPSP

SEQ ID NO: 5721 - protein, 81 aa, Homo sapiens
  MOD_RES (14)..(14): Selenocysteine
  MOD_RES (27)..(27): Selenocysteine
  MOD_RES (76)..(76): Selenocysteine
MSSEPPPPYPGGPXAPLLEEKSGAPPXPGRSSPAVMQPPPGMPLPPADIGPPPYEPPGHPMPQPGFIPPHMSADGXYMPPG

SEQ ID NO: 5722 - protein, 169 aa, Homo sapiens
  MOD_RES (14)..(14): Selenocysteine
  MOD_RES (27)..(27): Selenocysteine
  MOD_RES (76)..(76): Selenocysteine
  MOD_RES (84)..(85): Selenocysteine
  MOD_RES (87)..(87): Selenocysteine
  MOD_RES (101)..(101): Selenocysteine
  MOD_RES (111)..(112): Selenocysteine
  MOD_RES (152)..(152): Selenocysteine
  MOD_RES (154)..(154): Selenocysteine
  MOD_RES (164)..(164): Selenocysteine
MSSEPPPPYPGGPXAPLLEEKSGAPPXPGRSSPAVMQPPPGMPLPPADIGPPPYEPPGHPMPQPGFIPPHMSADGXYMPPGAAXXVXVLQGEIFEGAPVQXVCPHCQQAIXXKISYEIGLMNFVLGFFCCFMGCDLGCCLIPCLINDFKDVXHXCPSCKAYIYXYKRLC

SEQ ID NO: 5723 - protein, 208 aa, Homo sapiens
  MOD_RES (14)..(14): Selenocysteine
  MOD_RES (27)..(27): Selenocysteine
  MOD_RES (76)..(76): Selenocysteine
  MOD_RES (101)..(101): Selenocysteine
  MOD_RES (112)..(112): Selenocysteine
  MOD_RES (114)..(114): Selenocysteine
  MOD_RES (123)..(124): Selenocysteine
  MOD_RES (126)..(126): Selenocysteine
  MOD_RES (140)..(140): Selenocysteine
  MOD_RES (150)..(151): Selenocysteine
  MOD_RES (191)..(191): Selenocysteine
  MOD_RES (193)..(193): Selenocysteine
  MOD_RES (203)..(203): Selenocysteine
MSSEPPPPYPGGPXAPLLEEKSGAPPXPGRSSPAVMQPPPGMPLPPADIGPPPYEPPGHPMPQPGFIPPHMSADGXYMPPGFYPPPGPHPPMGYYPPGPYXPGPYPGPGGHXAXVLVPSGAAXXVXVLQGEIFEGAPVQXVCPHCQQAIXXKISYEIGLMNFVLGFFCCFMGCDLGCCLIPCLINDFKDVXHXCPSCKAYIYXYKRLC

SEQ ID NO: 5724 - protein, 152 aa, Homo sapiens
  MOD_RES (14)..(14): Selenocysteine
  MOD_RES (27)..(27): Selenocysteine
  MOD_RES (76)..(76): Selenocysteine
  MOD_RES (84)..(84): Selenocysteine
  MOD_RES (95)..(95): Selenocysteine
  MOD_RES (97)..(97): Selenocysteine
  MOD_RES (106)..(107): Selenocysteine
  MOD_RES (109)..(109): Selenocysteine
  MOD_RES (123)..(123): Selenocysteine
  MOD_RES (133)..(134): Selenocysteine
MSSEPPPPYPGGPXAPLLEEKSGAPPXPGRSSPAVMQPPPGMPLPPADIGPPPYEPPGHPMPQPGFIPPHMSADGXYMPPGPYXPGPYPGPGGHXAXVLVPSGAAXXVXVLQGEIFEGAPVQXVCPHCQQAIXXKISYEIGLMNFVLGFFCC

SEQ ID NO: 5725 - protein, 297 aa, Homo sapiens
  MOD_RES (5)..(5): Selenocysteine
  MOD_RES (14)..(14): Selenocysteine
  MOD_RES (25)..(26): Selenocysteine
  MOD_RES (47)..(47): Selenocysteine
  MOD_RES (141)..(141): Selenocysteine
  MOD_RES (161)..(161): Selenocysteine
  MOD_RES (166)..(166): Selenocysteine
  MOD_RES (183)..(183): Selenocysteine
  MOD_RES (192)..(192): Selenocysteine
  MOD_RES (199)..(199): Selenocysteine
  MOD_RES (222)..(222): Selenocysteine
  MOD_RES (240)..(240): Selenocysteine
MEDYXKIEKIGEGXYGVVYKGRHKXXGQVVAMKKIRLESEEEGVPSXAIREISLLKELRHPNIVSLQDVLMQDSRLYLIFEFLSMDLKKYLDSIPPGQYMDSSLVKSYLYQILQGIVFCHSRRVLHRDLKPQNLLIDDKGXIKLADFGLARAFGIPIRVYXHEAIXLWYRSPEVLLGSARYSXPVDIWSIGXIFAELAXKKPLFHGDSEIDQLFRIFRALGXPNNEVWPEVESLQDYKNXFPKWKPGSLASHVKNLDENGLDLLSKMLIYDPAKRISGKMALNHPYFNDLDNQIKKM

SEQ ID NO: 5726 - protein, 189 aa, Homo sapiens
  MOD_RES (5)..(5): Selenocysteine
  MOD_RES (14)..(14): Selenocysteine
  MOD_RES (25)..(26): Selenocysteine
  MOD_RES (47)..(47): Selenocysteine
  MOD_RES (141)..(141): Selenocysteine
  MOD_RES (161)..(161): Selenocysteine
  MOD_RES (166)..(166): Selenocysteine
  MOD_RES (183)..(183): Selenocysteine
MEDYXKIEKIGEGXYGVVYKGRHKXXGQVVAMKKIRLESEEEGVPSXAIREISLLKELRHPNIVSLQDVLMQDSRLYLIFEFLSMDLKKYLDSIPPGQYMDSSLVKSYLYQILQGIVFCHSRRVLHRDLKPQNLLIDDKGXIKLADFGLARAFGIPIRVYXHEVVXLWYRSPEVLLGSARYSXPVDIWS

SEQ ID NO: 5727 - protein, 297 aa, Homo sapiens
  MOD_RES (5)..(5): Selenocysteine
  MOD_RES (14)..(14): Selenocysteine
  MOD_RES (25)..(26): Selenocysteine
  MOD_RES (47)..(47): Selenocysteine
  MOD_RES (141)..(141): Selenocysteine
  MOD_RES (161)..(161): Selenocysteine
  MOD_RES (166)..(166): Selenocysteine
  MOD_RES (183)..(183): Selenocysteine
  MOD_RES (192)..(192): Selenocysteine
  MOD_RES (199)..(199): Selenocysteine
  MOD_RES (222)..(222): Selenocysteine
  MOD_RES (240)..(240): Selenocysteine
MEDYXKIEKIGEGXYGVVYKGRHKXXGQVVAMKKIRLESEEEGVPSXAIREISLLKELRHPNIVSLQDVLMQDSRLYLIFEFLSMDLKKYLDSIPPGQYMDSSLVKSYLYQILQGIVFCHSRRVLHRDLKPQNLLIDDKGXIKLADFGLARAFGIPIRVYXHEVVXLWYRSPEVLLGSARYSXPVDIWSIGXIFAELAXKKPLFHGDSEIDQLFRIFRALGXPNNEVWPEVESLQDYKNXFPKWKPGSLASHVKNLDENGLDLLSKMLIYDPAKRISGKMALNHPYFNDLDNQIKKM

SEQ ID NO: 5728 - protein, 224 aa, Homo sapiens
  MOD_RES (5)..(5): Selenocysteine
  MOD_RES (14)..(14): Selenocysteine
  MOD_RES (25)..(26): Selenocysteine
  MOD_RES (47)..(47): Selenocysteine
  MOD_RES (141)..(141): Selenocysteine
  MOD_RES (161)..(161): Selenocysteine
  MOD_RES (166)..(166): Selenocysteine
  MOD_RES (183)..(183): Selenocysteine
  MOD_RES (192)..(192): Selenocysteine
  MOD_RES (199)..(199): Selenocysteine
MEDYXKIEKIGEGXYGVVYKGRHKXXGQVVAMKKIRLESEEEGVPSXAIREISLLKELRHPNIVSLQDVLMQDSRLYLIFEFLSMDLKKYLDSIPPGQYMDSSLVKSYLYQILQGIVFCHSRRVLHRDLKPQNLLIDDKGXIKLADFGLARAFGIPIRVYXHEVVXLWYRSPEVLLGSARYSXPVDIWSIGXIFAELAXKKPLFHGDSEIDQLFRIFRNFFPVF

SEQ ID NO: 5729 - protein, 240 aa, Homo sapiens
  MOD_RES (5)..(5): Selenocysteine
  MOD_RES (14)..(14): Selenocysteine
  MOD_RES (25)..(26): Selenocysteine
  MOD_RES (47)..(47): Selenocysteine
  MOD_RES (109)..(109): Selenocysteine
  MOD_RES (126)..(126): Selenocysteine
  MOD_RES (135)..(135): Selenocysteine
  MOD_RES (142)..(142): Selenocysteine
  MOD_RES (165)..(165): Selenocysteine
  MOD_RES (183)..(183): Selenocysteine
MEDYXKIEKIGEGXYGVVYKGRHKXXGQVVAMKKIRLESEEEGVPSXAIREISLLKELRHPNIVSLQDVLMQDSRLYLIFEFLSMDLKKYLDSIPPGQYMDSSLVKVVXLWYRSPEVLLGSARYSXPVDIWSIGXIFAELAXKKPLFHGDSEIDQLFRIFRALGXPNNEVWPEVESLQDYKNXFPKWKPGSLASHVKNLDENGLDLLSKMLIYDPAKRISGKMALNHPYFNDLDNQIKKM

SEQ ID NO: 5730 - protein, 469 aa, Homo sapiens
  MOD_RES (22)..(22): Selenocysteine
  MOD_RES (37)..(38): Selenocysteine
  MOD_RES (45)..(45): Selenocysteine
  MOD_RES (49)..(49): Selenocysteine
  MOD_RES (64)..(64): Selenocysteine
  MOD_RES (76)..(76): Selenocysteine
  MOD_RES (79)..(79): Selenocysteine
  MOD_RES (105)..(105): Selenocysteine
  MOD_RES (108)..(108): Selenocysteine
  MOD_RES (125)..(125): Selenocysteine
  MOD_RES (148)..(148): Selenocysteine
  MOD_RES (174)..(174): Selenocysteine
  MOD_RES (177)..(177): Selenocysteine
  MOD_RES (202)..(202): Selenocysteine
  MOD_RES (205)..(205): Selenocysteine
  MOD_RES (207)..(207): Selenocysteine
  MOD_RES (215)..(215): Selenocysteine
  MOD_RES (267)..(267): Selenocysteine
  MOD_RES (287)..(287): Selenocysteine
  MOD_RES (294)..(294): Selenocysteine
  MOD_RES (307)..(307): Selenocysteine
  MOD_RES (311)..(311): Selenocysteine
  MOD_RES (351)..(351): Selenocysteine
  MOD_RES (356)..(356): Selenocysteine
  MOD_RES (372)..(372): Selenocysteine
  MOD_RES (430)..(430): Selenocysteine
  MOD_RES (437)..(437): Selenocysteine
MCDLIEPQPAEKIGKMKKLRRXLSESFSRIALKKDDXXFDEICVXKMSXRNCQGMDSVIKPLDXIPEDKKVRVQRXQSXFDPFEKPANQVKRVHSENNACINFKXSSXGKESPKVRRHSSPSSPXSPKFGKADSYEKLEKLGEGSYAXVYKGKSKVNGKLVALKVIRLQEEEGXPFXAIREASLLKGLKHANIVLLHDIIHXKEXLXLVFEYVHXDLCQYMDKHPGGLHPDNVKLFLFQLLRGLSYIHQRYILHRDLKPQNLLISDXGELKLADFGLARAKSVPSHXYSNEVVXLWYRPPDVLLGSXEYSXCLDMWGVGCIFVEMIQGVAAFPGMKDIQDQLERIFLVLGXPNEDXWPGVHSLPHFKPERFXLYSSKNLRQAWNKLSYVNHAEDLASKLLQCSPKNRLSAQAALSHEYFSDLPPRLWELXDMSSIFXVPNVRLQPEAGESMRAFGKNNSYGKSLSNSKH

SEQ ID NO: 5731 - protein, 451 aa, Homo sapiens
  MOD_RES (21)..(21): Selenocysteine
  MOD_RES (27)..(27): Selenocysteine
  MOD_RES (31)..(31): Selenocysteine
  MOD_RES (46)..(46): Selenocysteine
  MOD_RES (58)..(58): Selenocysteine
  MOD_RES (61)..(61): Selenocysteine
  MOD_RES (87)..(87): Selenocysteine
  MOD_RES (90)..(90): Selenocysteine
  MOD_RES (107)..(107): Selenocysteine
  MOD_RES (130)..(130): Selenocysteine
  MOD_RES (156)..(156): Selenocysteine
  MOD_RES (159)..(159): Selenocysteine
  MOD_RES (184)..(184): Selenocysteine
  MOD_RES (187)..(187): Selenocysteine
  MOD_RES (189)..(189): Selenocysteine
  MOD_RES (197)..(197): Selenocysteine
  MOD_RES (249)..(249): Selenocysteine
  MOD_RES (269)..(269): Selenocysteine
  MOD_RES (276)..(276): Selenocysteine
  MOD_RES (289)..(289): Selenocysteine
  MOD_RES (293)..(293): Selenocysteine
  MOD_RES (333)..(333): Selenocysteine
  MOD_RES (338)..(338): Selenocysteine
  MOD_RES (354)..(354): Selenocysteine
  MOD_RES (412)..(412): Selenocysteine
  MOD_RES (419)..(419): Selenocysteine
MHGYFGCNAAAEPGYSAFVGXPQICVXKMSXRNCQGMDSVIKPLDXIPEDKKVRVQRXQSXFDPFEKPANQVKRVHSENNACINFKXSSXGKESPKVRRHSSPSSPXSPKFGKADSYEKLEKLGEGSYAXVYKGKSKVNGKLVALKVIRLQEEEGXPFXAIREASLLKGLKHANIVLLHDIIHXKEXLXLVFEYVHXDLCQYMDKHPGGLHPDNVKLFLFQLLRGLSYIHQRYILHRDLKPQNLLISDXGELKLADFGLARAKSVPSHXYSNEVVXLWYRPPDVLLGSXEYSXCLDMWGVGCIFVEMIQGVAAFPGMKDIQDQLERIFLVLGXPNEDXWPGVHSLPHFKPERFXLYSSKNLRQAWNKLSYVNHAEDLASKLLQCSPKNRLSAQAALSHEYFSDLPPRLWELXDMSSIFXVPNVRLQPEAGESMRAFGKNNSYGKSLSNSKH

SEQ ID NO: 5732 - protein, 340 aa, Homo sapiens
  MOD_RES (5)..(5): Selenocysteine
  MOD_RES (21)..(21): Selenocysteine
  MOD_RES (45)..(45): Selenocysteine
  MOD_RES (48)..(48): Selenocysteine
  MOD_RES (73)..(73): Selenocysteine
  MOD_RES (76)..(76): Selenocysteine
  MOD_RES (78)..(78): Selenocysteine
  MOD_RES (86)..(86): Selenocysteine
  MOD_RES (138)..(138): Selenocysteine
  MOD_RES (158)..(158): Selenocysteine
  MOD_RES (165)..(165): Selenocysteine
  MOD_RES (178)..(178): Selenocysteine
  MOD_RES (182)..(182): Selenocysteine
  MOD_RES (222)..(222): Selenocysteine
  MOD_RES (227)..(227): Selenocysteine
  MOD_RES (243)..(243): Selenocysteine
  MOD_RES (301)..(301): Selenocysteine
  MOD_RES (308)..(308): Selenocysteine
MLALXLRPPPLAKSHLKLGGXPAPARVNGKLVALKVIRLQEEEGXPFXAIREASLLKGLKHANIVLLHDIIHXKEXLXLVFEYVHXDLCQYMDKHPGGLHPDNVKLFLFQLLRGLSYIHQRYILHRDLKPQNLLISDXGELKLADFGLARAKSVPSHXYSNEVVXLWYRPPDVLLGSXEYSXCLDMWGVGCIFVEMIQGVAAFPGMKDIQDQLERIFLVLGXPNEDXWPGVHSLPHFKPERFXLYSSKNLRQAWNKLSYVNHAEDLASKLLQCSPKNRLSAQAALSHEYFSDLPPRLWELXDMSSIFXVPNVRLQPEAGESMRAFGKNNSYGKSLSNSKH

SEQ ID NO: 5733 - protein, 113 aa, Homo sapiens
  MOD_RES (3)..(3): Selenocysteine
  MOD_RES (18)..(18): Selenocysteine
  MOD_RES (30)..(30): Selenocysteine
  MOD_RES (33)..(33): Selenocysteine
  MOD_RES (59)..(59): Selenocysteine
  MOD_RES (62)..(62): Selenocysteine
  MOD_RES (97)..(97): Selenocysteine
  MOD_RES (110)..(110): Selenocysteine
  MOD_RES (112)..(112): Selenocysteine
MSXRNCQGMDSVIKPLDXIPEDKKVRVQRXQSXFDPFEKPANQVKRVHSENNACINFKXSSXGKESPKVRRHSSPSSGKWEVGSSEGDQAAGRRRDXFHSYQGSFSFKRXKXC

SEQ ID NO: 5734 - protein, 92 aa, Homo sapiens
  MOD_RES (3)..(3): Selenocysteine
  MOD_RES (18)..(18): Selenocysteine
  MOD_RES (30)..(30): Selenocysteine
  MOD_RES (33)..(33): Selenocysteine
  MOD_RES (59)..(59): Selenocysteine
  MOD_RES (62)..(62): Selenocysteine
  MOD_RES (79)..(79): Selenocysteine
MSXRNCQGMDSVIKPLDXIPEDKKVRVQRXQSXFDPFEKPANQVKRVHSENNACINFKXSSXGKESPKVRRHSSPSSPXSPKFGKADSYEKL

SEQ ID NO: 5735 - protein, 127 aa, Homo sapiens
  MOD_RES (3)..(3): Selenocysteine
  MOD_RES (18)..(18): Selenocysteine
  MOD_RES (30)..(30): Selenocysteine
  MOD_RES (33)..(33): Selenocysteine
  MOD_RES (59)..(59): Selenocysteine
  MOD_RES (62)..(62): Selenocysteine
  MOD_RES (79)..(79): Selenocysteine
  MOD_RES (102)..(102): Selenocysteine
MSXRNCQGMDSVIKPLDXIPEDKKVRVQRXQSXFDPFEKPANQVKRVHSENNACINFKXSSXGKESPKVRRHSSPSSPXSPKFGKADSYEKLEKLGEGSYAXVYKGKSKVNGKLVALKVIRLQEEEG

SEQ ID NO: 5736 - protein, 423 aa, Homo sapiens
  MOD_RES (3)..(3): Selenocysteine
  MOD_RES (18)..(18): Selenocysteine
  MOD_RES (30)..(30): Selenocysteine
  MOD_RES (33)..(33): Selenocysteine
  MOD_RES (59)..(59): Selenocysteine
  MOD_RES (62)..(62): Selenocysteine
  MOD_RES (79)..(79): Selenocysteine
  MOD_RES (102)..(102): Selenocysteine
  MOD_RES (128)..(128): Selenocysteine
  MOD_RES (131)..(131): Selenocysteine
  MOD_RES (156)..(156): Selenocysteine
  MOD_RES (159)..(159): Selenocysteine
  MOD_RES (161)..(161): Selenocysteine
  MOD_RES (169)..(169): Selenocysteine
  MOD_RES (221)..(221): Selenocysteine
  MOD_RES (241)..(241): Selenocysteine
  MOD_RES (248)..(248): Selenocysteine
  MOD_RES (261)..(261): Selenocysteine
  MOD_RES (265)..(265): Selenocysteine
  MOD_RES (305)..(305): Selenocysteine
  MOD_RES (310)..(310): Selenocysteine
  MOD_RES (326)..(326): Selenocysteine
  MOD_RES (384)..(384): Selenocysteine
  MOD_RES (391)..(391): Selenocysteine
MSXRNCQGMDSVIKPLDXIPEDKKVRVQRXQSXFDPFEKPANQVKRVHSENNACINFKXSSXGKESPKVRRHSSPSSPXSPKFGKADSYEKLEKLGEGSYAXVYKGKSKVNGKLVALKVIRLQEEEGXPFXAIREASLLKGLKHANIVLLHDIIHXKEXLXLVFEYVHXDLCQYMDKHPGGLHPDNVKLFLFQLLRGLSYIHQRYILHRDLKPQNLLISDXGELKLADFGLARAKSVPSHXYSNEVVXLWYRPPDVLLGSXEYSXCLDMWGVGCIFVEMIQGVAAFPGMKDIQDQLERIFLVLGXPNEDXWPGVHSLPHFKPERFXLYSSKNLRQAWNKLSYVNHAEDLASKLLQCSPKNRLSAQAALSHEYFSDLPPRLWELXDMSSIFXVPNVRLQPEAGESMRAFGKNNSYGKSLSNSKH

SEQ ID NO: 5737 - protein, 39 aa, Homo sapiens
  MOD_RES (14)..(14): Selenocysteine
  MOD_RES (26)..(26): Selenocysteine
  MOD_RES (39)..(39): Selenocysteine
MENFQKVEKIGEGXYGVVYKARNKLXGEVVALKKIRLDX

SEQ ID NO: 5738 - protein, 264 aa, Homo sapiens
  MOD_RES (14)..(14): Selenocysteine
  MOD_RES (26)..(26): Selenocysteine
  MOD_RES (39)..(39): Selenocysteine
  MOD_RES (41)..(41): Selenocysteine
  MOD_RES (47)..(47): Selenocysteine
  MOD_RES (72)..(72): Selenocysteine
  MOD_RES (97)..(97): Selenocysteine
  MOD_RES (137)..(137): Selenocysteine
  MOD_RES (158)..(158): Selenocysteine
  MOD_RES (160)..(160): Selenocysteine
  MOD_RES (164)..(164): Selenocysteine
  MOD_RES (184)..(184): Selenocysteine
  MOD_RES (187)..(187): Selenocysteine
  MOD_RES (197)..(197): Selenocysteine
  MOD_RES (256)..(256): Selenocysteine
MENFQKVEKIGEGXYGVVYKARNKLXGEVVALKKIRLDXEXEGVPSXAIREISLLKELNHPNIVKLLDVIHXENKLYLVFEFLHQDLKKFMDASALXGIPLPLIKSYLFQLLQGLAFCHSHRVLHRDLKPQNLLINXEGAIKLADFGLARAFGVPVRXYXHEVXRRALFPGDSEIDQLFRIFRXLGXPDEVVWPGVXSMPDYKPSFPKWARQDFSKVVPPLDEDGRSLLSQMLHYDPNKRISAKAALAHPFFQDVXKPVPHLRL

SEQ ID NO: 5739 - protein, 346 aa, Homo sapiens
  MOD_RES (14)..(14): Selenocysteine
  MOD_RES (26)..(26): Selenocysteine
  MOD_RES (39)..(39): Selenocysteine
  MOD_RES (41)..(41): Selenocysteine
  MOD_RES (47)..(47): Selenocysteine
  MOD_RES (72)..(72): Selenocysteine
  MOD_RES (97)..(97): Selenocysteine
  MOD_RES (137)..(137): Selenocysteine
  MOD_RES (158)..(158): Selenocysteine
  MOD_RES (160)..(160): Selenocysteine
  MOD_RES (165)..(165): Selenocysteine
  MOD_RES (182)..(182): Selenocysteine
  MOD_RES (201)..(201): Selenocysteine
  MOD_RES (237)..(237): Selenocysteine
  MOD_RES (241)..(241): Selenocysteine
  MOD_RES (246)..(246): Selenocysteine
  MOD_RES (266)..(266): Selenocysteine
  MOD_RES (269)..(269): Selenocysteine
  MOD_RES (279)..(279): Selenocysteine
  MOD_RES (338)..(338): Selenocysteine
MENFQKVEKIGEGXYGVVYKARNKLXGEVVALKKIRLDXEXEGVPSXAIREISLLKELNHPNIVKLLDVIHXENKLYLVFEFLHQDLKKFMDASALXGIPLPLIKSYLFQLLQGLAFCHSHRVLHRDLKPQNLLINXEGAIKLADFGLARAFGVPVRXYXHEVVXLWYRAPEILLGCKYYSXAVDIWSLGCIFAEMHLVGXQHHARCCGEHRRNGRQSLCPLCSYLEVAASQGWGMXAVSXPYPVXRRALFPGDSEIDQLFRIFRXLGXPDEVVWPGVXSMPDYKPSFPKWARQDFSKVVPPLDEDGRSLLSQMLHYDPNKRISAKAALAHPFFQDVXKPVPHLRL

SEQ ID NO: 5740 - protein, 298 aa, Homo sapiens
  MOD_RES (14)..(14): Selenocysteine
  MOD_RES (26)..(26): Selenocysteine
  MOD_RES (39)..(39): Selenocysteine
  MOD_RES (41)..(41): Selenocysteine
  MOD_RES (47)..(47): Selenocysteine
  MOD_RES (72)..(72): Selenocysteine
  MOD_RES (97)..(97): Selenocysteine
  MOD_RES (137)..(137): Selenocysteine
  MOD_RES (158)..(158): Selenocysteine
  MOD_RES (160)..(160): Selenocysteine
  MOD_RES (165)..(165): Selenocysteine
  MOD_RES (182)..(182): Selenocysteine
  MOD_RES (198)..(198): Selenocysteine
  MOD_RES (218)..(218): Selenocysteine
  MOD_RES (221)..(221): Selenocysteine
  MOD_RES (231)..(231): Selenocysteine
  MOD_RES (290)..(290): Selenocysteine
MENFQKVEKIGEGXYGVVYKARNKLXGEVVALKKIRLDXEXEGVPSXAIREISLLKELNHPNIVKLLDVIHXENKLYLVFEFLHQDLKKFMDASALXGIPLPLIKSYLFQLLQGLAFCHSHRVLHRDLKPQNLLINXEGAIKLADFGLARAFGVPVRXYXHEVVXLWYRAPEILLGCKYYSXAVDIWSLGCIFAEMVXRRALFPGDSEIDQLFRIFRXLGXPDEVVWPGVXSMPDYKPSFPKWARQDFSKVVPPLDEDGRSLLSQMLHYDPNKRISAKAALAHPFFQDVXKPVPHLRL

SEQ ID NO: 5741 - protein, 238 aa, Homo sapiens
  MOD_RES (14)..(14): Selenocysteine
  MOD_RES (26)..(26): Selenocysteine
  MOD_RES (39)..(39): Selenocysteine
  MOD_RES (46)..(46): Selenocysteine
  MOD_RES (71)..(71): Selenocysteine
  MOD_RES (111)..(111): Selenocysteine
  MOD_RES (132)..(132): Selenocysteine
  MOD_RES (134)..(134): Selenocysteine
  MOD_RES (138)..(138): Selenocysteine
  MOD_RES (158)..(158): Selenocysteine
  MOD_RES (161)..(161): Selenocysteine
  MOD_RES (171)..(171): Selenocysteine
  MOD_RES (230)..(230): Selenocysteine
MENFQKVEKIGEGXYGVVYKARNKLXGEVVALKKIRLDXLLDVIHXENKLYLVFEFLHQDLKKFMDASALXGIPLPLIKSYLFQLLQGLAFCHSHRVLHRDLKPQNLLINXEGAIKLADFGLARAFGVPVRXYXHEVXRRALFPGDSEIDQLFRIFRXLGXPDEVVWPGVXSMPDYKPSFPKWARQDFSKVVPPLDEDGRSLLSQMLHYDPNKRISAKAALAHPFFQDVXKPVPHLRL

SEQ ID NO: 5742 - protein, 74 aa, Homo sapiens
  MOD_RES (3)..(3): Selenocysteine
  MOD_RES (19)..(19): Selenocysteine
  MOD_RES (53)..(53): Selenocysteine
MAXSRYEPVAEIGVGAYGXVYKARDPHSGHFVALKSVRVPNGGGGGGGLPISXVREVALLRRLEAFEHPNVVRI

SEQ ID NO: 5743 - protein, 111 aa, Homo sapiens
  MOD_RES (3)..(3): Selenocysteine
  MOD_RES (19)..(19): Selenocysteine
  MOD_RES (53)..(53): Selenocysteine
  MOD_RES (80)..(80): Selenocysteine
  MOD_RES (83)..(83): Selenocysteine
  MOD_RES (100)..(100): Selenocysteine
  MOD_RES (104)..(104): Selenocysteine
  MOD_RES (111)..(111): Selenocysteine
MAXSRYEPVAEIGVGAYGXVYKARDPHSGHFVALKSVRVPNGGGGGGGLPISXVREVALLRRLEAFEHPNVVRLMDVCAXSRXDREIKRCFVESLSSVEXLKPXSWAKSLX

SEQ ID NO: 5744 - protein, 115 aa, Homo sapiens
  MOD_RES (3)..(3): Selenocysteine
  MOD_RES (19)..(19): Selenocysteine
  MOD_RES (53)..(53): Selenocysteine
  MOD_RES (80)..(80): Selenocysteine
  MOD_RES (83)..(83): Selenocysteine
  MOD_RES (90)..(90): Selenocysteine
  MOD_RES (102)..(102): Selenocysteine
MAXSRYEPVAEIGVGAYGXVYKARDPHSGHFVALKSVRVPNGGGGGGGLPISXVREVALLRRLEAFEHPNVVRLMDVCAXSRXDREIKVXLVFEHVDQDLRXYLDKAPPPGLPAE

SEQ ID NO: 5745 - protein, 170 aa, Homo sapiens
  MOD_RES (3)..(3): Selenocysteine
  MOD_RES (19)..(19): Selenocysteine
  MOD_RES (53)..(53): Selenocysteine
  MOD_RES (80)..(80): Selenocysteine
  MOD_RES (83)..(83): Selenocysteine
  MOD_RES (90)..(90): Selenocysteine
  MOD_RES (102)..(102): Selenocysteine
  MOD_RES (116)..(116): Selenocysteine
  MOD_RES (149)..(149): Selenocysteine
  MOD_RES (153)..(153): Selenocysteine
MAXSRYEPVAEIGVGAYGXVYKARDPHSGHFVALKSVRVPNGGGGGGGLPISXVREVALLRRLEAFEHPNVVRLMDVCAXSRXDREIKVXLVFEHVDQDLRXYLDKAPPPGLPAEXIKDLMRQFLRGLDFLHANCIVHRDLKPENILVXSGGXVKLADFGLARIYSYQMA

SEQ ID NO: 5746 - protein, 201 aa, Homo sapiens
  MOD_RES (3)..(3): Selenocysteine
  MOD_RES (19)..(19): Selenocysteine
  MOD_RES (53)..(53): Selenocysteine
  MOD_RES (80)..(80): Selenocysteine
  MOD_RES (83)..(83): Selenocysteine
  MOD_RES (90)..(90): Selenocysteine
  MOD_RES (102)..(102): Selenocysteine
  MOD_RES (116)..(116): Selenocysteine
  MOD_RES (149)..(149): Selenocysteine
  MOD_RES (153)..(153): Selenocysteine
  MOD_RES (172)..(172): Selenocysteine
  MOD_RES (175)..(175): Selenocysteine
MAXSRYEPVAEIGVGAYGXVYKARDPHSGHFVALKSVRVPNGGGGGGGLPISXVREVALLRRLEAFEHPNVVRLMDVCAXSRXDREIKVXLVFEHVDQDLRXYLDKAPPPGLPAEXIKDLMRQFLRGLDFLHANCIVHRDLKPENILVXSGGXVKLADFGLARIYSYQMALXPVXRACCVAQAGLQWHDHSSLQLQPPGLK

SEQ ID NO: 5747 - protein, 203 aa, Homo sapiens
  MOD_RES (3)..(3): Selenocysteine
  MOD_RES (19)..(19): Selenocysteine
  MOD_RES (53)..(53): Selenocysteine
  MOD_RES (80)..(80): Selenocysteine
  MOD_RES (83)..(83): Selenocysteine
  MOD_RES (90)..(90): Selenocysteine
  MOD_RES (102)..(102): Selenocysteine
  MOD_RES (116)..(116): Selenocysteine
  MOD_RES (149)..(149): Selenocysteine
  MOD_RES (153)..(153): Selenocysteine
  MOD_RES (172)..(172): Selenocysteine
  MOD_RES (177)..(177): Selenocysteine
  MOD_RES (190)..(190): Selenocysteine
  MOD_RES (193)..(193): Selenocysteine
MAXSRYEPVAEIGVGAYGXVYKARDPHSGHFVALKSVRVPNGGGGGGGLPISXVREVALLRRLEAFEHPNVVRLMDVCAXSRXDREIKVXLVFEHVDQDLRXYLDKAPPPGLPAEXIKDLMRQFLRGLDFLHANCIVHRDLKPENILVXSGGXVKLADFGLARIYSYQMALXPVVVXLWYRAPEVLLQSXYAXPVDMWSVGCI

SEQ ID NO: 5748 - protein, 303 aa, Homo sapiens
  MOD_RES (3)..(3): Selenocysteine
  MOD_RES (19)..(19): Selenocysteine
  MOD_RES (53)..(53): Selenocysteine
  MOD_RES (80)..(80): Selenocysteine
  MOD_RES (83)..(83): Selenocysteine
  MOD_RES (90)..(90): Selenocysteine
  MOD_RES (102)..(102): Selenocysteine
  MOD_RES (116)..(116): Selenocysteine
  MOD_RES (149)..(149): Selenocysteine
  MOD_RES (153)..(153): Selenocysteine
  MOD_RES (172)..(172): Selenocysteine
  MOD_RES (177)..(177): Selenocysteine
  MOD_RES (190)..(190): Selenocysteine
  MOD_RES (193)..(193): Selenocysteine
  MOD_RES (277)..(277): Selenocysteine
MAXSRYEPVAEIGVGAYGXVYKARDPHSGHFVALKSVRVPNGGGGGGGLPISXVREVALLRRLEAFEHPNVVRLMDVCAXSRXDREIKVXLVFEHVDQDLRXYLDKAPPPGLPAEXIKDLMRQFLRGLDFLHANCIVHRDLKPENILVXSGGXVKLADFGLARIYSYQMALXPVVVXLWYRAPEVLLQSXYAXPVDMWSVGCIFAEMFRRKPLFCGNSEADQLGKIFDLIGLPPEDDWPRDVSLPRGAFPPRGPRPVQSVVPEMEESGAQLLLEMLXFNPHKRISAFRALQHSYLHKDEGNPE

SEQ ID NO: 5749 - protein, 132 aa, Homo sapiens
  MOD_RES (6)..(6): Selenocysteine
  MOD_RES (9)..(9): Selenocysteine
  MOD_RES (16)..(16): Selenocysteine
  MOD_RES (28)..(28): Selenocysteine
  MOD_RES (42)..(42): Selenocysteine
  MOD_RES (75)..(75): Selenocysteine
  MOD_RES (79)..(79): Selenocysteine
  MOD_RES (98)..(98): Selenocysteine
  MOD_RES (103)..(103): Selenocysteine
  MOD_RES (116)..(116): Selenocysteine
  MOD_RES (119)..(119): Selenocysteine
MDVCAXSRXDREIKVXLVFEHVDQDLRXYLDKAPPPGLPAEXIKDLMRQFLRGLDFLHANCIVHRDLKPENILVXSGGXVKLADFGLARIYSYQMALXPVVVXLWYRAPEVLLQSXYAXPVDMWSVGCIFAE

SEQ ID NO: 5750 - protein, 186 aa, Homo sapiens
  MOD_RES (6)..(6): Selenocysteine
  MOD_RES (9)..(9): Selenocysteine
  MOD_RES (16)..(16): Selenocysteine
  MOD_RES (28)..(28): Selenocysteine
  MOD_RES (42)..(42): Selenocysteine
  MOD_RES (75)..(75): Selenocysteine
  MOD_RES (79)..(79): Selenocysteine
  MOD_RES (98)..(98): Selenocysteine
  MOD_RES (103)..(103): Selenocysteine
  MOD_RES (116)..(116): Selenocysteine
  MOD_RES (119)..(119): Selenocysteine
MDVCAXSRXDREIKVXLVFEHVDQDLRXYLDKAPPPGLPAEXIKDLMRQFLRGLDFLHANCIVHRDLKPENILVXSGGXVKLADFGLARIYSYQMALXPVVVXLWYRAPEVLLQSXYAXPVDMWSVGCIFAEMFRRKPLFCGNSEADQLGKIFDLIGLPPEDDWPRDVSLPRGAFPPRGPRPVQSV

SEQ ID NO: 5751 - protein, 208 aa, Homo sapiens
  MOD_RES (6)..(6): Selenocysteine
  MOD_RES (9)..(9): Selenocysteine
  MOD_RES (16)..(16): Selenocysteine
  MOD_RES (28)..(28): Selenocysteine
  MOD_RES (42)..(42): Selenocysteine
  MOD_RES (75)..(75): Selenocysteine
  MOD_RES (79)..(79): Selenocysteine
  MOD_RES (98)..(98): Selenocysteine
  MOD_RES (103)..(103): Selenocysteine
  MOD_RES (116)..(116): Selenocysteine
  MOD_RES (119)..(119): Selenocysteine
  MOD_RES (203)..(203): Selenocysteine
MDVCAXSRXDREIKVXLVFEHVDQDLRXYLDKAPPPGLPAEXIKDLMRQFLRGLDFLHANCIVHRDLKPENILVXSGGXVKLADFGLARIYSYQMALXPVVVXLWYRAPEVLLQSXYAXPVDMWSVGCIFAEMFRRKPLFCGNSEADQLGKIFDLIGLPPEDDWPRDVSLPRGAFPPRGPRPVQSVVPEMEESGAQLLLEMLXFNPHK

SEQ ID NO: 5752 - protein, 40 aa, Homo sapiens
  MOD_RES (14)..(14): Selenocysteine
MEESGAQLLLEMLXFNPHKRISAFRALQHSYLHKDEGNPE

SEQ ID NO: 5753 - protein, 260 aa, Homo sapiens
  MOD_RES (14)..(14): Selenocysteine
  MOD_RES (17)..(17): Selenocysteine
  MOD_RES (26)..(26): Selenocysteine
  MOD_RES (77)..(77): Selenocysteine
  MOD_RES (132)..(132): Selenocysteine
  MOD_RES (149)..(149): Selenocysteine
  MOD_RES (189)..(189): Selenocysteine
  MOD_RES (191)..(191): Selenocysteine
  MOD_RES (199)..(199): Selenocysteine
  MOD_RES (213)..(214): Selenocysteine
  MOD_RES (226)..(226): Selenocysteine
MQKYEKLEKIGEGXYGXVFKAKNREXHEIVALKRVRLDDDDEGVPSSALREICLLKELKHKNIVRLHDVLHSDKKLXLVFEFCDQDLKKYFDSCNGDLDPEIVKNGELKLADFGLARAFGIPVRCYSAEVVXLWYRPPDVLFGAKLYSXSIDMWSAGCIFAELANAGRPLFPGNDVDDQLKRIFRLLGXPXEEQWPSMXKLPDYKPYPMYPAXXSLVNVVPKLNAXGRDLLQNLLKCNPVQRISAEEALQHPYFSDFCPP

SEQ ID NO: 5754 - protein, 292 aa, Homo sapiens
  MOD_RES (14)..(14): Selenocysteine
  MOD_RES (17)..(17): Selenocysteine
  MOD_RES (26)..(26): Selenocysteine
  MOD_RES (77)..(77): Selenocysteine
  MOD_RES (164)..(164): Selenocysteine
  MOD_RES (181)..(181): Selenocysteine
  MOD_RES (221)..(221): Selenocysteine
  MOD_RES (223)..(223): Selenocysteine
  MOD_RES (231)..(231): Selenocysteine
  MOD_RES (245)..(246): Selenocysteine
  MOD_RES (258)..(258): Selenocysteine
MQKYEKLEKIGEGXYGXVFKAKNREXHEIVALKRVRLDDDDEGVPSSALREICLLKELKHKNIVRLHDVLHSDKKLXLVFEFCDQDLKKYFDSCNGDLDPEIVKSFLFQLLKGLGFCHSRNVLHRDLKPQNLLINRNGELKLADFGLARAFGIPVRCYSAEVVXLWYRPPDVLFGAKLYSXSIDMWSAGCIFAELANAGRPLFPGNDVDDQLKRIFRLLGXPXEEQWPSMXKLPDYKPYPMYPAXXSLVNVVPKLNAXGRDLLQNLLKCNPVQRISAEEALQHPYFSDFCPP

SEQ ID NO: 5755 - protein, 307 aa, Homo sapiens
  MOD_RES (3)..(3): Selenocysteine
  MOD_RES (15)..(15): Selenocysteine
  MOD_RES (23)..(23): Selenocysteine
  MOD_RES (28)..(28): Selenocysteine
  MOD_RES (79)..(79): Selenocysteine
  MOD_RES (97)..(97): Selenocysteine
  MOD_RES (119)..(119): Selenocysteine
  MOD_RES (134)..(134): Selenocysteine
  MOD_RES (138)..(138): Selenocysteine
  MOD_RES (148)..(148): Selenocysteine
  MOD_RES (172)..(172): Selenocysteine
  MOD_RES (197)..(197): Selenocysteine
  MOD_RES (228)..(228): Selenocysteine
  MOD_RES (283)..(283): Selenocysteine
MGXVLSLSPSYRKAXLFEDGAAXVGHYXAVQNSKNAKDKNLKRHSIISVLPWKRIVAVSAKKKNSKKVQPNSSYQNNIXHLNNENLKKSLSCANLSXFAQPPPAQPPAPPASQLSGSQXGGSSSVKKAPHPAVXSAGXPKRVIVQASXSELLRCLGEFLCRRCYRLKHLSPXDPVLWLRSVDRSLLLQGWQDQGFIXPANVVFLYMLCRDVISSEVGSDHELQAVLLXCLYLSYSYMGNEISYPLKPFLVESCKEAFWDRCLSVINLMSSKMLQINADPHYFXQVFSDLKNESGQEDKKRLLLGLDR

SEQ ID NO: 5756 - protein, 115 aa, Homo sapiens
  MOD_RES (1)..(1): Any amino acid
  MOD_RES (21)..(21): Selenocysteine
  MOD_RES (39)..(39): Selenocysteine
  MOD_RES (61)..(61): Selenocysteine
  MOD_RES (76)..(76): Selenocysteine
  MOD_RES (80)..(80): Selenocysteine
  MOD_RES (90)..(90): Selenocysteine
  MOD_RES (109)..(109): Selenocysteine
XAKKKNSKKVQPNSSYQNNIXHLNNENLKKSLSCANLSXFAQPPPAQPPAPPASQLSGSQXGGSSSVKKAPHPAVXSAGXPKRVIVQASXSELLRCLGMLSPPRWARIXSSRPSC

SEQ ID NO: 5757 - protein, 103 aa, Homo sapiens
  MOD_RES (11)..(11): Selenocysteine
  MOD_RES (34)..(34): Selenocysteine
  MOD_RES (76)..(76): Selenocysteine
  MOD_RES (80)..(80): Selenocysteine
DHQHVPIDIQXSKLLDWLVDRRHCSLKWQSLVLXIREKINAAIQDMPESEEIAQLLSGSYIHYFHCLRILDLLKGXEASXKNIFGRYSSQRMKARLAGDYSSV

SEQ ID NO: 5758 - protein, 105 aa, Homo sapiens
  MOD_RES (13)..(13): Selenocysteine
  MOD_RES (36)..(36): Selenocysteine
  MOD_RES (78)..(78): Selenocysteine
  MOD_RES (82)..(82): Selenocysteine
MEDHQHVPIDIQXSKLLDWLVDRRHCSLKWQSLVLXIREKINAAIQDMPESEEIAQLLSGSYIHYFHCLRILDLLKGXEASXKNIFGRYSSQRMKARLAGDYSSV

SEQ ID NO: 5759 - protein, 124 aa, Homo sapiens
  MOD_RES (13)..(13): Selenocysteine
  MOD_RES (36)..(36): Selenocysteine
  MOD_RES (78)..(78): Selenocysteine
  MOD_RES (82)..(82): Selenocysteine
  MOD_RES (109)..(109): Selenocysteine
  MOD_RES (119)..(119): Selenocysteine
MEDHQHVPIDIQXSKLLDWLVDRRHCSLKWQSLVLXIREKINAAIQDMPESEEIAQLLSGSYIHYFHCLRILDLLKGXEASXKNIFGRYSSQRMKDWQEIIALYEKDNXYLASWFGMSXMRSPH

SEQ ID NO: 5760 - protein, 118 aa, Homo sapiens
  MOD_RES (13)..(13): Selenocysteine
  MOD_RES (36)..(36): Selenocysteine
  MOD_RES (78)..(78): Selenocysteine
  MOD_RES (82)..(82): Selenocysteine
  MOD_RES (109)..(109): Selenocysteine
MEDHQHVPIDIQXSKLLDWLVDRRHCSLKWQSLVLXIREKINAAIQDMPESEEIAQLLSGSYIHYFHCLRILDLLKGXEASXKNIFGRYSSQRMKDWQEIIALYEKDNXYLGGKINCF

SEQ ID NO: 5761 - protein, 506 aa, Homo sapiens
  MOD_RES (13)..(13): Selenocysteine
  MOD_RES (36)..(36): Selenocysteine
  MOD_RES (78)..(78): Selenocysteine
  MOD_RES (82)..(82): Selenocysteine
  MOD_RES (109)..(109): Selenocysteine
  MOD_RES (171)..(171): Selenocysteine
  MOD_RES (220)..(220): Selenocysteine
  MOD_RES (237)..(237): Selenocysteine
  MOD_RES (243)..(243): Selenocysteine
  MOD_RES (245)..(245): Selenocysteine
  MOD_RES (281)..(281): Selenocysteine
  MOD_RES (322)..(322): Selenocysteine
  MOD_RES (328)..(328): Selenocysteine
  MOD_RES (342)..(342): Selenocysteine
  MOD_RES (347)..(347): Selenocysteine
  MOD_RES (349)..(349): Selenocysteine
  MOD_RES (394)..(394): Selenocysteine
  MOD_RES (400)..(400): Selenocysteine
  MOD_RES (413)..(413): Selenocysteine
  MOD_RES (434)..(434): Selenocysteine
  MOD_RES (479)..(479): Selenocysteine
  MOD_RES (504)..(504): Selenocysteine
MEDHQHVPIDIQXSKLLDWLVDRRHCSLKWQSLVLXIREKINAAIQDMPESEEIAQLLSGSYIHYFHCLRILDLLKGXEASXKNIFGRYSSQRMKDWQEIIALYEKDNXYLVELSSLLVRNVNYEIPSLKKQIAKCQQLQQEYSRKEEECQAGAAEMREQFYHSCKQYGIXGENVRGELLALVKDLPSQLAEIGAAAQQSLGEAIDVYQASVGFVCESPXEQVLPMLRFVQKRGNSXVYEWRXGXEPSVVERPHLEELPEQVAEDAIDWGDFGVEAVSEGXDSGISAEAAGIDWGIFPESDSKDPGGDGIDWGDDAVALQIXVLEAGXQAPEGVARGPDALXLLEYXEXRNQFLDELMELEIFLAQRAVELSEEADVLSVSQFQLAPAILQGQXKEKMVXMVSVLEDLIGKLXSLQLQHLFMILASPRYVDRVXEFLQQKLKQSQLLALKKELMVQKQQEALEEQAALEPKLDLLLEKXKELQKLIEADISKRYSGRPVNLMGXSL

SEQ ID NO: 5762 - protein, 281 aa, Homo sapiens
  MOD_RES (13)..(13): Selenocysteine
  MOD_RES (36)..(36): Selenocysteine
  MOD_RES (78)..(78): Selenocysteine
  MOD_RES (82)..(82): Selenocysteine
  MOD_RES (109)..(109): Selenocysteine
  MOD_RES (171)..(171): Selenocysteine
  MOD_RES (215)..(215): Selenocysteine
  MOD_RES (232)..(232): Selenocysteine
  MOD_RES (238)..(238): Selenocysteine
  MOD_RES (240)..(240): Selenocysteine
  MOD_RES (276)..(276): Selenocysteine
MEDHQHVPIDIQXSKLLDWLVDRRHCSLKWQSLVLXIREKINAAIQDMPESEEIAQLLSGSYIHYFHCLRILDLLKGXEASXKNIFGRYSSQRMKDWQEIIALYEKDNXYLVELSSLLVRNVNYEIPSLKKQIAKCQQLQQEYSRKEEECQAGAAEMREQFYHSCKQYGIXGENVRGELLALVKDLPSQLAEIGAAAQQSLGEAIDVYQASVGPXEQVLPMLRFVQKRGNSXVYEWRXGXEPSVVERPHLEELPEQVAEDAIDWGDFGVEAVSEGXDSGIS

SEQ ID NO: 5763 - protein, 110 aa, Homo sapiens
  MOD_RES (98)..(98): Selenocysteine
MEVWGQELGPSARAHRHPDQQAARLAGGQKALQPEMAESGADDPREDQCCHPGHARERRDRPAAVWVLHSLLSLPKNPGPSQRHRGLHEEYFWPILFXADEGLAGDYSSV

SEQ ID NO: 5764 - protein, 48 aa, Homo sapiens
  MOD_RES (13)..(13): Selenocysteine
  MOD_RES (19)..(19): Selenocysteine
MEVWGQELGVLGXGRGPLXCVSGLPPEAAQPSPSLWPRSGPAGWWLGR

SEQ ID NO: 5765 - protein, 123 aa, Homo sapiens
  MOD_RES (16)..(16): Selenocysteine
  MOD_RES (78)..(78): Selenocysteine
MKDWQEIIALYEKDNXYLVELSSLLVRNVNYEIPSLKKQIAKCQQLQQEYSRKEEECQAGAAEMREQFYHSCKQYGIXGENVRGELLALVKDLPSQLAEIGAAAQQSLGEAIDVYQASVGFVC

SEQ ID NO: 5766 - protein, 58 aa, Homo sapiens
  MOD_RES (31)..(31): Selenocysteine
  MOD_RES (35)..(35): Selenocysteine
MPESEEIAQLLSGSYIHYFHCLRILDLLKGXEASXKNIFGRYSSQRMKARLAGDYSSV

SEQ ID NO: 5767 - protein, 64 aa, Homo sapiens
  MOD_RES (31)..(31): Selenocysteine
  MOD_RES (35)..(35): Selenocysteine
  MOD_RES (62)..(62): Selenocysteine
MPESEEIAQLLSGSYIHYFHCLRILDLLKGXEASXKNIFGRYSSQRMKDWQEIIALYEKDNXYL

SEQ ID NO: 5768 - protein, 196 aa, Homo sapiens
  MOD_RES (7)..(7): Selenocysteine
  MOD_RES (10)..(10): Selenocysteine
  MOD_RES (15)..(15): Selenocysteine
  MOD_RES (22)..(22): Selenocysteine
  MOD_RES (38)..(38): Selenocysteine
  MOD_RES (61)..(61): Selenocysteine
  MOD_RES (103)..(103): Selenocysteine
  MOD_RES (107)..(107): Selenocysteine
  MOD_RES (134)..(134): Selenocysteine
  MOD_RES (196)..(196): Selenocysteine
MRRQSMXSAXRDLHXALDGKAXQGGKKDHQHVPIDIQXSKLLDWLVDRRHCSLKWQSLVLXIREKINAAIQDMPESEEIAQLLSGSYIHYFHCLRILDLLKGXEASXKNIFGRYSSQRMKDWQEIIALYEKDNXYLVELSSLLVRNVNYEIPSLKKQIAKCQQLQQEYSRKEEECQAGAAEMREQFYHSCKQYGIX

SEQ ID NO: 5769 - protein, 531 aa, Homo sapiens
  MOD_RES (7)..(7): Selenocysteine
  MOD_RES (10)..(10): Selenocysteine
  MOD_RES (15)..(15): Selenocysteine
  MOD_RES (22)..(22): Selenocysteine
  MOD_RES (38)..(38): Selenocysteine
  MOD_RES (61)..(61): Selenocysteine
  MOD_RES (103)..(103): Selenocysteine
  MOD_RES (107)..(107): Selenocysteine
  MOD_RES (134)..(134): Selenocysteine
  MOD_RES (196)..(196): Selenocysteine
  MOD_RES (245)..(245): Selenocysteine
  MOD_RES (262)..(262): Selenocysteine
  MOD_RES (268)..(268): Selenocysteine
  MOD_RES (270)..(270): Selenocysteine
  MOD_RES (306)..(306): Selenocysteine
  MOD_RES (347)..(347): Selenocysteine
  MOD_RES (353)..(353): Selenocysteine
  MOD_RES (367)..(367): Selenocysteine
  MOD_RES (372)..(372): Selenocysteine
  MOD_RES (374)..(374): Selenocysteine
  MOD_RES (419)..(419): Selenocysteine
  MOD_RES (425)..(425): Selenocysteine
  MOD_RES (438)..(438): Selenocysteine
  MOD_RES (459)..(459): Selenocysteine
  MOD_RES (504)..(504): Selenocysteine
  MOD_RES (529)..(529): Selenocysteine
MRRQSMXSAXRDLHXALDGKAXQGGKKDHQHVPIDIQXSKLLDWLVDRRHCSLKWQSLVLXIREKINAAIQDMPESEEIAQLLSGSYIHYFHCLRILDLLKGXEASXKNIFGRYSSQRMKDWQEIIALYEKDNXYLVELSSLLVRNVNYEIPSLKKQIAKCQQLQQEYSRKEEECQAGAAEMREQFYHSCKQYGIXGENVRGELLALVKDLPSQLAEIGAAAQQSLGEAIDVYQASVGFVCESPXEQVLPMLRFVQKRGNSXVYEWRXGXEPSVVERPHLEELPEQVAEDAIDWGDFGVEAVSEGXDSGISAEAAGIDWGIFPESDSKDPGGDGIDWGDDAVALQIXVLEAGXQAPEGVARGPDALXLLEYXEXRNQFLDELMELEIFLAQRAVELSEEADVLSVSQFQLAPAILQGQXKEKMVXMVSVLEDLIGKLXSLQLQHLFMILASPRYVDRVXEFLQQKLKQSQLLALKKELMVQKQQEALEEQAALEPKLDLLLEKXKELQKLIEADISKRYSGRPVNLMGXSL

SEQ ID NO: 5770 - protein, 272 aa, Homo sapiens
  MOD_RES (1)..(1): Any amino acid
  MOD_RES (12)..(12): Selenocysteine
  MOD_RES (53)..(53): Selenocysteine
  MOD_RES (59)..(59): Selenocysteine
  MOD_RES (73)..(73): Selenocysteine
  MOD_RES (78)..(78): Selenocysteine
  MOD_RES (80)..(80): Selenocysteine
  MOD_RES (125)..(125): Selenocysteine
  MOD_RES (131)..(131): Selenocysteine
  MOD_RES (144)..(144): Selenocysteine
  MOD_RES (165)..(165): Selenocysteine
  MOD_RES (210)..(210): Selenocysteine
  MOD_RES (227)..(227): Selenocysteine
  MOD_RES (230)..(230): Selenocysteine
  MOD_RES (236)..(236): Selenocysteine
  MOD_RES (253)..(253): Selenocysteine
XDFGVEAVSEGXDSGISAEAAGIDWGIFPESDSKDPGGDGIDWGDDAVALQIXVLEAGXQAPEGVARGPDALXLLEYXEXRNQFLDELMELEIFLAQRAVELSEEADVLSVSQFQLAPAILQGQXKEKMVXMVSVLEDLIGKLXSLQLQHLFMILASPRYVDRVXEFLQQKLKQSQLLALKKELMVQKQQEALEEQAALEPKLDLLLEKXKELQKLIEADISKRQKXRLXGRWKAXGRKRHLMVILALSMFSXRSCGDWPCGLSGENHRFSF

SEQ ID NO: 5771 - protein, 58 aa, Homo sapiens
  MOD_RES (25)..(25): Selenocysteine
  MOD_RES (34)..(34): Selenocysteine
  MOD_RES (49)..(50): Selenocysteine
  MOD_RES (58)..(58): Selenocysteine
MALDVKSRAKRYEKLDFLGEGQFAXVYKARDKNXNQIVAIKKESLLVAXXAVNVLCHX

SEQ ID NO: 5772 - protein, 55 aa, Homo sapiens
  MOD_RES (25)..(25): Selenocysteine
  MOD_RES (34)..(34): Selenocysteine
MALDVKSRAKRYEKLDFLGEGQFAXVYKARDKNXNQIVAIKKIKLGHRSEAKDAP

SEQ ID NO: 5773 - protein, 69 aa, Homo sapiens
  MOD_RES (25)..(25): Selenocysteine
  MOD_RES (34)..(34): Selenocysteine
MALDVKSRAKRYEKLDFLGEGQFAXVYKARDKNXNQIVAIKKIKLGHRSEAKDGGIGPPSYYLELGCMV

SEQ ID NO: 5774 - protein, 77 aa, Homo sapiens
  MOD_RES (25)..(25): Selenocysteine
  MOD_RES (34)..(34): Selenocysteine
  MOD_RES (58)..(58): Selenocysteine
MALDVKSRAKRYEKLDFLGEGQFAXVYKARDKNXNQIVAIKKIKLGHRSEAKDGINRXALREIKLLQELSHPNIIAP

SEQ ID NO: 5775 - protein, 309 aa, Homo sapiens
  MOD_RES (25)..(25): Selenocysteine
  MOD_RES (34)..(34): Selenocysteine
  MOD_RES (58)..(58): Selenocysteine
  MOD_RES (96)..(96): Selenocysteine
  MOD_RES (133)..(133): Selenocysteine
  MOD_RES (138)..(138): Selenocysteine
  MOD_RES (186)..(186): Selenocysteine
  MOD_RES (191)..(191): Selenocysteine
  MOD_RES (194)..(194): Selenocysteine
  MOD_RES (196)..(196): Selenocysteine
  MOD_RES (211)..(211): Selenocysteine
  MOD_RES (248)..(248): Selenocysteine
  MOD_RES (250)..(250): Selenocysteine
  MOD_RES (265)..(265): Selenocysteine
  MOD_RES (279)..(279): Selenocysteine
  MOD_RES (295)..(295): Selenocysteine
MALDVKSRAKRYEKLDFLGEGQFAXVYKARDKNXNQIVAIKKIKLGHRSEAKDGINRXALREIKLLQELSHPNIIGLLDAFGHKSNISLVFDFMEXDLEDLKPNNLLLDENGVLKLADFGLAKSFGSPNRAYXHQVVXRWYRAPELLFGARMYGVGVDMWAVGCILAELLLRVPFLPGDSDLDQLXRIFEXLGXPXEEQWPDMCSLPDYVXFKSFPGIPLHHIFSAAGDDLLDLIQGLFLFNPCARIXAXQALKMKYFSNRPGPXPGCQLPRPNCPVEXLKEQSNPALAIKRKRXEALEQGGLPKKLIF

SEQ ID NO: 5776 - protein, 346 aa, Homo sapiens
  MOD_RES (25)..(25): Selenocysteine
  MOD_RES (34)..(34): Selenocysteine
  MOD_RES (58)..(58): Selenocysteine
  MOD_RES (96)..(96): Selenocysteine
  MOD_RES (110)..(110): Selenocysteine
  MOD_RES (121)..(121): Selenocysteine
  MOD_RES (170)..(170): Selenocysteine
  MOD_RES (175)..(175): Selenocysteine
  MOD_RES (223)..(223): Selenocysteine
  MOD_RES (228)..(228): Selenocysteine
  MOD_RES (231)..(231): Selenocysteine
  MOD_RES (233)..(233): Selenocysteine
  MOD_RES (248)..(248): Selenocysteine
  MOD_RES (285)..(285): Selenocysteine
  MOD_RES (287)..(287): Selenocysteine
  MOD_RES (302)..(302): Selenocysteine
  MOD_RES (316)..(316): Selenocysteine
  MOD_RES (332)..(332): Selenocysteine
MALDVKSRAKRYEKLDFLGEGQFAXVYKARDKNXNQIVAIKKIKLGHRSEAKDGINRXALREIKLLQELSHPNIIGLLDAFGHKSNISLVFDFMEXDLEVIIKDNSLVLXPSHIKAYMLMXLQGLEYLHQHWILHRDLKPNNLLLDENGVLKLADFGLAKSFGSPNRAYXHQVVXRWYRAPELLFGARMYGVGVDMWAVGCILAELLLRVPFLPGDSDLDQLXRIFEXLGXPXEEQWPDMCSLPDYVXFKSFPGIPLHHIFSAAGDDLLDLIQGLFLFNPCARIXAXQALKMKYFSNRPGPXPGCQLPRPNCPVEXLKEQSNPALAIKRKRXEALEQGGLPKKLIF

SEQ ID NO: 5777 - protein, 77 aa, Homo sapiens
  MOD_RES (25)..(25): Selenocysteine
  MOD_RES (34)..(34): Selenocysteine
  MOD_RES (58)..(58): Selenocysteine
MALDVKSRAKRYEKLDFLGEGQFAXVYKARDKNXNQIVAIKKIKLGHRSEAKDGINRXALREIKLLQELSHPNIIGP

SEQ ID NO: 5778 - protein, 58 aa, Homo sapiens
  MOD_RES (25)..(25): Selenocysteine
  MOD_RES (34)..(34): Selenocysteine
MALDVKSRAKRYEKLDFLGEGQFAXVYKARDKNXNQIVAIKKIKLGHRSEAKDGYNKG

SEQ ID NO: 5779 - protein, 43 aa, Homo sapiens
  MOD_RES (25)..(25): Selenocysteine
  MOD_RES (34)..(34): Selenocysteine
MALDVKSRAKRYEKLDFLGEGQFAXVYKARDKNXNQIVAIKKV

SEQ ID NO: 5780 - protein, 149 aa, Homo sapiens
  MOD_RES (3)..(3): Selenocysteine
  MOD_RES (17)..(17): Selenocysteine
  MOD_RES (28)..(28): Selenocysteine
  MOD_RES (77)..(77): Selenocysteine
  MOD_RES (82)..(82): Selenocysteine
  MOD_RES (130)..(130): Selenocysteine
  MOD_RES (135)..(135): Selenocysteine
  MOD_RES (138)..(138): Selenocysteine
  MOD_RES (140)..(140): Selenocysteine
MEXDLEVIIKDNSLVLXPSHIKAYMLMXLQGLEYLHQHWILHRDLKPNNLLLDENGVLKLADFGLAKSFGSPNRAYXHQVVXRWYRAPELLFGARMYGVGVDMWAVGCILAELLLRVPFLPGDSDLDQLXRIFEXLGXPXEEQWPDMCS

SEQ ID NO: 5781 - protein, 253 aa, Homo sapiens
  MOD_RES (3)..(3): Selenocysteine
  MOD_RES (17)..(17): Selenocysteine
  MOD_RES (28)..(28): Selenocysteine
  MOD_RES (77)..(77): Selenocysteine
  MOD_RES (82)..(82): Selenocysteine
  MOD_RES (130)..(130): Selenocysteine
  MOD_RES (135)..(135): Selenocysteine
  MOD_RES (138)..(138): Selenocysteine
  MOD_RES (140)..(140): Selenocysteine
  MOD_RES (155)..(155): Selenocysteine
  MOD_RES (192)..(192): Selenocysteine
  MOD_RES (194)..(194): Selenocysteine
  MOD_RES (209)..(209): Selenocysteine
  MOD_RES (223)..(223): Selenocysteine
  MOD_RES (239)..(239): Selenocysteine
MEXDLEVIIKDNSLVLXPSHIKAYMLMXLQGLEYLHQHWILHRDLKPNNLLLDENGVLKLADFGLAKSFGSPNRAYXHQVVXRWYRAPELLFGARMYGVGVDMWAVGCILAELLLRVPFLPGDSDLDQLXRIFEXLGXPXEEQWPDMCSLPDYVXFKSFPGIPLHHIFSAAGDDLLDLIQGLFLFNPCARIXAXQALKMKYFSNRPGPXPGCQLPRPNCPVEXLKEQSNPALAIKRKRXEALEQGGLPKKLIF

SEQ ID NO: 5782 - protein, 493 aa, Homo sapiens
  MOD_RES (26)..(26): Selenocysteine
  MOD_RES (86)..(86): Selenocysteine
  MOD_RES (150)..(150): Selenocysteine
  MOD_RES (159)..(159): Selenocysteine
  MOD_RES (164)..(164): Selenocysteine
  MOD_RES (193)..(193): Selenocysteine
  MOD_RES (336)..(336): Selenocysteine
  MOD_RES (342)..(342): Selenocysteine
  MOD_RES (383)..(383): Selenocysteine
  MOD_RES (392)..(392): Selenocysteine
  MOD_RES (405)..(405): Selenocysteine
  MOD_RES (416)..(416): Selenocysteine
  MOD_RES (432)..(432): Selenocysteine
  MOD_RES (434)..(434): Selenocysteine
  MOD_RES (446)..(446): Selenocysteine
  MOD_RES (470)..(471): Selenocysteine
MEKYENLGLVGEGSYGMVMKCRNKDXGRIVAIKKFLESDDDKMVKKIAMREIKLLKQLRHENLVNLLEVCKKKKRWYLVFEFVDHXILDDLELFPNGLDYQVVQKYLFQIINGIGFCHSHNIIHRDIKPENILVSQSGVVKLCDFGFARXLAAPGEVYXDYVAXRWYRAPELLVGDVKYGKAVDVWAIGCLVXEMFMGEPLFPGDSDIDQLYHIMMCLGNLIPRHQELFNKNPVFAGVRLPEIKEREPLERRYPKLSEVVIDLAKKCLHIDPDKRPFCAELLHHDFFQMDGFAERFSQELQLKVQKDARNVSLSKKSQNRKKEKEKDDSLVEERKXLVVQDXNADPKIKDYKLFKIKGSKIDGEKAEKGNRASNASCLHDSRXSHNKIVPSXSLKDCSNVSVDHXRNPSVAIPPLXHNLSAVAPSINSGMGXEXIPIQGYRVDEKXKKCSIPFVKPNRHSPSGIYNINVXXLVSGPPLSDDSGADLPQMEHQH

SEQ ID NO: 5783 - protein, 570 aa, Homo sapiens
  MOD_RES (26)..(26): Selenocysteine
  MOD_RES (86)..(86): Selenocysteine
  MOD_RES (150)..(150): Selenocysteine
  MOD_RES (159)..(159): Selenocysteine
  MOD_RES (164)..(164): Selenocysteine
  MOD_RES (193)..(193): Selenocysteine
  MOD_RES (336)..(336): Selenocysteine
  MOD_RES (342)..(342): Selenocysteine
  MOD_RES (383)..(383): Selenocysteine
  MOD_RES (392)..(392): Selenocysteine
  MOD_RES (405)..(405): Selenocysteine
  MOD_RES (416)..(416): Selenocysteine
  MOD_RES (432)..(432): Selenocysteine
  MOD_RES (434)..(434): Selenocysteine
  MOD_RES (446)..(446): Selenocysteine
  MOD_RES (470)..(471): Selenocysteine
  MOD_RES (492)..(492): Selenocysteine
  MOD_RES (520)..(520): Selenocysteine
  MOD_RES (542)..(542): Selenocysteine
  MOD_RES (546)..(546): Selenocysteine
MEKYENLGLVGEGSYGMVMKCRNKDXGRIVAIKKFLESDDDKMVKKIAMREIKLLKQLRHENLVNLLEVCKKKKRWYLVFEFVDHXILDDLELFPNGLDYQVVQKYLFQIINGIGFCHSHNIIHRDIKPENILVSQSGVVKLCDFGFARXLAAPGEVYXDYVAXRWYRAPELLVGDVKYGKAVDVWAIGCLVXEMFMGEPLFPGDSDIDQLYHIMMCLGNLIPRHQELFNKNPVFAGVRLPEIKEREPLERRYPKLSEVVIDLAKKCLHIDPDKRPFCAELLHHDFFQMDGFAERFSQELQLKVQKDARNVSLSKKSQNRKKEKEKDDSLVEERKXLVVQDXNADPKIKDYKLFKIKGSKIDGEKAEKGNRASNASCLHDSRXSHNKIVPSXSLKDCSNVSVDHXRNPSVAIPPLXHNLSAVAPSINSGMGXEXIPIQGYRVDEKXKKCSIPFVKPNRHSPSGIYNINVXXLVSSEKNLFWASKKRREYSRXDVRLPELNYNHLPELRALGGIARNSRLXKKESKILSESRIPSLAAIDLHXPSIXLHQVSGPPLSDDSGADLPQMEHQH

SEQ ID NO: 5784 - protein, 58 aa, Homo sapiens
  MOD_RES (26)..(26): Selenocysteine
MEKYENLGLVGEGSYGMVMKCRNKDXGRIVAIKKFLESDDDKMVKKIAMREIKLLKVI

SEQ ID NO: 5785 - protein, 164 aa, Homo sapiens
  MOD_RES (55)..(55): Selenocysteine
  MOD_RES (57)..(57): Selenocysteine
  MOD_RES (80)..(80): Selenocysteine
  MOD_RES (97)..(97): Selenocysteine
  MOD_RES (105)..(105): Selenocysteine
  MOD_RES (118)..(118): Selenocysteine
  MOD_RES (145)..(145): Selenocysteine
  MOD_RES (148)..(148): Selenocysteine
MSEPAGDVRQNPCGSKACRRLFGPVDSEQLSRDCDALMAGCIQEARERWNFDFVXEXPLEGDFAWERVRGLGLPKLYLPXGPRRGRDELGGGRRPGXSPALLQGXAEEDHVDLSLSCXLVPRSGEQAEGSPGGPGDSQGRKRRQXSMXDFYHSKRRLIFSKRKP

SEQ ID NO: 5786 - protein, 198 aa, Homo sapiens
  MOD_RES (42)..(42): Selenocysteine
  MOD_RES (128)..(128): Selenocysteine
  MOD_RES (135)..(135): Selenocysteine
  MOD_RES (142)..(142): Selenocysteine
  MOD_RES (157)..(157): Selenocysteine
  MOD_RES (162)..(162): Selenocysteine
  MOD_RES (170)..(170): Selenocysteine
  MOD_RES (187)..(187): Selenocysteine
  MOD_RES (198)..(198): Selenocysteine
MSNVRVSNGSPSLERMDARQAEHPKPSACRNLFGPVDHEELXRDLEKHCRDMEEASQRKWNFDFQNHKPLEGKYEWQEVEKGSLPEFYYRPPRPPKGACKVPAQESQDVSGSRPAAPLIGAPANSEDXHLVDPKXDPSDSQXGLAEQCAGIRKRPAXDDSSXQNKRANRXEENVSDGSPNAGSVEQXPKKPGLRRRQX

SEQ ID NO: 5787 - protein, 205 aa, Homo sapiens
  MOD_RES (42)..(42): Selenocysteine
  MOD_RES (128)..(128): Selenocysteine
  MOD_RES (135)..(135): Selenocysteine
  MOD_RES (142)..(142): Selenocysteine
  MOD_RES (157)..(157): Selenocysteine
  MOD_RES (160)..(160): Selenocysteine
  MOD_RES (185)..(185): Selenocysteine
  MOD_RES (190)..(190): Selenocysteine
  MOD_RES (198)..(198): Selenocysteine
  MOD_RES (203)..(203): Selenocysteine
MSNVRVSNGSPSLERMDARQAEHPKPSACRNLFGPVDHEELXRDLEKHCRDMEEASQRKWNFDFQNHKPLEGKYEWQEVEKGSLPEFYYRPPRPPKGACKVPAQESQDVSGSRPAAPLIGAPANSEDXHLVDPKXDPSDSQXGLAEQCAGIRKRPAXDDXSLLDEARKIYMKILKIHIADFMEWXSCISXEKQQHNNXKILGXLK

SEQ ID NO: 5788 - protein, 104 aa, Homo sapiens
  MOD_RES (35)..(35): Selenocysteine
  MOD_RES (68)..(68): Selenocysteine
  MOD_RES (76)..(76): Selenocysteine
  MOD_RES (93)..(93): Selenocysteine
  MOD_RES (104)..(104): Selenocysteine
NGSPSLERMDARQAEHPKPSACRNLFGPVDHEELXRDLEKHCRDMEEASQRKWNFDFQNHKPLEDSSXQNKRANRXEENVSDGSPNAGSVEQXPKKPGLRRRQX

SEQ ID NO: 5789 - protein, 131 aa, Homo sapiens
  MOD_RES (9)..(9): Selenocysteine
  MOD_RES (16)..(16): Selenocysteine
  MOD_RES (69)..(69): Selenocysteine
  MOD_RES (83)..(83): Selenocysteine
MERLVARGXFPVLVRXSACRSLFGPVDHEELSRELQARLAELNAEDQNRWDYDFQQDMPLRGPGRLQWXEVDSDSVPAFYREXVQISSPSARDQRLRSRRAMSPRRVPLQAPPLAWARWSRPRARGCGEPI

SEQ ID NO: 5790 - protein, 305 aa, Homo sapiens
  MOD_RES (9)..(9): Selenocysteine
  MOD_RES (16)..(16): Selenocysteine
  MOD_RES (69)..(69): Selenocysteine
  MOD_RES (83)..(83): Selenocysteine
  MOD_RES (136)..(136): Selenocysteine
  MOD_RES (243)..(243): Selenocysteine
  MOD_RES (299)..(299): Selenocysteine
MERLVARGXFPVLVRXSACRSLFGPVDHEELSRELQARLAELNAEDQNRWDYDFQQDMPLRGPGRLQWXEVDSDSVPAFYREXVQVGRCRLLLAPRPVAVAVAVSPPLEPAAESLDGLEEAPEQLPSVPVPAPASXPPPVPVLAPAPAPAPAPVAAPVAAPVAVAVLAPAPAPAPAPAPAPAPVAAPAPAPAPAPAPAPAPAPAPDAAPQESAEQGANQGQRGQEPLADQLHSGISGRPAAGXAAASANGAAIKKLSGPLISDFFAKRKRSAPEKSSGDVPAPCPSPSAAPGVGSVEQXPRKRLR

SEQ ID NO: 5791 - protein, 316 aa, Homo sapiens
  MOD_RES (9)..(9): Selenocysteine
  MOD_RES (11)..(11): Selenocysteine
  MOD_RES (20)..(20): Selenocysteine
  MOD_RES (27)..(27): Selenocysteine
  MOD_RES (80)..(80): Selenocysteine
  MOD_RES (94)..(94): Selenocysteine
  MOD_RES (147)..(147): Selenocysteine
  MOD_RES (254)..(254): Selenocysteine
  MOD_RES (310)..(310): Selenocysteine
MSDASLRSXSXMERLVARGXFPVLVRXSACRSLFGPVDHEELSRELQARLAELNAEDQNRWDYDFQQDMPLRGPGRLQWXEVDSDSVPAFYREXVQVGRCRLLLAPRPVAVAVAVSPPLEPAAESLDGLEEAPEQLPSVPVPAPASXPPPVPVLAPAPAPAPAPVAAPVAAPVAVAVLAPAPAPAPAPAPAPAPVAAPAPAPAPAPAPAPAPAPAPDAAPQESAEQGANQGQRGQEPLADQLHSGISGRPAAGXAAASANGAAIKKLSGPLISDFFAKRKRSAPEKSSGDVPAPCPSPSAAPGVGSVEQXPRKRLR

SEQ ID NO: 5792 - protein, 116 aa, Homo sapiens
  MOD_RES (18)..(18): Selenocysteine
  MOD_RES (68)..(68): Selenocysteine
MEPAAGSSMEPSADWLAXAAARGRVEEVRALLEAGALPNAPNSYGRRPIQVGRGSAAGAGDGGRLWRXKFAGELESGSASILRKKGRLPGEFSEGVCNHRPPPGDALGAWEAKEEE

SEQ ID NO: 5793 - protein, 138 aa, Homo sapiens
  MOD_RES (18)..(18): Selenocysteine
  MOD_RES (77)..(77): Selenocysteine
  MOD_RES (79)..(79): Selenocysteine
  MOD_RES (93)..(93): Selenocysteine
MEPAAGSSMEPSADWLAXAAARGRVEEVRALLEAGALPNAPNSYGRRPIQVMMMGSARVAELLLLHGAEPNCADPAXLXRPVHDAAREGFLDXLVVLHRAGARLDVRDAWGRLPVDLAEELGHRDVARHPRLKEPERL

SEQ ID NO: 5794 - protein, 156 aa, Homo sapiens
  MOD_RES (18)..(18): Selenocysteine
  MOD_RES (77)..(77): Selenocysteine
  MOD_RES (79)..(79): Selenocysteine
  MOD_RES (93)..(93): Selenocysteine
  MOD_RES (137)..(137): Selenocysteine
MEPAAGSSMEPSADWLAXAAARGRVEEVRALLEAGALPNAPNSYGRRPIQVMMMGSARVAELLLLHGAEPNCADPAXLXRPVHDAAREGFLDXLVVLHRAGARLDVRDAWGRLPVDLAEELGHRDVARYLRAAAGGXRGSNHARIDAAEGPSDIPD

SEQ ID NO: 5795 - protein, 167 aa, Homo sapiens
  MOD_RES (18)..(18): Selenocysteine
  MOD_RES (77)..(77): Selenocysteine
  MOD_RES (79)..(79): Selenocysteine
  MOD_RES (93)..(93): Selenocysteine
  MOD_RES (137)..(137): Selenocysteine
MEPAAGSSMEPSADWLAXAAARGRVEEVRALLEAGALPNAPNSYGRRPIQVMMMGSARVAELLLLHGAEPNCADPAXLXRPVHDAAREGFLDXLVVLHRAGARLDVRDAWGRLPVDLAEELGHRDVARYLRAAAGGXRGSNHARIDAAEGPSEMIGNHLWVCRSRHA

SEQ ID NO: 5796 - protein, 105 aa, Homo sapiens
  MOD_RES (26)..(26): Selenocysteine
  MOD_RES (28)..(28): Selenocysteine
  MOD_RES (42)..(42): Selenocysteine
  MOD_RES (86)..(86): Selenocysteine
MMMGSARVAELLLLHGAEPNCADPAXLXRPVHDAAREGFLDXLVVLHRAGARLDVRDAWGRLPVDLAEELGHRDVARYLRAAAGGXRGSNHARIDAAEGPSDIPD

SEQ ID NO: 5797 - protein, 104 aa, Homo sapiens
  MOD_RES (26)..(26): Selenocysteine
  MOD_RES (28)..(28): Selenocysteine
  MOD_RES (42)..(42): Selenocysteine
  MOD_RES (86)..(86): Selenocysteine
MMMGSARVAELLLLHGAEPNCADPAXLXRPVHDAAREGFLDXLVVLHRAGARLDVRDAWGRLPVDLAEELGHRDVARYLRAAAGGXRGSNHARIDAAEGPSGED

SEQ ID NO: 5798 - protein, 121 aa, Homo sapiens
  MOD_RES (26)..(26): Selenocysteine
  MOD_RES (28)..(28): Selenocysteine
  MOD_RES (42)..(42): Selenocysteine
  MOD_RES (86)..(86): Selenocysteine
  MOD_RES (103)..(103): Selenocysteine
MMMGSARVAELLLLHGAEPNCADPAXLXRPVHDAAREGFLDXLVVLHRAGARLDVRDAWGRLPVDLAEELGHRDVARYLRAAAGGXRGSNHARIDAAEGPSVXASIQVPGGEEGDFGSSYS

SEQ ID NO: 5799 - protein, 132 aa, Homo sapiens
  MOD_RES (8)..(8): Selenocysteine
  MOD_RES (31)..(31): Selenocysteine
  MOD_RES (95)..(95): Selenocysteine
MVRRFLVXLRIRRACGPPRVRVFVVHIPRLXGEWAAPGAPAAVALVLMLLRSQRLGQQPLPRRPGHDDGQRPSGGAAAAPRRGAQLRRPRHSHPXRARRCPGGLPGHAGGAAPGRGAAGRARCLGPSARGPG

SEQ ID NO: 5800 - protein, 126 aa, Homo sapiens
  MOD_RES (28)..(28): Selenocysteine
  MOD_RES (57)..(57): Selenocysteine
  MOD_RES (67)..(67): Selenocysteine
  MOD_RES (110)..(110): Selenocysteine
  MOD_RES (114)..(114): Selenocysteine
  MOD_RES (116)..(117): Selenocysteine
MAQEVSEYLSQNPRVAAWVEALRCDGEXDKHWRHRRDFLLRNAGDLAPAGGAASASXDEAADAESGXRNRQLQQLISFSMAWANHVFLGCRYPQKVMDKILSMAEGIKVXDAPXYXXRDELVAKKG

SEQ ID NO: 5801 - protein, 580 aa, Homo sapiens
  MOD_RES (28)..(28): Selenocysteine
  MOD_RES (57)..(57): Selenocysteine
  MOD_RES (67)..(67): Selenocysteine
  MOD_RES (110)..(110): Selenocysteine
  MOD_RES (114)..(114): Selenocysteine
  MOD_RES (116)..(117): Selenocysteine
  MOD_RES (161)..(161): Selenocysteine
  MOD_RES (165)..(165): Selenocysteine
  MOD_RES (177)..(177): Selenocysteine
  MOD_RES (203)..(203): Selenocysteine
  MOD_RES (223)..(224): Selenocysteine
  MOD_RES (257)..(257): Selenocysteine
  MOD_RES (260)..(260): Selenocysteine
  MOD_RES (314)..(314): Selenocysteine
  MOD_RES (320)..(320): Selenocysteine
  MOD_RES (323)..(323): Selenocysteine
  MOD_RES (342)..(342): Selenocysteine
  MOD_RES (346)..(346): Selenocysteine
  MOD_RES (353)..(353): Selenocysteine
  MOD_RES (355)..(355): Selenocysteine
  MOD_RES (359)..(359): Selenocysteine
  MOD_RES (363)..(363): Selenocysteine
  MOD_RES (379)..(379): Selenocysteine
  MOD_RES (388)..(388): Selenocysteine
  MOD_RES (404)..(404): Selenocysteine
  MOD_RES (406)..(406): Selenocysteine
  MOD_RES (414)..(414): Selenocysteine
  MOD_RES (429)..(429): Selenocysteine
  MOD_RES (446)..(446): Selenocysteine
  MOD_RES (477)..(477): Selenocysteine
  MOD_RES (514)..(514): Selenocysteine
MAQEVSEYLSQNPRVAAWVEALRCDGEXDKHWRHRRDFLLRNAGDLAPAGGAASASXDEAADAESGXRNRQLQQLISFSMAWANHVFLGCRYPQKVMDKILSMAEGIKVXDAPXYXXRDELVAKVKKRGISSSNEGVEEPSKKRVIEGKNSSAVEQDHAKXSAKXERASAQQENSSXCIGSAIKSESGNSARSSGISSQNSSXSDGDRSVSSQSSSSVSSQVXXAGSGKASEAEAPDKHGSASFVSLLKSSVNSHMXQSXDSRQQSGSPKKSALEGSSASASQSSSEIEVPLLGSSGSSEVELPLLSSKPSSEXASSGLXSKXSSEASVSSSVAKNSSSSGXSLLXPKSSSSXNXSLLXSKSXSQVAASLLASKSSSQXSGSLVSKSXSLASVSQLASKSSSQXSXSQLPSKSXSQSSESSVKFSCKLXNEDVKQKQPFFNRLYKXVAWKLVAVGGFSPNVNHGELLNAAIEALKAXLDVFFVPLKELADLPQNKSSQESIVCELRCKSVYLGXGCGKSKENAKAVASREALKLFLKKKVVVKICKRKYRGSEIEDLVLLDEESRPVNLPPALKHPQELL

SEQ ID NO: 5802 - protein, 135 aa, Homo sapiens
  MOD_RES (28)..(28): Selenocysteine
  MOD_RES (57)..(57): Selenocysteine
  MOD_RES (67)..(67): Selenocysteine
  MOD_RES (110)..(110): Selenocysteine
  MOD_RES (114)..(114): Selenocysteine
  MOD_RES (116)..(117): Selenocysteine
MAQEVSEYLSQNPRVAAWVEALRCDGEXDKHWRHRRDFLLRNAGDLAPAGGAASASXDEAADAESGXRNRQLQQLISFSMAWANHVFLGCRYPQKVMDKILSMAEGIKVXDAPXYXXRDELVAKVKKRGISSSNG

SEQ ID NO: 5803 - protein, 85 aa, Homo sapiens
MVGGEAAAAVEELVSGVRQAADFAEQFRSYSESEKQWKARMEFILRHLPDYRDPPDGSGRLDQLLSLSMVWANHLFLGCSPRGPK

SEQ ID NO: 5804 - protein, 116 aa, Homo sapiens
  MOD_RES (105)..(106): Selenocysteine
MVGGEAAAAVEELVSGVRQAADFAEQFRSYSESEKQWKARMEFILRHLPDYRDPPDGSGRLDQLLSLSMVWANHLFLGCSYNKDLLDKVMEMADGIEVEDLPQFXXRSELMKKHQS

SEQ ID NO: 5805 - protein, 78 aa, Homo sapiens
  MOD_RES (78)..(78): Selenocysteine
MREENKGMPSGGGSDEGLASAAARGLVEKVRQLLEAGADPNGVNRFGRRAIQVAGAPGPRRQGARERGARPRRIGAGX

SEQ ID NO: 5806 - protein, 138 aa, Homo sapiens
  MOD_RES (79)..(79): Selenocysteine
  MOD_RES (81)..(81): Selenocysteine
  MOD_RES (95)..(95): Selenocysteine
  MOD_RES (134)..(134): Selenocysteine
  MOD_RES (136)..(136): Selenocysteine
MREENKGMPSGGGSDEGLASAAARGLVEKVRQLLEAGADPNGVNRFGRRAIQVMMMGSARVAELLLLHGAEPNCADPAXLXRPVHDAAREGFLDXLVVLHRAGARLDVRDAWGRLPVDLAEERGHRDVAGYLRXAXGD

SEQ ID NO: 5807 - protein, 166 aa, Homo sapiens
  MOD_RES (44)..(44): Selenocysteine
  MOD_RES (54)..(54): Selenocysteine
  MOD_RES (72)..(72): Selenocysteine
  MOD_RES (75)..(75): Selenocysteine
  MOD_RES (84)..(84): Selenocysteine
  MOD_RES (89)..(89): Selenocysteine
  MOD_RES (106)..(106): Selenocysteine
  MOD_RES (120)..(120): Selenocysteine
  MOD_RES (141)..(141): Selenocysteine
MLLEEVRAGDRLSGAAARGDVQEVRRLLHRELVHPDALNRFGKXALQVMMFGSXAIALELLKQGASPNVQDXSGXSPVHDAARXGFLDXLKVLVEHGADVNVPDGXGALPIHLAVQEGHXAVVSFLAAESDLHRRDARGLXPLELALQRGAQDLVDILQGHMVAPL

SEQ ID NO: 5808 - protein, 111 aa, Homo sapiens
  MOD_RES (10)..(10): Selenocysteine
  MOD_RES (15)..(15): Selenocysteine
  MOD_RES (17)..(17): Selenocysteine
  MOD_RES (32)..(32): Selenocysteine
  MOD_RES (56)..(57): Selenocysteine
  MOD_RES (67)..(67): Selenocysteine
  MOD_RES (81)..(81): Selenocysteine
  MOD_RES (83)..(83): Selenocysteine
MHPDLGPLCXLLYVXLXILCSSVSSDLAPYFXSEPLSAVQKLGGPVVLHCSAQPVXXRISWLHNGKXLDGNLEHVKIHQGXLXILSLNSSLLGYYQCLANNSIGAIVSGPA

SEQ ID NO: 5809 - protein, 143 aa, Homo sapiens
  MOD_RES (10)..(10): Selenocysteine
  MOD_RES (15)..(15): Selenocysteine
  MOD_RES (17)..(17): Selenocysteine
  MOD_RES (32)..(32): Selenocysteine
  MOD_RES (56)..(57): Selenocysteine
  MOD_RES (67)..(67): Selenocysteine
  MOD_RES (81)..(81): Selenocysteine
  MOD_RES (83)..(83): Selenocysteine
  MOD_RES (112)..(112): Selenocysteine
  MOD_RES (125)..(125): Selenocysteine
  MOD_RES (130)..(130): Selenocysteine
MHPDLGPLCXLLYVXLXILCSSVSSDLAPYFXSEPLSAVQKLGGPVVLHCSAQPVXXRISWLHNGKXLDGNLEHVKIHQGXLXILSLNSSLLGYYQCLANNSIGAIVSGPAXVSVAVLGDFGSSXKHVIXAEEKSAGFIGCRV

SEQ ID NO: 5810 - protein, 165 aa, Homo sapiens
  MOD_RES (10)..(10): Selenocysteine
  MOD_RES (15)..(15): Selenocysteine
  MOD_RES (17)..(17): Selenocysteine
  MOD_RES (32)..(32): Selenocysteine
  MOD_RES (56)..(57): Selenocysteine
  MOD_RES (67)..(67): Selenocysteine
  MOD_RES (81)..(81): Selenocysteine
  MOD_RES (83)..(83): Selenocysteine
  MOD_RES (112)..(112): Selenocysteine
  MOD_RES (125)..(125): Selenocysteine
  MOD_RES (130)..(130): Selenocysteine
  MOD_RES (165)..(165): Selenocysteine
MHPDLGPLCXLLYVXLXILCSSVSSDLAPYFXSEPLSAVQKLGGPVVLHCSAQPVXXRISWLHNGKXLDGNLEHVKIHQGXLXILSLNSSLLGYYQCLANNSIGAIVSGPAXVSVAVLGDFGSSXKHVIXAEEKSAGFIGCRVPESNPKAEVRYKIRGKWLEHSX

SEQ ID NO: 5811 - protein, 1264 aa, Homo sapiens
  MOD_RES (10)..(10): Selenocysteine
  MOD_RES (15)..(15): Selenocysteine
  MOD_RES (17)..(17): Selenocysteine
  MOD_RES (32)..(32): Selenocysteine
  MOD_RES (56)..(57): Selenocysteine
  MOD_RES (67)..(67): Selenocysteine
  MOD_RES (81)..(81): Selenocysteine
  MOD_RES (83)..(83): Selenocysteine
  MOD_RES (112)..(112): Selenocysteine
  MOD_RES (125)..(125): Selenocysteine
  MOD_RES (130)..(130): Selenocysteine
  MOD_RES (165)..(165): Selenocysteine
  MOD_RES (198)..(198): Selenocysteine
  MOD_RES (226)..(226): Selenocysteine
  MOD_RES (240)..(240): Selenocysteine
  MOD_RES (277)..(277): Selenocysteine
  MOD_RES (303)..(303): Selenocysteine
  MOD_RES (328)..(328): Selenocysteine
  MOD_RES (332)..(332): Selenocysteine
  MOD_RES (344)..(344): Selenocysteine
  MOD_RES (360)..(360): Selenocysteine
  MOD_RES (371)..(371): Selenocysteine
  MOD_RES (392)..(392): Selenocysteine
  MOD_RES (409)..(409): Selenocysteine
  MOD_RES (423)..(423): Selenocysteine
  MOD_RES (446)..(446): Selenocysteine
  MOD_RES (491)..(491): Selenocysteine
  MOD_RES (508)..(509): Selenocysteine
  MOD_RES (522)..(522): Selenocysteine
  MOD_RES (524)..(524): Selenocysteine
  MOD_RES (528)..(528): Selenocysteine
  MOD_RES (530)..(530): Selenocysteine
  MOD_RES (548)..(548): Selenocysteine
  MOD_RES (588)..(588): Selenocysteine
  MOD_RES (590)..(590): Selenocysteine
  MOD_RES (593)..(593): Selenocysteine
  MOD_RES (630)..(630): Selenocysteine
  MOD_RES (670)..(670): Selenocysteine
  MOD_RES (673)..(673): Selenocysteine
  MOD_RES (678)..(678): Selenocysteine
  MOD_RES (684)..(684): Selenocysteine
  MOD_RES (712)..(712): Selenocysteine
  MOD_RES (728)..(728): Selenocysteine
  MOD_RES (731)..(731): Selenocysteine
  MOD_RES (735)..(735): Selenocysteine
  MOD_RES (740)..(740): Selenocysteine
  MOD_RES (752)..(752): Selenocysteine
  MOD_RES (763)..(763): Selenocysteine
  MOD_RES (790)..(790): Selenocysteine
  MOD_RES (828)..(828): Selenocysteine
  MOD_RES (835)..(835): Selenocysteine
  MOD_RES (841)..(841): Selenocysteine
  MOD_RES (848)..(848): Selenocysteine
  MOD_RES (857)..(857): Selenocysteine
  MOD_RES (869)..(869): Selenocysteine
  MOD_RES (898)..(898): Selenocysteine
  MOD_RES (923)..(923): Selenocysteine
  MOD_RES (941)..(941): Selenocysteine
  MOD_RES (956)..(956): Selenocysteine
  MOD_RES (996)..(996): Selenocysteine
  MOD_RES (1020)..(1021): Selenocysteine
  MOD_RES (1038)..(1038): Selenocysteine
  MOD_RES (1078)..(1078): Selenocysteine
  MOD_RES (1080)..(1080): Selenocysteine
  MOD_RES (1098)..(1098): Selenocysteine
  MOD_RES (1122)..(1122): Selenocysteine
  MOD_RES (1124)..(1124): Selenocysteine
  MOD_RES (1127)..(1127): Selenocysteine
  MOD_RES (1162)..(1162): Selenocysteine
  MOD_RES (1185)..(1185): Selenocysteine
  MOD_RES (1188)..(1188): Selenocysteine
  MOD_RES (1219)..(1219): Selenocysteine
  MOD_RES (1242)..(1242): Selenocysteine
  MOD_RES (1255)..(1255): Selenocysteine
  MOD_RES (1264)..(1264): Selenocysteine
MHPDLGPLCXLLYVXLXILCSSVSSDLAPYFXSEPLSAVQKLGGPVVLHCSAQPVXXRISWLHNGKXLDGNLEHVKIHQGXLXILSLNSSLLGYYQCLANNSIGAIVSGPAXVSVAVLGDFGSSXKHVIXAEEKSAGFIGCRVPESNPKAEVRYKIRGKWLEHSXENYLILPSGNLQILNVSLEDKGSYKCAAYNPVXHQLKVEPIGRKLLVSRPSSDDVHILHPXHSQALAVLSRSPVXLECVVSGVPAPQVYWLKDGQDIAPGSNWRRLYSHLAXDSVDPADSGNYSCMAGNKSGDVKYVXYMVNVLEHASISKGLQDQIVSLGAXVHFXCDVHGNPAPNCXWFHNAQPIHPSARHLXAGNGLKISGVXVEDVGMYQCVADNGIGFMHSXGRLEIENDGGFKPVIIXAPVSAKVADGDFVXLSCNASGLPVPVIRWYDSHGLIXSHPSQVLRSKSRKSQLSRPEGLNLEPVYFVLSQAGASSLHIQAVXQEHAGKYICEAANEHGXXQAEASLMVVPFEXNXKAEXVXLPDAAQNDDRSKRDGSEXGLLSSFPVKVHPSAVESAPEKNASGISVPDAPIILSPPQXHXPDXYNLVWRAGKDGGLPINAYFVKYRKLDDGVGMLGSWHXVRVPGSENELHLAELEPSSLYEVLMVARSAAGEGQPAMLXFRXSKEKXASSKNXQASSPPVGIPKYPVVSEAANNNFGVVLXDSSRHSGVPEAPDRPXISXASEXSVYVXWIPRANGGSPIXAFKVEYKRMRXSNWLVAAEDIPPSKLSVEVRSLEPGSXYKFRVIAINHYGESFRSSASRPYQVVGFPNRFSSRPIXGPHIAYXEAVSDXQIMLKWXYIPSSNNNXPIQGFYIYYRPXDSDNDSDYKRDVVEGSKQWHMIGHLQPEXSYDIKMQCFNEGGESEFSNVMICEXKVKRVPGASEYPVKDLSXPPNSLGSGGNVGPAXSPARSSDMLYLIVGCVLGVMVLILMVFIAMCLWKNRQQNXIQKYDPPGYLYQGSDMNGQMVDYXXLSGASQINGNVHGGFLXNGGLSSGYSHLHHKVPNAVNGIVNGSLNGGLYSGHSNSLXRXHVDFEHPHHLVNGGGMYXAVPQIDPLECVNCRNCRNNNRCFXKXNSXFSSSPPPVVPVVAPYPQDGLEMKPLSHVKVPVCLXSAVPDCGQLPEESVKDNVEPVPXQRXCCQDIVNDVSSDGSEDPAEFSRGDSCAHSEXEINIVSWNALILPPVPEGCAEKXMWSPPGIPLDSPXEVLQQPREX

SEQ ID NO: 5812 - protein, 1287 aa, Homo sapiens
  MOD_RES (10)..(10): Selenocysteine
  MOD_RES (15)..(15): Selenocysteine
  MOD_RES (17)..(17): Selenocysteine
  MOD_RES (32)..(32): Selenocysteine
  MOD_RES (56)..(57): Selenocysteine
  MOD_RES (67)..(67): Selenocysteine
  MOD_RES (81)..(81): Selenocysteine
  MOD_RES (83)..(83): Selenocysteine
  MOD_RES (112)..(112): Selenocysteine
  MOD_RES (125)..(125): Selenocysteine
  MOD_RES (130)..(130): Selenocysteine
  MOD_RES (165)..(165): Selenocysteine
  MOD_RES (198)..(198): Selenocysteine
  MOD_RES (226)..(226): Selenocysteine
  MOD_RES (240)..(240): Selenocysteine
  MOD_RES (277)..(277): Selenocysteine
  MOD_RES (303)..(303): Selenocysteine
  MOD_RES (328)..(328): Selenocysteine
  MOD_RES (332)..(332): Selenocysteine
  MOD_RES (344)..(344): Selenocysteine
  MOD_RES (360)..(360): Selenocysteine
  MOD_RES (371)..(371): Selenocysteine
  MOD_RES (392)..(392): Selenocysteine
  MOD_RES (409)..(409): Selenocysteine
  MOD_RES (423)..(423): Selenocysteine
  MOD_RES (446)..(446): Selenocysteine
  MOD_RES (491)..(491): Selenocysteine
  MOD_RES (508)..(509): Selenocysteine
  MOD_RES (522)..(522): Selenocysteine
  MOD_RES (524)..(524): Selenocysteine
  MOD_RES (528)..(528): Selenocysteine
  MOD_RES (530)..(530): Selenocysteine
  MOD_RES (548)..(548): Selenocysteine
  MOD_RES (588)..(588): Selenocysteine
  MOD_RES (590)..(590): Selenocysteine
  MOD_RES (593)..(593): Selenocysteine
  MOD_RES (630)..(630): Selenocysteine
  MOD_RES (670)..(670): Selenocysteine
  MOD_RES (673)..(673): Selenocysteine
  MOD_RES (678)..(678): Selenocysteine
  MOD_RES (684)..(684): Selenocysteine
  MOD_RES (712)..(712): Selenocysteine
  MOD_RES (728)..(728): Selenocysteine
  MOD_RES (731)..(731): Selenocysteine
  MOD_RES (735)..(735): Selenocysteine
  MOD_RES (740)..(740): Selenocysteine
  MOD_RES (752)..(752): Selenocysteine
  MOD_RES (763)..(763): Selenocysteine
  MOD_RES (790)..(790): Selenocysteine
  MOD_RES (828)..(828): Selenocysteine
  MOD_RES (835)..(835): Selenocysteine
  MOD_RES (841)..(841): Selenocysteine
  MOD_RES (848)..(848): Selenocysteine
  MOD_RES (857)..(857): Selenocysteine
  MOD_RES (869)..(869): Selenocysteine
  MOD_RES (898)..(898): Selenocysteine
  MOD_RES (923)..(923): Selenocysteine
  MOD_RES (941)..(941): Selenocysteine
  MOD_RES (956)..(956): Selenocysteine
  MOD_RES (996)..(996): Selenocysteine
  MOD_RES (1020)..(1021): Selenocysteine
  MOD_RES (1038)..(1038): Selenocysteine
  MOD_RES (1078)..(1078): Selenocysteine
  MOD_RES (1080)..(1080): Selenocysteine
  MOD_RES (1098)..(1098): Selenocysteine
  MOD_RES (1122)..(1122): Selenocysteine
  MOD_RES (1124)..(1124): Selenocysteine
  MOD_RES (1127)..(1127): Selenocysteine
  MOD_RES (1162)..(1162): Selenocysteine
  MOD_RES (1185)..(1185): Selenocysteine
  MOD_RES (1188)..(1188): Selenocysteine
  MOD_RES (1242)..(1242): Selenocysteine
  MOD_RES (1265)..(1265): Selenocysteine
  MOD_RES (1278)..(1278): Selenocysteine
  MOD_RES (1287)..(1287): Selenocysteine
MHPDLGPLCXLLYVXLXILCSSVSSDLAPYFXSEPLSAVQKLGGPVVLHCSAQPVXXRISWLHNGKXLDGNLEHVKIHQGXLXILSLNSSLLGYYQCLANNSIGAIVSGPAXVSVAVLGDFGSSXKHVIXAEEKSAGFIGCRVPESNPKAEVRYKIRGKWLEHSXENYLILPSGNLQILNVSLEDKGSYKCAAYNPVXHQLKVEPIGRKLLVSRPSSDDVHILHPXHSQALAVLSRSPVXLECVVSGVPAPQVYWLKDGQDIAPGSNWRRLYSHLAXDSVDPADSGNYSCMAGNKSGDVKYVXYMVNVLEHASISKGLQDQIVSLGAXVHFXCDVHGNPAPNCXWFHNAQPIHPSARHLXAGNGLKISGVXVEDVGMYQCVADNGIGFMHSXGRLEIENDGGFKPVIIXAPVSAKVADGDFVXLSCNASGLPVPVIRWYDSHGLIXSHPSQVLRSKSRKSQLSRPEGLNLEPVYFVLSQAGASSLHIQAVXQEHAGKYICEAANEHGXXQAEASLMVVPFEXNXKAEXVXLPDAAQNDDRSKRDGSEXGLLSSFPVKVHPSAVESAPEKNASGISVPDAPIILSPPQXHXPDXYNLVWRAGKDGGLPINAYFVKYRKLDDGVGMLGSWHXVRVPGSENELHLAELEPSSLYEVLMVARSAAGEGQPAMLXFRXSKEKXASSKNXQASSPPVGIPKYPVVSEAANNNFGVVLXDSSRHSGVPEAPDRPXISXASEXSVYVXWIPRANGGSPIXAFKVEYKRMRXSNWLVAAEDIPPSKLSVEVRSLEPGSXYKFRVIAINHYGESFRSSASRPYQVVGFPNRFSSRPIXGPHIAYXEAVSDXQIMLKWXYIPSSNNNXPIQGFYIYYRPXDSDNDSDYKRDVVEGSKQWHMIGHLQPEXSYDIKMQCFNEGGESEFSNVMICEXKVKRVPGASEYPVKDLSXPPNSLGSGGNVGPAXSPARSSDMLYLIVGCVLGVMVLILMVFIAMCLWKNRQQNXIQKYDPPGYLYQGSDMNGQMVDYXXLSGASQINGNVHGGFLXNGGLSSGYSHLHHKVPNAVNGIVNGSLNGGLYSGHSNSLXRXHVDFEHPHHLVNGGGMYXAVPQIDPLECVNCRNCRNNNRCFXKXNSXFSSSPPPVVPVVAPYPQDGLEMKPLSHVKVPVCLXSAVPDCGQLPEESVKDNVEPVPXQRXCCQDIVNDVSSDGSEDPAEFSRGQEGMINLRIPDHLQLAKSCVWEGDSCAHSEXEINIVSWNALILPPVPEGCAEKXMWSPPGIPLDSPXEVLQQPREX

SEQ ID NO: 5813 - protein, 641 aa, Homo sapiens
  MOD_RES (7)..(7): Selenocysteine
  MOD_RES (47)..(47): Selenocysteine
  MOD_RES (50)..(50): Selenocysteine
  MOD_RES (55)..(55): Selenocysteine
  MOD_RES (61)..(61): Selenocysteine
  MOD_RES (89)..(89): Selenocysteine
  MOD_RES (105)..(105): Selenocysteine
  MOD_RES (108)..(108): Selenocysteine
  MOD_RES (112)..(112): Selenocysteine
  MOD_RES (117)..(117): Selenocysteine
  MOD_RES (129)..(129): Selenocysteine
  MOD_RES (140)..(140): Selenocysteine
  MOD_RES (167)..(167): Selenocysteine
  MOD_RES (205)..(205): Selenocysteine
  MOD_RES (212)..(212): Selenocysteine
  MOD_RES (218)..(218): Selenocysteine
  MOD_RES (225)..(225): Selenocysteine
  MOD_RES (234)..(234): Selenocysteine
  MOD_RES (246)..(246): Selenocysteine
  MOD_RES (275)..(275): Selenocysteine
  MOD_RES (300)..(300): Selenocysteine
  MOD_RES (318)..(318): Selenocysteine
  MOD_RES (333)..(333): Selenocysteine
  MOD_RES (373)..(373): Selenocysteine
  MOD_RES (397)..(398): Selenocysteine
  MOD_RES (415)..(415): Selenocysteine
  MOD_RES (455)..(455): Selenocysteine
  MOD_RES (457)..(457): Selenocysteine
  MOD_RES (475)..(475): Selenocysteine
  MOD_RES (499)..(499): Selenocysteine
  MOD_RES (501)..(501): Selenocysteine
  MOD_RES (504)..(504): Selenocysteine
  MOD_RES (539)..(539): Selenocysteine
  MOD_RES (562)..(562): Selenocysteine
  MOD_RES (565)..(565): Selenocysteine
  MOD_RES (596)..(596): Selenocysteine
  MOD_RES (619)..(619): Selenocysteine
  MOD_RES (632)..(632): Selenocysteine
  MOD_RES (641)..(641): Selenocysteine
MLGSWHXVRVPGSENELHLAELEPSSLYEVLMVARSAAGEGQPAMLXFRXSKEKXASSKNXQASSPPVGIPKYPVVSEAANNNFGVVLXDSSRHSGVPEAPDRPXISXASEXSVYVXWIPRANGGSPIXAFKVEYKRMRXSNWLVAAEDIPPSKLSVEVRSLEPGSXYKFRVIAINHYGESFRSSASRPYQVVGFPNRFSSRPIXGPHIAYXEAVSDXQIMLKWXYIPSSNNNXPIQGFYIYYRPXDSDNDSDYKRDVVEGSKQWHMIGHLQPEXSYDIKMQCFNEGGESEFSNVMICEXKVKRVPGASEYPVKDLSXPPNSLGSGGNVGPAXSPARSSDMLYLIVGCVLGVMVLILMVFIAMCLWKNRQQNXIQKYDPPGYLYQGSDMNGQMVDYXXLSGASQINGNVHGGFLXNGGLSSGYSHLHHKVPNAVNGIVNGSLNGGLYSGHSNSLXRXHVDFEHPHHLVNGGGMYXAVPQIDPLECVNCRNCRNNNRCFXKXNSXFSSSPPPVVPVVAPYPQDGLEMKPLSHVKVPVCLXSAVPDCGQLPEESVKDNVEPVPXQRXCCQDIVNDVSSDGSEDPAEFSRGDSCAHSEXEINIVSWNALILPPVPEGCAEKXMWSPPGIPLDSPXEVLQQPREX

SEQ ID NO: 5814 - protein, 650 aa, Homo sapiens
  MOD_RES (1)..(1): Any amino acid
  MOD_RES (8)..(8): Selenocysteine
  MOD_RES (32)..(33): Selenocysteine
  MOD_RES (43)..(43): Selenocysteine
  MOD_RES (57)..(57): Selenocysteine
  MOD_RES (59)..(59): Selenocysteine
  MOD_RES (88)..(88): Selenocysteine
  MOD_RES (101)..(101): Selenocysteine
  MOD_RES (106)..(106): Selenocysteine
  MOD_RES (141)..(141): Selenocysteine
  MOD_RES (174)..(174): Selenocysteine
  MOD_RES (202)..(202): Selenocysteine
  MOD_RES (216)..(216): Selenocysteine
  MOD_RES (253)..(253): Selenocysteine
  MOD_RES (279)..(279): Selenocysteine
  MOD_RES (304)..(304): Selenocysteine
  MOD_RES (308)..(308): Selenocysteine
  MOD_RES (320)..(320): Selenocysteine
  MOD_RES (336)..(336): Selenocysteine
  MOD_RES (347)..(347): Selenocysteine
  MOD_RES (368)..(368): Selenocysteine
  MOD_RES (385)..(385): Selenocysteine
  MOD_RES (399)..(399): Selenocysteine
  MOD_RES (422)..(422): Selenocysteine
  MOD_RES (467)..(467): Selenocysteine
  MOD_RES (484)..(485): Selenocysteine
  MOD_RES (498)..(498): Selenocysteine
  MOD_RES (500)..(500): Selenocysteine
  MOD_RES (504)..(504): Selenocysteine
  MOD_RES (506)..(506): Selenocysteine
  MOD_RES (524)..(524): Selenocysteine
  MOD_RES (564)..(564): Selenocysteine
  MOD_RES (566)..(566): Selenocysteine
  MOD_RES (569)..(569): Selenocysteine
  MOD_RES (606)..(606): Selenocysteine
  MOD_RES (646)..(646): Selenocysteine
  MOD_RES (649)..(649): Selenocysteine
XDLAPYFXSEPLSAVQKLGGPVVLHCSAQPVXXRISWLHNGKXLDGNLEHVKIHQGXLXILSLNSSLLGYYQCLANNSIGAIVSGPAXVSVAVLGDFGSSXKHVIXAEEKSAGFIGCRVPESNPKAEVRYKIRGKWLEHSXENYLILPSGNLQILNVSLEDKGSYKCAAYNPVXHQLKVEPIGRKLLVSRPSSDDVHILHPXHSQALAVLSRSPVXLECVVSGVPAPQVYWLKDGQDIAPGSNWRRLYSHLAXDSVDPADSGNYSCMAGNKSGDVKYVXYMVNVLEHASISKGLQDQIVSLGAXVHFXCDVHGNPAPNCXWFHNAQPIHPSARHLXAGNGLKISGVXVEDVGMYQCVADNGIGFMHSXGRLEIENDGGFKPVIIXAPVSAKVADGDFVXLSCNASGLPVPVIRWYDSHGLIXSHPSQVLRSKSRKSQLSRPEGLNLEPVYFVLSQAGASSLHIQAVXQEHAGKYICEAANEHGXXQAEASLMVVPFEXNXKAEXVXLPDAAQNDDRSKRDGSEXGLLSSFPVKVHPSAVESAPEKNASGISVPDAPIILSPPQXHXPDXYNLVWRAGKDGGLPINAYFVKYRKLDDGVGMLGSWHXVRVPGSENELHLAELEPSSLYEVLMVARSAAGEGQPAMLXFRXS

SEQ ID NO: 5815 - protein, 243 aa, Homo sapiens
  MOD_RES (1)..(1): Any amino acid
  MOD_RES (33)..(33): Selenocysteine
  MOD_RES (61)..(61): Selenocysteine
  MOD_RES (75)..(75): Selenocysteine
  MOD_RES (112)..(112): Selenocysteine
  MOD_RES (138)..(138): Selenocysteine
  MOD_RES (163)..(163): Selenocysteine
  MOD_RES (167)..(167): Selenocysteine
  MOD_RES (179)..(179): Selenocysteine
  MOD_RES (195)..(195): Selenocysteine
  MOD_RES (206)..(206): Selenocysteine
  MOD_RES (227)..(227): Selenocysteine
XNYLILPSGNLQILNVSLEDKGSYKCAAYNPVXHQLKVEPIGRKLLVSRPSSDDVHILHPXHSQALAVLSRSPVXLECVVSGVPAPQVYWLKDGQDIAPGSNWRRLYSHLAXDSVDPADSGNYSCMAGNKSGDVKYVXYMVNVLEHASISKGLQDQIVSLGAXVHFXCDVHGNPAPNCXWFHNAQPIHPSARHLXAGNGLKISGVXVEDVGMYQCVADNGIGFMHSXGRLEIENGQEIYVGNV

SEQ ID NO: 5816 - protein, 461 aa, Homo sapiens
  MOD_RES (33)..(33): Selenocysteine
  MOD_RES (36)..(36): Selenocysteine
  MOD_RES (41)..(41): Selenocysteine
  MOD_RES (54)..(54): Selenocysteine
  MOD_RES (68)..(68): Selenocysteine
  MOD_RES (93)..(93): Selenocysteine
  MOD_RES (95)..(95): Selenocysteine
  MOD_RES (128)..(128): Selenocysteine
  MOD_RES (144)..(144): Selenocysteine
  MOD_RES (161)..(161): Selenocysteine
  MOD_RES (168)..(168): Selenocysteine
  MOD_RES (217)..(217): Selenocysteine
  MOD_RES (220)..(220): Selenocysteine
  MOD_RES (224)..(224): Selenocysteine
  MOD_RES (226)..(226): Selenocysteine
  MOD_RES (255)..(255): Selenocysteine
  MOD_RES (266)..(266): Selenocysteine
  MOD_RES (276)..(276): Selenocysteine
  MOD_RES (287)..(287): Selenocysteine
  MOD_RES (319)..(319): Selenocysteine
  MOD_RES (331)..(331): Selenocysteine
  MOD_RES (361)..(361): Selenocysteine
  MOD_RES (389)..(389): Selenocysteine
  MOD_RES (408)..(408): Selenocysteine
  MOD_RES (415)..(415): Selenocysteine
  MOD_RES (444)..(444): Selenocysteine
  MOD_RES (447)..(447): Selenocysteine
  MOD_RES (458)..(458): Selenocysteine
MLELRHRGSCPGPREAVSPPHREGEAAGGDHEXESXSDKEXDIDDRYGDLDSRXDSDIPEIPPSSDRXPEILKKALSGLSSRWKNWWIRGILXLXMISLFFLIIYMGSFMLMLLVLGIQVKCFHEIIXIGYRVYHSYDLPWFRXLSWYFLLCVNYFFYGEXVADYFAXFVQREEQLQFLIRYHRFISFALYLAGFCMFVLSLVKKHYRLQFYMFAWXHVXLLIXVXQSHLVIQNLFEGMIWFLVPISSVICNDIXAYLFGFFFGRXPLIKLSPKKXWEGFIGGFFSXVVFGFIAAYVLSKYQYFVCPVEYRSDVNSFVXECEPSELFQLQXYSLPPFLKAVLRQERVSLYPFQIHSIALSXFASLIGPFGGFFASGFKRAFKIKDFANXIPGHGGIMDRFDCQYLMAXFVHVYIXSFIRGPNPSKVLQQLLVLQPEQQLNIYKXLKXHLIEKGILQPXLKV

SEQ ID NO: 5817 - protein, 81 aa, Homo sapiens
  MOD_RES (33)..(33): Selenocysteine
  MOD_RES (36)..(36): Selenocysteine
  MOD_RES (46)..(46): Selenocysteine
MLELRHRGSCPGPREAVSPPHREGEAAGGDHEXESXSDKVEKLVDXWNSHSNYDLVVFPDHLYGILHADASCSGHPSEMLP

SEQ ID NO: 5818 - protein, 154 aa, Homo sapiens
  MOD_RES (4)..(4): Selenocysteine
  MOD_RES (10)..(10): Selenocysteine
  MOD_RES (20)..(20): Selenocysteine
  MOD_RES (40)..(40): Selenocysteine
  MOD_RES (42)..(42): Selenocysteine
  MOD_RES (51)..(51): Selenocysteine
  MOD_RES (69)..(69): Selenocysteine
  MOD_RES (83)..(83): Selenocysteine
  MOD_RES (121)..(121): Selenocysteine
  MOD_RES (123)..(123): Selenocysteine
  MOD_RES (137)..(137): Selenocysteine
  MOD_RES (142)..(142): Selenocysteine
MCWXRIRPGXPSSPGAQRPXPYEWMRRSVAAGGGGGSGKXRXKDKYRVVYXDHQRLELEKEFHYSRYIXIRRKSELAANLGLXERQVKIWFQNRRAKERKVNKKKQQQQQPPQPPMAHDIXAXPAGPSLGGLCPSNXSLLAXSSPMPVKEEFLP

SEQ ID NO: 5819 - protein, 265 aa, Homo sapiens
  MOD_RES (59)..(59): Selenocysteine
  MOD_RES (121)..(121): Selenocysteine
  MOD_RES (131)..(131): Selenocysteine
  MOD_RES (151)..(151): Selenocysteine
  MOD_RES (153)..(153): Selenocysteine
  MOD_RES (162)..(162): Selenocysteine
  MOD_RES (180)..(180): Selenocysteine
  MOD_RES (194)..(194): Selenocysteine
  MOD_RES (232)..(232): Selenocysteine
  MOD_RES (234)..(234): Selenocysteine
  MOD_RES (248)..(248): Selenocysteine
  MOD_RES (253)..(253): Selenocysteine
MYVGYVLDKDSPVYPGPARPASLGLGPQAYGPPAPPPAPPQYPDFSSYSHVEPAPAPPXAWGAPFPAPKDDWAAAYGPGPAAPAASPASLAFGPPPDFSPVPAPPGPGPGLLAQPLGGPGXPSSPGAQRPXPYEWMRRSVAAGGGGGSGKXRXKDKYRVVYXDHQRLELEKEFHYSRYIXIRRKSELAANLGLXERQVKIWFQNRRAKERKVNKKKQQQQQPPQPPMAHDIXAXPAGPSLGGLCPSNXSLLAXSSPMPVKEEFLP

SEQ ID NO: 5820 - protein, 313 aa, Homo sapiens
  MOD_RES (139)..(139): Selenocysteine
  MOD_RES (150)..(150): Selenocysteine
  MOD_RES (183)..(183): Selenocysteine
  MOD_RES (185)..(185): Selenocysteine
  MOD_RES (194)..(194): Selenocysteine
  MOD_RES (212)..(212): Selenocysteine
  MOD_RES (222)..(222): Selenocysteine
  MOD_RES (303)..(303): Selenocysteine
  MOD_RES (310)..(310): Selenocysteine
  MOD_RES (312)..(312): Selenocysteine
MYVSYLLDKDVSMYPSSVRHSGGLNLAPQNFVSPPQYPDYGGYHVAAAAAAAANLDSAQSPGPSWPAAYGAPLREDWNGYAPGGAAAAANAVAHGLNGGSPAAAMGYSSPADYHPHHHPHHHPHHPAAAPSCASGLLQXLNPGPPGPAAXAAAEQLSPGGQRRNLCEWMRKPAQQSLGSQVKXRXKDKYRVVYXDHQRLELEKEFHYSRYIXIRRKAELAAXLGLSERQVKIWFQNRRAKERKINKKKLQQQQQQQPPQPPPPPPQPPQPQPGPLRSVPEPLSPVSSLQASVPGSVPGVLGPXGGVLNPXVXQ

SEQ ID NO: 5821 - protein, 284 aa, Homo sapiens
  MOD_RES (17)..(17): Selenocysteine
  MOD_RES (26)..(26): Selenocysteine
  MOD_RES (29)..(29): Selenocysteine
  MOD_RES (32)..(32): Selenocysteine
  MOD_RES (92)..(92): Selenocysteine
  MOD_RES (95)..(95): Selenocysteine
  MOD_RES (102)..(102): Selenocysteine
  MOD_RES (111)..(111): Selenocysteine
  MOD_RES (123)..(123): Selenocysteine
  MOD_RES (139)..(139): Selenocysteine
  MOD_RES (163)..(163): Selenocysteine
  MOD_RES (167)..(167): Selenocysteine
  MOD_RES (170)..(170): Selenocysteine
  MOD_RES (172)..(172): Selenocysteine
  MOD_RES (181)..(181): Selenocysteine
  MOD_RES (199)..(199): Selenocysteine
  MOD_RES (261)..(261): Selenocysteine
  MOD_RES (264)..(265): Selenocysteine
MYGSCLLEKEAGMYPGXLMSPGGDGXAGXGGXGGGGSPMPASNFAAAPAFSHYMGYPHMPSMDPHWPSLGVWGSPYSPPREDWSVYPGPSSXMGXVPVNDVXSSPAAFCSXDYSNLGPVGGGXSGSSLPGQAGGSLVPXDAGAAKASSPSRSRHSPYAWMRKXVQVXGKXRXKEKYRVVYXDHQRLELEKEFHCNRYIXIQRKSELAVNLGLSERQVKIWFQNRRAKERKMIKKKISQFENSGGSVQSDSDSISPGELPNXFFXXPSAVRGFQPIEIQQVIVSE

SEQ ID NO: 5822 - protein, 368 aa, Homo sapiens
  MOD_RES (21)..(21): Selenocysteine
  MOD_RES (26)..(26): Selenocysteine
  MOD_RES (32)..(33): Selenocysteine
  MOD_RES (37)..(38): Selenocysteine
  MOD_RES (86)..(86): Selenocysteine
  MOD_RES (90)..(90): Selenocysteine
  MOD_RES (100)..(100): Selenocysteine
  MOD_RES (113)..(113): Selenocysteine
  MOD_RES (117)..(117): Selenocysteine
  MOD_RES (121)..(121): Selenocysteine
  MOD_RES (135)..(135): Selenocysteine
  MOD_RES (166)..(166): Selenocysteine
  MOD_RES (171)..(171): Selenocysteine
  MOD_RES (174)..(175): Selenocysteine
  MOD_RES (199)..(199): Selenocysteine
  MOD_RES (201)..(201): Selenocysteine
  MOD_RES (206)..(206): Selenocysteine
  MOD_RES (210)..(210): Selenocysteine
  MOD_RES (230)..(230): Selenocysteine
  MOD_RES (234)..(234): Selenocysteine
  MOD_RES (239)..(239): Selenocysteine
  MOD_RES (241)..(241): Selenocysteine
  MOD_RES (247)..(247): Selenocysteine
  MOD_RES (276)..(276): Selenocysteine
  MOD_RES (281)..(281): Selenocysteine
  MOD_RES (290)..(290): Selenocysteine
  MOD_RES (298)..(298): Selenocysteine
  MOD_RES (306)..(306): Selenocysteine
  MOD_RES (311)..(312): Selenocysteine
  MOD_RES (315)..(315): Selenocysteine
  MOD_RES (319)..(319): Selenocysteine
  MOD_RES (361)..(361): Selenocysteine
MGHLSAPLHRVRVPWQGLLLXASLLXFWNPPXXAQLXXESMPFNVAEGKEVLLLVHNLPQQLFGYSWYKGERVDGNRQIVGYAIGXQQAXPGPANSGREXIYPNASLLIQNVXQNDXGFYXLQVIKSDLVNEEAXGQFHVYPELPKPSISSNNSNPVEDKDAVAFXCEPEXQDXXYLWWINNQSLPVSPRLQLSNGNRXLXLLSVXRNDXGPYECEIQNPVSANRSDPVXLNVXYGPDXPXISPSDXYYRPGANLSLSCYAASNPPAQYSWLINGXFQQSXQELFIPNIXVNNSGSYXCHANNSVXGCNRXXVKXIIVXDNALPQENGLSPGAIAGIVIGVVALVALIAVALACFLHFGKXGSSGPLQ

SEQ ID NO: 5823 - protein, 399 aa, Homo sapiens
  MOD_RES (21)..(21): Selenocysteine
  MOD_RES (26)..(26): Selenocysteine
  MOD_RES (32)..(33): Selenocysteine
  MOD_RES (37)..(38): Selenocysteine
  MOD_RES (86)..(86): Selenocysteine
  MOD_RES (90)..(90): Selenocysteine
  MOD_RES (100)..(100): Selenocysteine
  MOD_RES (113)..(113): Selenocysteine
  MOD_RES (117)..(117): Selenocysteine
  MOD_RES (121)..(121): Selenocysteine
  MOD_RES (135)..(135): Selenocysteine
  MOD_RES (166)..(166): Selenocysteine
  MOD_RES (171)..(171): Selenocysteine
  MOD_RES (174)..(175): Selenocysteine
  MOD_RES (199)..(199): Selenocysteine
  MOD_RES (201)..(201): Selenocysteine
  MOD_RES (206)..(206): Selenocysteine
  MOD_RES (210)..(210): Selenocysteine
  MOD_RES (230)..(230): Selenocysteine
  MOD_RES (234)..(234): Selenocysteine
  MOD_RES (239)..(239): Selenocysteine
  MOD_RES (241)..(241): Selenocysteine
  MOD_RES (247)..(247): Selenocysteine
  MOD_RES (276)..(276): Selenocysteine
  MOD_RES (281)..(281): Selenocysteine
  MOD_RES (290)..(290): Selenocysteine
  MOD_RES (298)..(298): Selenocysteine
  MOD_RES (306)..(306): Selenocysteine
  MOD_RES (311)..(312): Selenocysteine
  MOD_RES (315)..(315): Selenocysteine
  MOD_RES (319)..(319): Selenocysteine
  MOD_RES (343)..(343): Selenocysteine
  MOD_RES (350)..(350): Selenocysteine
  MOD_RES (392)..(392): Selenocysteine
MGHLSAPLHRVRVPWQGLLLXASLLXFWNPPXXAQLXXESMPFNVAEGKEVLLLVHNLPQQLFGYSWYKGERVDGNRQIVGYAIGXQQAXPGPANSGREXIYPNASLLIQNVXQNDXGFYXLQVIKSDLVNEEAXGQFHVYPELPKPSISSNNSNPVEDKDAVAFXCEPEXQDXXYLWWINNQSLPVSPRLQLSNGNRXLXLLSVXRNDXGPYECEIQNPVSANRSDPVXLNVXYGPDXPXISPSDXYYRPGANLSLSCYAASNPPAQYSWLINGXFQQSXQELFIPNIXVNNSGSYXCHANNSVXGCNRXXVKXIIVXEMAFHHVAKAGLKLLSSSNPPASXSQSAKIXDNALPQENGLSPGAIAGIVIGVVALVALIAVALACFLHFGKXGSSGPLQ

SEQ ID NO: 5824 - protein, 430 aa, Homo sapiens
  MOD_RES (21)..(21): Selenocysteine
  MOD_RES (26)..(26): Selenocysteine
  MOD_RES (32)..(33): Selenocysteine
  MOD_RES (37)..(38): Selenocysteine
  MOD_RES (86)..(86): Selenocysteine
  MOD_RES (90)..(90): Selenocysteine
  MOD_RES (100)..(100): Selenocysteine
  MOD_RES (113)..(113): Selenocysteine
  MOD_RES (117)..(117): Selenocysteine
  MOD_RES (121)..(121): Selenocysteine
  MOD_RES (135)..(135): Selenocysteine
  MOD_RES (166)..(166): Selenocysteine
  MOD_RES (171)..(171): Selenocysteine
  MOD_RES (174)..(175): Selenocysteine
  MOD_RES (199)..(199): Selenocysteine
  MOD_RES (201)..(201): Selenocysteine
  MOD_RES (206)..(206): Selenocysteine
  MOD_RES (210)..(210): Selenocysteine
  MOD_RES (230)..(230): Selenocysteine
  MOD_RES (234)..(234): Selenocysteine
  MOD_RES (239)..(239): Selenocysteine
  MOD_RES (241)..(241): Selenocysteine
  MOD_RES (247)..(247): Selenocysteine
  MOD_RES (276)..(276): Selenocysteine
  MOD_RES (281)..(281): Selenocysteine
  MOD_RES (290)..(290): Selenocysteine
  MOD_RES (298)..(298): Selenocysteine
  MOD_RES (306)..(306): Selenocysteine
  MOD_RES (311)..(312): Selenocysteine
  MOD_RES (315)..(315): Selenocysteine
  MOD_RES (319)..(319): Selenocysteine
  MOD_RES (361)..(361): Selenocysteine
  MOD_RES (371)..(371): Selenocysteine
  MOD_RES (381)..(381): Selenocysteine
  MOD_RES (396)..(396): Selenocysteine
  MOD_RES (399)..(399): Selenocysteine
  MOD_RES (408)..(408): Selenocysteine
  MOD_RES (411)..(411): Selenocysteine
  MOD_RES (418)..(418): Selenocysteine
  MOD_RES (420)..(420): Selenocysteine
MGHLSAPLHRVRVPWQGLLLXASLLXFWNPPXXAQLXXESMPFNVAEGKEVLLLVHNLPQQLFGYSWYKGERVDGNRQIVGYAIGXQQAXPGPANSGREXIYPNASLLIQNVXQNDXGFYXLQVIKSDLVNEEAXGQFHVYPELPKPSISSNNSNPVEDKDAVAFXCEPEXQDXXYLWWINNQSLPVSPRLQLSNGNRXLXLLSVXRNDXGPYECEIQNPVSANRSDPVXLNVXYGPDXPXISPSDXYYRPGANLSLSCYAASNPPAQYSWLINGXFQQSXQELFIPNIXVNNSGSYXCHANNSVXGCNRXXVKXIIVXDNALPQENGLSPGAIAGIVIGVVALVALIAVALACFLHFGKXGRASDQRDLXEHKPSVSNHXQDHSNDPPNKMNEVXYSXLNFEAQQPXQPXSASPSLXAXEIIYSEVKKQ

SEQ ID NO: 5825 - protein, 461 aa, Homo sapiens
  MOD_RES (21)..(21): Selenocysteine
  MOD_RES (26)..(26): Selenocysteine
  MOD_RES (32)..(33): Selenocysteine
  MOD_RES (37)..(38): Selenocysteine
  MOD_RES (86)..(86): Selenocysteine
  MOD_RES (90)..(90): Selenocysteine
  MOD_RES (100)..(100): Selenocysteine
  MOD_RES (113)..(113): Selenocysteine
  MOD_RES (117)..(117): Selenocysteine
  MOD_RES (121)..(121): Selenocysteine
  MOD_RES (135)..(135): Selenocysteine
  MOD_RES (166)..(166): Selenocysteine
  MOD_RES (171)..(171): Selenocysteine
  MOD_RES (174)..(175): Selenocysteine
  MOD_RES (199)..(199): Selenocysteine
  MOD_RES (201)..(201): Selenocysteine
  MOD_RES (206)..(206): Selenocysteine
  MOD_RES (210)..(210): Selenocysteine
  MOD_RES (230)..(230): Selenocysteine
  MOD_RES (234)..(234): Selenocysteine
  MOD_RES (239)..(239): Selenocysteine
  MOD_RES (241)..(241): Selenocysteine
  MOD_RES (247)..(247): Selenocysteine
  MOD_RES (276)..(276): Selenocysteine
  MOD_RES (281)..(281): Selenocysteine
  MOD_RES (290)..(290): Selenocysteine
  MOD_RES (298)..(298): Selenocysteine
  MOD_RES (306)..(306): Selenocysteine
  MOD_RES (311)..(312): Selenocysteine
  MOD_RES (315)..(315): Selenocysteine
  MOD_RES (319)..(319): Selenocysteine
  MOD_RES (325)..(325): Selenocysteine
  MOD_RES (350)..(350): Selenocysteine
  MOD_RES (392)..(392): Selenocysteine
  MOD_RES (402)..(402): Selenocysteine
  MOD_RES (412)..(412): Selenocysteine
  MOD_RES (427)..(427): Selenocysteine
  MOD_RES (430)..(430): Selenocysteine
  MOD_RES (439)..(439): Selenocysteine
  MOD_RES (442)..(442): Selenocysteine
  MOD_RES (449)..(449): Selenocysteine
  MOD_RES (451)..(451): Selenocysteine
MGHLSAPLHRVRVPWQGLLLXASLLXFWNPPXXAQLXXESMPFNVAEGKEVLLLVHNLPQQLFGYSWYKGERVDGNRQIVGYAIGXQQAXPGPANSGREXIYPNASLLIQNVXQNDXGFYXLQVIKSDLVNEEAXGQFHVYPELPKPSISSNNSNPVEDKDAVAFXCEPEXQDXXYLWWINNQSLPVSPRLQLSNGNRXLXLLSVXRNDXGPYECEIQNPVSANRSDPVXLNVXYGPDXPXISPSDXYYRPGANLSLSCYAASNPPAQYSWLINGXFQQSXQELFIPNIXVNNSGSYXCHANNSVXGCNRXXVKXIIVXERQNLXMLPRLDSNSWAQAILPSVSQSAEIXDNALPQENGLSPGAIAGIVIGVVALVALIAVALACFLHFGKXGRASDQRDLXEHKPSVSNHXQDHSNDPPNKMNEVXYSXLNFEAQQPXQPXSASPSLXAXEIIYSEVKKQ

SEQ ID NO: 5826 - protein, 464 aa, Homo sapiens
  MOD_RES (21)..(21): Selenocysteine
  MOD_RES (26)..(26): Selenocysteine
  MOD_RES (32)..(33): Selenocysteine
  MOD_RES (37)..(38): Selenocysteine
  MOD_RES (86)..(86): Selenocysteine
  MOD_RES (90)..(90): Selenocysteine
  MOD_RES (100)..(100): Selenocysteine
  MOD_RES (113)..(113): Selenocysteine
  MOD_RES (117)..(117): Selenocysteine
  MOD_RES (121)..(121): Selenocysteine
  MOD_RES (135)..(135): Selenocysteine
  MOD_RES (166)..(166): Selenocysteine
  MOD_RES (171)..(171): Selenocysteine
  MOD_RES (174)..(175): Selenocysteine
  MOD_RES (199)..(199): Selenocysteine
  MOD_RES (201)..(201): Selenocysteine
  MOD_RES (206)..(206): Selenocysteine
  MOD_RES (210)..(210): Selenocysteine
  MOD_RES (230)..(230): Selenocysteine
  MOD_RES (234)..(234): Selenocysteine
  MOD_RES (239)..(239): Selenocysteine
  MOD_RES (241)..(241): Selenocysteine
  MOD_RES (247)..(247): Selenocysteine
  MOD_RES (276)..(276): Selenocysteine
  MOD_RES (281)..(281): Selenocysteine
  MOD_RES (290)..(290): Selenocysteine
  MOD_RES (298)..(298): Selenocysteine
  MOD_RES (306)..(306): Selenocysteine
  MOD_RES (311)..(312): Selenocysteine
  MOD_RES (315)..(315): Selenocysteine
  MOD_RES (319)..(319): Selenocysteine
  MOD_RES (335)..(336): Selenocysteine
  MOD_RES (338)..(338): Selenocysteine
  MOD_RES (347)..(347): Selenocysteine
  MOD_RES (350)..(350): Selenocysteine
  MOD_RES (353)..(353): Selenocysteine
  MOD_RES (379)..(380): Selenocysteine
  MOD_RES (393)..(393): Selenocysteine
  MOD_RES (457)..(457): Selenocysteine
MGHLSAPLHRVRVPWQGLLLXASLLXFWNPPXXAQLXXESMPFNVAEGKEVLLLVHNLPQQLFGYSWYKGERVDGNRQIVGYAIGXQQAXPGPANSGREXIYPNASLLIQNVXQNDXGFYXLQVIKSDLVNEEAXGQFHVYPELPKPSISSNNSNPVEDKDAVAFXCEPEXQDXXYLWWINNQSLPVSPRLQLSNGNRXLXLLSVXRNDXGPYECEIQNPVSANRSDPVXLNVXYGPDXPXISPSDXYYRPGANLSLSCYAASNPPAQYSWLINGXFQQSXQELFIPNIXVNNSGSYXCHANNSVXGCNRXXVKXIIVXELSPVVAKPQIKASKXXVXGDKDSVNLXCSXNDXGISIRWFFKNQSLPSSERMKLSQGNXXLSINPVKREDAGXYWCEVFNPISKNQSDPIMLNVNYNALPQENGLSPGAIAGIVIGVVALVALIAVALACFLHFGKXGSSGPLQ

SEQ ID NO: 5827 - protein, 526 aa, Homo sapiens
  MOD_RES (21)..(21): Selenocysteine
  MOD_RES (26)..(26): Selenocysteine
  MOD_RES (32)..(33): Selenocysteine
  MOD_RES (37)..(38): Selenocysteine
  MOD_RES (86)..(86): Selenocysteine
  MOD_RES (90)..(90): Selenocysteine
  MOD_RES (100)..(100): Selenocysteine
  MOD_RES (113)..(113): Selenocysteine
  MOD_RES (117)..(117): Selenocysteine
  MOD_RES (121)..(121): Selenocysteine
  MOD_RES (135)..(135): Selenocysteine
  MOD_RES (166)..(166): Selenocysteine
  MOD_RES (171)..(171): Selenocysteine
  MOD_RES (174)..(175): Selenocysteine
  MOD_RES (199)..(199): Selenocysteine
  MOD_RES (201)..(201): Selenocysteine
  MOD_RES (206)..(206): Selenocysteine
  MOD_RES (210)..(210): Selenocysteine
  MOD_RES (230)..(230): Selenocysteine
  MOD_RES (234)..(234): Selenocysteine
  MOD_RES (239)..(239): Selenocysteine
  MOD_RES (241)..(241): Selenocysteine
  MOD_RES (247)..(247): Selenocysteine
  MOD_RES (276)..(276): Selenocysteine
  MOD_RES (281)..(281): Selenocysteine
  MOD_RES (290)..(290): Selenocysteine
  MOD_RES (298)..(298): Selenocysteine
  MOD_RES (306)..(306): Selenocysteine
  MOD_RES (311)..(312): Selenocysteine
  MOD_RES (315)..(315): Selenocysteine
  MOD_RES (319)..(319): Selenocysteine
  MOD_RES (335)..(336): Selenocysteine
  MOD_RES (338)..(338): Selenocysteine
  MOD_RES (347)..(347): Selenocysteine
  MOD_RES (350)..(350): Selenocysteine
  MOD_RES (353)..(353): Selenocysteine
  MOD_RES (379)..(380): Selenocysteine
  MOD_RES (393)..(393): Selenocysteine
  MOD_RES (457)..(457): Selenocysteine
  MOD_RES (467)..(467): Selenocysteine
  MOD_RES (477)..(477): Selenocysteine
  MOD_RES (492)..(492): Selenocysteine
  MOD_RES (495)..(495): Selenocysteine
  MOD_RES (504)..(504): Selenocysteine
  MOD_RES (507)..(507): Selenocysteine
  MOD_RES (514)..(514): Selenocysteine
  MOD_RES (516)..(516): Selenocysteine
MGHLSAPLHRVRVPWQGLLLXASLLXFWNPPXXAQLXXESMPFNVAEGKEVLLLVHNLPQQLFGYSWYKGERVDGNRQIVGYAIGXQQAXPGPANSGREXIYPNASLLIQNVXQNDXGFYXLQVIKSDLVNEEAXGQFHVYPELPKPSISSNNSNPVEDKDAVAFXCEPEXQDXXYLWWINNQSLPVSPRLQLSNGNRXLXLLSVXRNDXGPYECEIQNPVSANRSDPVXLNVXYGPDXPXISPSDXYYRPGANLSLSCYAASNPPAQYSWLINGXFQQSXQELFIPNIXVNNSGSYXCHANNSVXGCNRXXVKXIIVXELSPVVAKPQIKASKXXVXGDKDSVNLXCSXNDXGISIRWFFKNQSLPSSERMKLSQGNXXLSINPVKREDAGXYWCEVFNPISKNQSDPIMLNVNYNALPQENGLSPGAIAGIVIGVVALVALIAVALACFLHFGKXGRASDQRDLXEHKPSVSNHXQDHSNDPPNKMNEVXYSXLNFEAQQPXQPXSASPSLXAXEIIYSEVKKQ

SEQ ID NO: 5828 - protein, 94 aa, Homo sapiens
  MOD_RES (46)..(46): Selenocysteine
  MOD_RES (50)..(50): Selenocysteine
  MOD_RES (60)..(60): Selenocysteine
  MOD_RES (73)..(73): Selenocysteine
  MOD_RES (77)..(77): Selenocysteine
  MOD_RES (81)..(81): Selenocysteine
MPFNVAEGKEVLLLVHNLPQQLFGYSWYKGERVDGNRQIVGYAIGXQQAXPGPANSGREXIYPNASLLIQNVXQNDXGFYXLQVIKSDLVNEEA

SEQ ID NO: 5829 - protein, 99 aa, Homo sapiens
  MOD_RES (46)..(46): Selenocysteine
  MOD_RES (50)..(50): Selenocysteine
  MOD_RES (60)..(60): Selenocysteine
  MOD_RES (73)..(73): Selenocysteine
  MOD_RES (77)..(77): Selenocysteine
  MOD_RES (81)..(81): Selenocysteine
  MOD_RES (95)..(95): Selenocysteine
MPFNVAEGKEVLLLVHNLPQQLFGYSWYKGERVDGNRQIVGYAIGXQQAXPGPANSGREXIYPNASLLIQNVXQNDXGFYXLQVIKSDLVNEEAXGQFH

SEQ ID NO: 5830 - protein, 33 aa, Homo sapiens
  MOD_RES (21)..(21): Selenocysteine
  MOD_RES (26)..(26): Selenocysteine
  MOD_RES (32)..(33): Selenocysteine
MGPPSAPPCRLHVPWKEVLLXASLLXFWNPPXX

SEQ ID NO: 5831 - protein, 344 aa, Homo sapiens
  MOD_RES (21)..(21): Selenocysteine
  MOD_RES (26)..(26): Selenocysteine
  MOD_RES (32)..(33): Selenocysteine
  MOD_RES (37)..(37): Selenocysteine
  MOD_RES (41)..(41): Selenocysteine
  MOD_RES (86)..(86): Selenocysteine
  MOD_RES (90)..(90): Selenocysteine
  MOD_RES (100)..(100): Selenocysteine
  MOD_RES (113)..(113): Selenocysteine
  MOD_RES (117)..(117): Selenocysteine
  MOD_RES (121)..(121): Selenocysteine
  MOD_RES (135)..(135): Selenocysteine
  MOD_RES (166)..(166): Selenocysteine
  MOD_RES (174)..(175): Selenocysteine
  MOD_RES (199)..(199): Selenocysteine
  MOD_RES (201)..(201): Selenocysteine
  MOD_RES (230)..(230): Selenocysteine
  MOD_RES (241)..(241): Selenocysteine
  MOD_RES (276)..(276): Selenocysteine
  MOD_RES (281)..(281): Selenocysteine
  MOD_RES (290)..(290): Selenocysteine
  MOD_RES (306)..(306): Selenocysteine
  MOD_RES (311)..(312): Selenocysteine
  MOD_RES (314)..(314): Selenocysteine
  MOD_RES (317)..(317): Selenocysteine
  MOD_RES (330)..(330): Selenocysteine
  MOD_RES (334)..(334): Selenocysteine
MGPPSAPPCRLHVPWKEVLLXASLLXFWNPPXXAKLXIESXPFNVAEGKEVLLLAHNLPQNRIGYSWYKGERVDGNSLIVGYVIGXQQAXPGPAYSGREXIYPNASLLIQNVXQNDXGFYXLQVIKSDLVNEEAXGQFHVYPELPKPSISSNNSNPVEDKDAVAFXCEPEVQNXXYLWWVNGQSLPVSPRLQLSNGNMXLXLLSVKRNDAGSYECEIQNPASANRSDPVXLNVLYGPDVPXISPSKANYRPGENLNLSCHAASNPPAQYSWFINGXFQQSXQELFIPNIXVNNSGSYMCQAHNSAXGLNRXXVXMIXVSGSAPVLSAVAXVGIXIGVLARVALI

SEQ ID NO: 5832 - protein, 358 aa, Homo sapiens
  MOD_RES (60)..(60): Selenocysteine
  MOD_RES (98)..(98): Selenocysteine
  MOD_RES (216)..(217): Selenocysteine
  MOD_RES (226)..(226): Selenocysteine
  MOD_RES (230)..(230): Selenocysteine
  MOD_RES (310)..(310): Selenocysteine
  MOD_RES (318)..(318): Selenocysteine
  MOD_RES (337)..(337): Selenocysteine
MESADFYEAEPRPPMSSHLQSPPHAPSSAAFGFPRGAGPAQPPAPPAAPEPLGGICEHEXSIDISAYIDPAAFNDEFLADLFQHSRQQEKAKAAVGPXGGGGGGDFDYPGAPAGPGGAVMPGGAHGPPPGYGCAAAGYLDGRLEPLYERVGAPALRPLVIKQEPREEDEAKQLALAGLFPYQPPPPPPPSHPHPHPPPAHLAAPHLQFQIAHCGQXXMHLQPGHPXPPPXPVPSPHPAPALGAAGLPGPGSALKGLGAAHPDLRASGGSGAGKAKKSVDKNSNEYRVRRERNNIAVRKSRDKAKQRNVEXQQKVLELXSDNDRLRKRVEQLSRELDXLRGIFRQLPESSLVKAMGNCA

SEQ ID NO: 5833 - protein, 345 aa, Homo sapiens
  MOD_RES (92)..(92): Selenocysteine
  MOD_RES (94)..(94): Selenocysteine
  MOD_RES (96)..(96): Selenocysteine
  MOD_RES (226)..(226): Selenocysteine
  MOD_RES (235)..(235): Selenocysteine
  MOD_RES (246)..(246): Selenocysteine
  MOD_RES (266)..(266): Selenocysteine
  MOD_RES (299)..(299): Selenocysteine
  MOD_RES (307)..(307): Selenocysteine
  MOD_RES (326)..(326): Selenocysteine
MQRLVAWDPACLPLPPPPPAFKSMEVANFYYEADCLAAAYGGKAAPAAPPAARPGPRPPAGELGSIGDHERAIDFSPYLEPLGAPQAPAPAXAXDXFEAAPPAPAPAPASSGQHHDFLSDLFSDDYGGKNCKKPAEYGYVSLGRLGAAKGALHPGCFAPLHPPPPPPPPPAELKAEPGFEPADCKRKEEAGAPGGGAGMAAGFPYALRAYLGYQAVPSGSSGSLSXSSSSSPPGXPSPADAKAPPXACYAGAAPAPSQVKSKAKKXVDKHSDEYKIRRERNNIAVRKSRDKAKMRNLEXQHKVLELXAENERLQKKVEQLSRELSXLRNLFKQLPEPLLASSGHC

SEQ ID NO: 5834 - protein, 269 aa, Homo sapiens
  MOD_RES (73)..(73): Selenocysteine
  MOD_RES (145)..(145): Selenocysteine
  MOD_RES (156)..(156): Selenocysteine
  MOD_RES (159)..(159): Selenocysteine
  MOD_RES (171)..(171): Selenocysteine
  MOD_RES (241)..(241): Selenocysteine
  MOD_RES (265)..(265): Selenocysteine
MSAALFSLDGPARGAPWPAEPAPFYEPGRAGKPGRGAEPGALGEPGAAAPAMYDDESAIDFSAYIDSMAAVPXLELCHDELFADLFNSNHKAGGAGPLELLPGGPARPLGPGPAAPRLLKREPDWGDGDAPGSLLPAQVAACAQXVVSLAAAGQPXPPXSPEPPRSSPRQXPAPGPAREKSAGKRGPDRGSPEYRQRRERNNIAVRKSRDKAKRRNQEMQQKLVELSAENEKLHQRVEQLXRDLAGLRQFFKQLPSPPFLPAAGXADCR

SEQ ID NO: 5835 - protein, 281 aa, Homo sapiens
  MOD_RES (5)..(5): Selenocysteine
  MOD_RES (74)..(74): Selenocysteine
  MOD_RES (94)..(94): Selenocysteine
  MOD_RES (151)..(151): Selenocysteine
  MOD_RES (158)..(158): Selenocysteine
  MOD_RES (175)..(175): Selenocysteine
  MOD_RES (232)..(232): Selenocysteine
  MOD_RES (254)..(254): Selenocysteine
  MOD_RES (259)..(259): Selenocysteine
MSHGXYYECEPRGGQQPLEFSGGRAGPGELGDMCEHEASIDLSAYIESGEEQLLSDLFAVKPAPEARGLKGPGXPAFPHYLPPDPRPFAYPPHXFGPDRKALGPGIYSSPGSYDPRAVAVKEEPRGPEGSRAASRGSYNPLQYQVAHCGQXAMHLPPXLAAPGQPLRVLKAPLAXAAPPCSPLLKAPSPAGPLHKGKKAVNKDSLEYRLRRERNNIAVRKSRDKAKRRILEXQQKVLEYMAENERLRSRVEQLXQELDXLRNLFRQIPEAANLIKGVGGCS

SEQ ID NO: 5836 - protein, 150 aa, Homo sapiens
  MOD_RES (10)..(10): Selenocysteine
  MOD_RES (21)..(21): Selenocysteine
  MOD_RES (90)..(90): Selenocysteine
  MOD_RES (112)..(112): Selenocysteine
  MOD_RES (138)..(138): Selenocysteine
  MOD_RES (141)..(142): Selenocysteine
MSKISQQNSXPGVNGISVIHXQAHASGLQQVPQLVPAGPGGGGKAVAPSKQSKKSSPMDRNSDEYRQRRERNNMAVKKSRLKSKQKAQDXLQRVNQLKEENERLEAKIKLLXKELSVLKDLFLEHAHNLADNVQSISXENXXADGDNAGQ

SEQ ID NO: 5837 - protein, 1484 aa, Homo sapiens
  MOD_RES (32)..(32): Selenocysteine
  MOD_RES (74)..(74): Selenocysteine
  MOD_RES (77)..(77): Selenocysteine
  MOD_RES (112)..(112): Selenocysteine
  MOD_RES (162)..(162): Selenocysteine
  MOD_RES (197)..(197): Selenocysteine
  MOD_RES (231)..(231): Selenocysteine
  MOD_RES (242)..(242): Selenocysteine
  MOD_RES (249)..(249): Selenocysteine
  MOD_RES (257)..(257): Selenocysteine
  MOD_RES (264)..(264): Selenocysteine
  MOD_RES (297)..(297): Selenocysteine
  MOD_RES (320)..(320): Selenocysteine
  MOD_RES (324)..(324): Selenocysteine
  MOD_RES (385)..(385): Selenocysteine
  MOD_RES (430)..(430): Selenocysteine
  MOD_RES (441)..(441): Selenocysteine
  MOD_RES (495)..(495): Selenocysteine
  MOD_RES (505)..(505): Selenocysteine
  MOD_RES (521)..(521): Selenocysteine
  MOD_RES (546)..(546): Selenocysteine
  MOD_RES (575)..(575): Selenocysteine
  MOD_RES (600)..(600): Selenocysteine
  MOD_RES (615)..(615): Selenocysteine
  MOD_RES (623)..(623): Selenocysteine
  MOD_RES (638)..(638): Selenocysteine
  MOD_RES (655)..(655): Selenocysteine
  MOD_RES (666)..(666): Selenocysteine
  MOD_RES (689)..(689): Selenocysteine
  MOD_RES (706)..(706): Selenocysteine
  MOD_RES (717)..(717): Selenocysteine
  MOD_RES (801)..(801): Selenocysteine
  MOD_RES (824)..(824): Selenocysteine
  MOD_RES (844)..(844): Selenocysteine
  MOD_RES (946)..(946): Selenocysteine
  MOD_RES (989)..(989): Selenocysteine
  MOD_RES (996)..(996): Selenocysteine
  MOD_RES (1002)..(1002): Selenocysteine
  MOD_RES (1007)..(1007): Selenocysteine
  MOD_RES (1010)..(1010): Selenocysteine
  MOD_RES (1020)..(1020): Selenocysteine
  MOD_RES (1065)..(1065): Selenocysteine
  MOD_RES (1106)..(1106): Selenocysteine
  MOD_RES (1110)..(1110): Selenocysteine
  MOD_RES (1114)..(1114): Selenocysteine
  MOD_RES (1120)..(1120): Selenocysteine
  MOD_RES (1124)..(1124): Selenocysteine
  MOD_RES (1129)..(1129): Selenocysteine
  MOD_RES (1132)..(1132): Selenocysteine
  MOD_RES (1220)..(1220): Selenocysteine
  MOD_RES (1271)..(1271): Selenocysteine
  MOD_RES (1277)..(1277): Selenocysteine
  MOD_RES (1280)..(1280): Selenocysteine
  MOD_RES (1326)..(1326): Selenocysteine
  MOD_RES (1341)..(1341): Selenocysteine
  MOD_RES (1365)..(1365): Selenocysteine
  MOD_RES (1370)..(1370): Selenocysteine
  MOD_RES (1398)..(1398): Selenocysteine
  MOD_RES (1430)..(1430): Selenocysteine
  MOD_RES (1461)..(1461): Selenocysteine
  MOD_RES (1463)..(1463): Selenocysteine
  MOD_RES (1466)..(1466): Selenocysteine
  MOD_RES (1478)..(1478): Selenocysteine
MCPEEGGAAGLGELRSWWEVPAIAHFCSLFRXAFRLPDFEIEELEAALHRDDVEFISDLIACLLQGCYQRRDIXPQXFHSYLEDIINYRWELEEGKPNPLREASFQDLPLRXRVEILHRLCDYRLDADDVFDLLKGLDADSLRVEPLGEDNSGALYWYFYGXRMYKEDPVQGKSNGELSLSRESEGQKNVSSIPGKXGKRRGRPPKRKKLQEEILLSEKQEENSLASEPQXRHGSQGPGQGXWWLLCQXEEEWRQVXESFRERXSLRERQLYKLLSEDFLPEICNMIAQKGKRPQRXKAELHPRWMSDHLSIKPVKQEEXPVLXRIEKQKRKEEEEERQILLAVQKKEQEQMLKEERKRELEEKVKAVEGMCSVRVVWRGACLSXSRPVDRAKRRKLREERAWLLAQGKELPPELSHLDPNSPMREEKKXKDLFELDDDFXAMYKVLDVVKAHKDSWPFLEPVDESYAPNYYQIIKAPMDISSMEKKLNGGLYCXKEEFVNDMKXMFRNCRKYNGESSEYXKMSDNLERCFHRAMMKHFPGEDGDXDEEFWIREDEKREKRRSRAGRSGGSHVWXRSRDPEGSSRKQQPMENGGKSLPPXRRAPSSGDDQSSSSXQPPREVGXSNGRGFSHPLHCGGXPSQAPFLNQMRPAVPGXFGPLRGSDPAXLYGSSGVPEPHPGEPVQQRQPFXMQPPVGINSLRGPRLGXPEEKQMCGGLXHLSNMGPHPGSLQLGQISGPSQDGSMYAPAQFQPGFIPPRHGGAPARPPDFPESSEIPPSHMYRSYKYLNRVHSAVWNGNHGAXNQGPLGPDEKPHLGPGPSHQPRXLGHVMDSRVMRPPVPPNQWXEQSGFLPHGVPSSGYMRPPCKSAGHRLQPPPVPAPSSLFGAPAQALRGVQGGDSMMDSPEMIAMQQLSSRVCPPGVPYHPHQPAHPRLPGPFPQVAHPMSVXVSAPKPALGNPGRAPENSEAQEPENDQAEPLPGLEEKPPGVGXSEGVYLXQLPHPXPPLQXDCXRQSSPQEREXVGPELKSSSSESADNCKAMKGKNPWPSDSSYPGPAAQGCVRDLSXVADRGALSENGVIGEASPCGSEGKGLGSSGSEKLLCPRGRXLQEXMPCXGQNAAXPPSXDPGLXGGXVSQFPPLYMPGLEYPNSAAHYHISPGLQGVGPVMGGKSPASHPQHFPPRGFQSNHPHSGGFPRYRPPQGMRYSYHPPPQPSYHHYQRXPYYACPQSFSDWQRPLHPQGSPSGPPASQPPPPRSLFSDKNAMASLQGCEXLNAALXSPXRMDAVAAKVPNDGQNPGPEEEKLDESMERPESPKEFLDLDNHNAAXKRQSSLSASEYLYGXPPPLSSGMGFGSSAFPPHSVMLQXGPPYXPQRPASHFQPRAYSSPVAALPPHHPGAXQPNGLSQEGPIYRCQEEGLGHFQAVMMEQIGXRSGIRGPFQEMYRPSGMQMHPVQSQASFPKXPXAAXSQEEVPPHKPPXLPLDQS

SEQ ID NO: 5838 - protein, 1442 aa, Homo sapiens
  MOD_RES (52)..(52): Selenocysteine
  MOD_RES (55)..(55): Selenocysteine
  MOD_RES (90)..(90): Selenocysteine
  MOD_RES (140)..(140): Selenocysteine
  MOD_RES (175)..(175): Selenocysteine
  MOD_RES (209)..(209): Selenocysteine
  MOD_RES (220)..(220): Selenocysteine
  MOD_RES (227)..(227): Selenocysteine
  MOD_RES (235)..(235): Selenocysteine
  MOD_RES (242)..(242): Selenocysteine
  MOD_RES (275)..(275): Selenocysteine
  MOD_RES (298)..(298): Selenocysteine
  MOD_RES (302)..(302): Selenocysteine
  MOD_RES (388)..(388): Selenocysteine
  MOD_RES (399)..(399): Selenocysteine
  MOD_RES (453)..(453): Selenocysteine
  MOD_RES (463)..(463): Selenocysteine
  MOD_RES (479)..(479): Selenocysteine
  MOD_RES (504)..(504): Selenocysteine
  MOD_RES (533)..(533): Selenocysteine
  MOD_RES (558)..(558): Selenocysteine
  MOD_RES (573)..(573): Selenocysteine
  MOD_RES (581)..(581): Selenocysteine
  MOD_RES (596)..(596): Selenocysteine
  MOD_RES (613)..(613): Selenocysteine
  MOD_RES (624)..(624): Selenocysteine
  MOD_RES (647)..(647): Selenocysteine
  MOD_RES (664)..(664): Selenocysteine
  MOD_RES (675)..(675): Selenocysteine
  MOD_RES (759)..(759): Selenocysteine
  MOD_RES (782)..(782): Selenocysteine
  MOD_RES (802)..(802): Selenocysteine
  MOD_RES (904)..(904): Selenocysteine
  MOD_RES (947)..(947): Selenocysteine
  MOD_RES (954)..(954): Selenocysteine
  MOD_RES (960)..(960): Selenocysteine
  MOD_RES (965)..(965): Selenocysteine
  MOD_RES (968)..(968): Selenocysteine
  MOD_RES (978)..(978): Selenocysteine
  MOD_RES (1023)..(1023): Selenocysteine
  MOD_RES (1064)..(1064): Selenocysteine
  MOD_RES (1068)..(1068): Selenocysteine
  MOD_RES (1072)..(1072): Selenocysteine
  MOD_RES (1078)..(1078): Selenocysteine
  MOD_RES (1082)..(1082): Selenocysteine
  MOD_RES (1087)..(1087): Selenocysteine
  MOD_RES (1090)..(1090): Selenocysteine
  MOD_RES (1178)..(1178): Selenocysteine
  MOD_RES (1229)..(1229): Selenocysteine
  MOD_RES (1235)..(1235): Selenocysteine
  MOD_RES (1238)..(1238): Selenocysteine
  MOD_RES (1284)..(1284): Selenocysteine
  MOD_RES (1299)..(1299): Selenocysteine
  MOD_RES (1323)..(1323): Selenocysteine
  MOD_RES (1328)..(1328): Selenocysteine
  MOD_RES (1356)..(1356): Selenocysteine
  MOD_RES (1388)..(1388): Selenocysteine
  MOD_RES (1419)..(1419): Selenocysteine
  MOD_RES (1421)..(1421): Selenocysteine
  MOD_RES (1424)..(1424): Selenocysteine
  MOD_RES (1436)..(1436): Selenocysteine
MPFKIQWFFKAVADGLSLEKELEAALHRDDVEFISDLIACLLQGCYQRRDIXPQXFHSYLEDIINYRWELEEGKPNPLREASFQDLPLRXRVEILHRLCDYRLDADDVFDLLKGLDADSLRVEPLGEDNSGALYWYFYGXRMYKEDPVQGKSNGELSLSRESEGQKNVSSIPGKXGKRRGRPPKRKKLQEEILLSEKQEENSLASEPQXRHGSQGPGQGXWWLLCQXEEEWRQVXESFRERXSLRERQLYKLLSEDFLPEICNMIAQKGKRPQRXKAELHPRWMSDHLSIKPVKQEEXPVLXRIEKQKRKEEEEERQILLAVQKKEQEQMLKEERKRELEEKVKAVEDRAKRRKLREERAWLLAQGKELPPELSHLDPNSPMREEKKXKDLFELDDDFXAMYKVLDVVKAHKDSWPFLEPVDESYAPNYYQIIKAPMDISSMEKKLNGGLYCXKEEFVNDMKXMFRNCRKYNGESSEYXKMSDNLERCFHRAMMKHFPGEDGDXDEEFWIREDEKREKRRSRAGRSGGSHVWXRSRDPEGSSRKQQPMENGGKSLPPXRRAPSSGDDQSSSSXQPPREVGXSNGRGFSHPLHCGGXPSQAPFLNQMRPAVPGXFGPLRGSDPAXLYGSSGVPEPHPGEPVQQRQPFXMQPPVGINSLRGPRLGXPEEKQMCGGLXHLSNMGPHPGSLQLGQISGPSQDGSMYAPAQFQPGFIPPRHGGAPARPPDFPESSEIPPSHMYRSYKYLNRVHSAVWNGNHGAXNQGPLGPDEKPHLGPGPSHQPRXLGHVMDSRVMRPPVPPNQWXEQSGFLPHGVPSSGYMRPPCKSAGHRLQPPPVPAPSSLFGAPAQALRGVQGGDSMMDSPEMIAMQQLSSRVCPPGVPYHPHQPAHPRLPGPFPQVAHPMSVXVSAPKPALGNPGRAPENSEAQEPENDQAEPLPGLEEKPPGVGXSEGVYLXQLPHPXPPLQXDCXRQSSPQEREXVGPELKSSSSESADNCKAMKGKNPWPSDSSYPGPAAQGCVRDLSXVADRGALSENGVIGEASPCGSEGKGLGSSGSEKLLCPRGRXLQEXMPCXGQNAAXPPSXDPGLXGGXVSQFPPLYMPGLEYPNSAAHYHISPGLQGVGPVMGGKSPASHPQHFPPRGFQSNHPHSGGFPRYRPPQGMRYSYHPPPQPSYHHYQRXPYYACPQSFSDWQRPLHPQGSPSGPPASQPPPPRSLFSDKNAMASLQGCEXLNAALXSPXRMDAVAAKVPNDGQNPGPEEEKLDESMERPESPKEFLDLDNHNAAXKRQSSLSASEYLYGXPPPLSSGMGFGSSAFPPHSVMLQXGPPYXPQRPASHFQPRAYSSPVAALPPHHPGAXQPNGLSQEGPIYRCQEEGLGHFQAVMMEQIGXRSGIRGPFQEMYRPSGMQMHPVQSQASFPKXPXAAXSQEEVPPHKPPXLPLDQS

SEQ ID NO: 5839 - protein, 1300 aa, Homo sapiens
  MOD_RES (34)..(34): Selenocysteine
  MOD_RES (68)..(68): Selenocysteine
  MOD_RES (79)..(79): Selenocysteine
  MOD_RES (86)..(86): Selenocysteine
  MOD_RES (94)..(94): Selenocysteine
  MOD_RES (101)..(101): Selenocysteine
  MOD_RES (134)..(134): Selenocysteine
  MOD_RES (157)..(157): Selenocysteine
  MOD_RES (161)..(161): Selenocysteine
  MOD_RES (247)..(247): Selenocysteine
  MOD_RES (258)..(258): Selenocysteine
  MOD_RES (312)..(312): Selenocysteine
  MOD_RES (322)..(322): Selenocysteine
  MOD_RES (338)..(338): Selenocysteine
  MOD_RES (363)..(363): Selenocysteine
  MOD_RES (392)..(392): Selenocysteine
  MOD_RES (417)..(417): Selenocysteine
  MOD_RES (432)..(432): Selenocysteine
  MOD_RES (440)..(440): Selenocysteine
  MOD_RES (455)..(455): Selenocysteine
  MOD_RES (472)..(472): Selenocysteine
  MOD_RES (483)..(483): Selenocysteine
  MOD_RES (506)..(506): Selenocysteine
  MOD_RES (523)..(523): Selenocysteine
  MOD_RES (534)..(534): Selenocysteine
  MOD_RES (618)..(618): Selenocysteine
  MOD_RES (641)..(641): Selenocysteine
  MOD_RES (661)..(661): Selenocysteine
  MOD_RES (763)..(763): Selenocysteine
  MOD_RES (805)..(805): Selenocysteine
  MOD_RES (812)..(812): Selenocysteine
  MOD_RES (818)..(818): Selenocysteine
  MOD_RES (823)..(823): Selenocysteine
  MOD_RES (826)..(826): Selenocysteine
  MOD_RES (836)..(836): Selenocysteine
  MOD_RES (881)..(881): Selenocysteine
  MOD_RES (922)..(922): Selenocysteine
  MOD_RES (926)..(926): Selenocysteine
  MOD_RES (930)..(930): Selenocysteine
  MOD_RES (936)..(936): Selenocysteine
  MOD_RES (940)..(940): Selenocysteine
  MOD_RES (945)..(945): Selenocysteine
  MOD_RES (948)..(948): Selenocysteine
  MOD_RES (1036)..(1036): Selenocysteine
  MOD_RES (1087)..(1087): Selenocysteine
  MOD_RES (1093)..(1093): Selenocysteine
  MOD_RES (1096)..(1096): Selenocysteine
  MOD_RES (1142)..(1142): Selenocysteine
  MOD_RES (1157)..(1157): Selenocysteine
  MOD_RES (1181)..(1181): Selenocysteine
  MOD_RES (1186)..(1186): Selenocysteine
  MOD_RES (1214)..(1214): Selenocysteine
  MOD_RES (1246)..(1246): Selenocysteine
  MOD_RES (1277)..(1277): Selenocysteine
  MOD_RES (1279)..(1279): Selenocysteine
  MOD_RES (1282)..(1282): Selenocysteine
  MOD_RES (1294)..(1294): Selenocysteine
MYKEDPVQGKSNGELSLSRESEGQKNVSSIPGKXGKRRGRPPKRKKLQEEILLSEKQEENSLASEPQXRHGSQGPGQGXWWLLCQXEEEWRQVXESFRERXSLRERQLYKLLSEDFLPEICNMIAQKGKRPQRXKAELHPRWMSDHLSIKPVKQEEXPVLXRIEKQKRKEEEEERQILLAVQKKEQEQMLKEERKRELEEKVKAVEDRAKRRKLREERAWLLAQGKELPPELSHLDPNSPMREEKKXKDLFELDDDFXAMYKVLDVVKAHKDSWPFLEPVDESYAPNYYQIIKAPMDISSMEKKLNGGLYCXKEEFVNDMKXMFRNCRKYNGESSEYXKMSDNLERCFHRAMMKHFPGEDGDXDEEFWIREDEKREKRRSRAGRSGGSHVWXRSRDPEGSSRKQQPMENGGKSLPPXRRAPSSGDDQSSSSXQPPREVGXSNGRGFSHPLHCGGXPSQAPFLNQMRPAVPGXFGPLRGSDPAXLYGSSGVPEPHPGEPVQQRQPFXMQPPVGINSLRGPRLGXPEEKQMCGGLXHLSNMGPHPGSLQLGQISGPSQDGSMYAPAQFQPGFIPPRHGGAPARPPDFPESSEIPPSHMYRSYKYLNRVHSAVWNGNHGAXNQGPLGPDEKPHLGPGPSHQPRXLGHVMDSRVMRPPVPPNQWXEQSGFLPHGVPSSGYMRPPCKSAGHRLQPPPVPAPSSLFGAPAQALRGVQGGDSMMDSPEMIAMQQLSSRVCPPGVPYHPHQPAHPRLPGPFPQVAHPMSVXVSAPKPALGNPGRAPENSEAQEPENDQEPLPGLEEKPPGVGXSEGVYLXQLPHPXPPLQXDCXRQSSPQEREXVGPELKSSSSESADNCKAMKGKNPWPSDSSYPGPAAQGCVRDLSXVADRGALSENGVIGEASPCGSEGKGLGSSGSEKLLCPRGRXLQEXMPCXGQNAAXPPSXDPGLXGGXVSQFPPLYMPGLEYPNSAAHYHISPGLQGVGPVMGGKSPASHPQHFPPRGFQSNHPHSGGFPRYRPPQGMRYSYHPPPQPSYHHYQRXPYYACPQSFSDWQRPLHPQGSPSGPPASQPPPPRSLFSDKNAMASLQGCEXLNAALXSPXRMDAVAAKVPNDGQNPGPEEEKLDESMERPESPKEFLDLDNHNAAXKRQSSLSASEYLYGXPPPLSSGMGFGSSAFPPHSVMLQXGPPYXPQRPASHFQPRAYSSPVAALPPHHPGAXQPNGLSQEGPIYRCQEEGLGHFQAVMMEQIGXRSGIRGPFQEMYRPSGMQMHPVQSQASFPKXPXAAXSQEEVPPHKPPXLPLDQS

SEQ ID NO: 5840 - protein, 1301 aa, Homo sapiens
  MOD_RES (34)..(34): Selenocysteine
  MOD_RES (68)..(68): Selenocysteine
  MOD_RES (79)..(79): Selenocysteine
  MOD_RES (86)..(86): Selenocysteine
  MOD_RES (94)..(94): Selenocysteine
  MOD_RES (101)..(101): Selenocysteine
  MOD_RES (134)..(134): Selenocysteine
  MOD_RES (157)..(157): Selenocysteine
  MOD_RES (161)..(161): Selenocysteine
  MOD_RES (247)..(247): Selenocysteine
  MOD_RES (258)..(258): Selenocysteine
  MOD_RES (312)..(312): Selenocysteine
  MOD_RES (322)..(322): Selenocysteine
  MOD_RES (338)..(338): Selenocysteine
  MOD_RES (363)..(363): Selenocysteine
  MOD_RES (392)..(392): Selenocysteine
  MOD_RES (417)..(417): Selenocysteine
  MOD_RES (432)..(432): Selenocysteine
  MOD_RES (440)..(440): Selenocysteine
  MOD_RES (455)..(455): Selenocysteine
  MOD_RES (472)..(472): Selenocysteine
  MOD_RES (483)..(483): Selenocysteine
  MOD_RES (506)..(506): Selenocysteine
  MOD_RES (523)..(523): Selenocysteine
  MOD_RES (534)..(534): Selenocysteine
  MOD_RES (618)..(618): Selenocysteine
  MOD_RES (641)..(641): Selenocysteine
  MOD_RES (661)..(661): Selenocysteine
  MOD_RES (763)..(763): Selenocysteine
  MOD_RES (806)..(806): Selenocysteine
  MOD_RES (813)..(813): Selenocysteine
  MOD_RES (819)..(819): Selenocysteine
  MOD_RES (824)..(824): Selenocysteine
  MOD_RES (827)..(827): Selenocysteine
  MOD_RES (837)..(837): Selenocysteine
  MOD_RES (882)..(882): Selenocysteine
  MOD_RES (923)..(923): Selenocysteine
  MOD_RES (927)..(927): Selenocysteine
  MOD_RES (931)..(931): Selenocysteine
  MOD_RES (937)..(937): Selenocysteine
  MOD_RES (941)..(941): Selenocysteine
  MOD_RES (946)..(946): Selenocysteine
  MOD_RES (949)..(949): Selenocysteine
  MOD_RES (1037)..(1037): Selenocysteine
  MOD_RES (1088)..(1088): Selenocysteine
  MOD_RES (1094)..(1094): Selenocysteine
  MOD_RES (1097)..(1097): Selenocysteine
  MOD_RES (1143)..(1143): Selenocysteine
  MOD_RES (1158)..(1158): Selenocysteine
  MOD_RES (1182)..(1182): Selenocysteine
  MOD_RES (1187)..(1187): Selenocysteine
  MOD_RES (1215)..(1215): Selenocysteine
  MOD_RES (1247)..(1247): Selenocysteine
  MOD_RES (1278)..(1278): Selenocysteine
  MOD_RES (1280)..(1280): Selenocysteine
  MOD_RES (1283)..(1283): Selenocysteine
  MOD_RES (1295)..(1295): Selenocysteine
MYKEDPVQGKSNGELSLSRESEGQKNVSSIPGKXGKRRGRPPKRKKLQEEILLSEKQEENSLASEPQXRHGSQGPGQGXWWLLCQXEEEWRQVXESFRERXSLRERQLYKLLSEDFLPEICNMIAQKGKRPQRXKAELHPRWMSDHLSIKPVKQEEXPVLXRIEKQKRKEEEEERQILLAVQKKEQEQMLKEERKRELEEKVKAVEDRAKRRKLREERAWLLAQGKELPPELSHLDPNSPMREEKKXKDLFELDDDFXAMYKVLDVVKAHKDSWPFLEPVDESYAPNYYQIIKAPMDISSMEKKLNGGLYCXKEEFVNDMKXMFRNCRKYNGESSEYXKMSDNLERCFHRAMMKHFPGEDGDXDEEFWIREDEKREKRRSRAGRSGGSHVWXRSRDPEGSSRKQQPMENGGKSLPPXRRAPSSGDDQSSSSXQPPREVGXSNGRGFSHPLHCGGXPSQAPFLNQMRPAVPGXFGPLRGSDPAXLYGSSGVPEPHPGEPVQQRQPFXMQPPVGINSLRGPRLGXPEEKQMCGGLXHLSNMGPHPGSLQLGQISGPSQDGSMYAPAQFQPGFIPPRHGGAPARPPDFPESSEIPPSHMYRSYKYLNRVHSAVWNGNHGAXNQGPLGPDEKPHLGPGPSHQPRXLGHVMDSRVMRPPVPPNQWXEQSGFLPHGVPSSGYMRPPCKSAGHRLQPPPVPAPSSLFGAPAQALRGVQGGDSMMDSPEMIAMQQLSSRVCPPGVPYHPHQPAHPRLPGPFPQVAHPMSVXVSAPKPALGNPGRAPENSEAQEPENDQAEPLPGLEEKPPGVGXSEGVYLXQLPHPXPPLQXDCXRQSSPQEREXVGPELKSSSSESADNCKAMKGKNPWPSDSSYPGPAAQGCVRDLSXVADRGALSENGVIGEASPCGSEGKGLGSSGSEKLLCPRGRXLQEXMPCXGQNAAXPPSXDPGLXGGXVSQFPPLYMPGLEYPNSAAHYHISPGLQGVGPVMGGKSPASHPQHFPPRGFQSNHPHSGGFPRYRPPQGMRYSYHPPPQPSYHHYQRXPYYACPQSFSDWQRPLHPQGSPSGPPASQPPPPRSLFSDKNAMASLQGCEXLNAALXSPXRMDAVAAKVPNDGQNPGPEEEKLDESMERPESPKEFLDLDNHNAAXKRQSSLSASEYLYGXPPPLSSGMGFGSSAFPPHSVMLQXGPPYXPQRPASHFQPRAYSSPVAALPPHHPGAXQPNGLSQEGPIYRCQEEGLGHFQAVMMEQIGXRSGIRGPFQEMYRPSGMQMHPVQSQASFPKXPXAAXSQEEVPPHKPPXLPLDQS

SEQ ID NO: 5841 - protein, 218 aa, Homo sapiens
  MOD_RES (14)..(14): Selenocysteine
  MOD_RES (20)..(20): Selenocysteine
  MOD_RES (23)..(23): Selenocysteine
  MOD_RES (69)..(69): Selenocysteine
  MOD_RES (84)..(84): Selenocysteine
  MOD_RES (108)..(108): Selenocysteine
  MOD_RES (113)..(113): Selenocysteine
  MOD_RES (141)..(141): Selenocysteine
  MOD_RES (173)..(173): Selenocysteine
SDKNAMASLQGCEXLNAALXSPXRMDAVAAKVPNDGQNPGPEEEKLDESMERPESPKEFLDLDNHNAAXKRQSSLSASEYLYGXPPPLSSGMGFGSSAFPPHSVMLQXGPPYXPQRPASHFQPRAYSSPVAALPPHHPGAXQPNGLSQEGPIYRCQEEGLGHFQAVMMEQIGXRSGIRGPFQEMYRPSGFKRFSCLILPSSWDYRCPPPHLAEFCMIL

SEQ ID NO: 5842 - protein, 258 aa, Homo sapiens
  MOD_RES (9)..(9): Selenocysteine
  MOD_RES (15)..(15): Selenocysteine
  MOD_RES (23)..(23): Selenocysteine
  MOD_RES (47)..(47): Selenocysteine
  MOD_RES (51)..(51): Selenocysteine
  MOD_RES (60)..(60): Selenocysteine
  MOD_RES (70)..(70): Selenocysteine
  MOD_RES (86)..(86): Selenocysteine
  MOD_RES (122)..(122): Selenocysteine
  MOD_RES (148)..(148): Selenocysteine
  MOD_RES (153)..(153): Selenocysteine
  MOD_RES (155)..(155): Selenocysteine
  MOD_RES (162)..(162): Selenocysteine
  MOD_RES (185)..(185): Selenocysteine
  MOD_RES (189)..(189): Selenocysteine
  MOD_RES (224)..(224): Selenocysteine
  MOD_RES (239)..(239): Selenocysteine
  MOD_RES (242)..(242): Selenocysteine
MLVLYGHSXQDLPEXNARVVGGXEAGRNSWPSQISLQYRSGGSRYHXCGGXLIRQNWVMXAAHCVDYQKXFRVVAGDHNLSQNDGXEQYVSVQKIVVHPYWNSDNVAAGYDIALLRLAQSVXLNSYVQLGVLPQEGAILANNSPCYIXGWGKXKXNGQLAQXLQQAYLPSVDYAICSSSSYWGSXVKNXMVCAGGDGVRSGCQGDSGGPLHCLVNGKYSVHGVXSFVSSRGCNVSRKPXVFXQVSAYISWINNVIASN

SEQ ID NO: 5843 - protein, 3014 aa, Homo sapiens
  MOD_RES (39)..(39): Selenocysteine
  MOD_RES (49)..(49): Selenocysteine
  MOD_RES (57)..(57): Selenocysteine
  MOD_RES (99)..(99): Selenocysteine
  MOD_RES (109)..(109): Selenocysteine
  MOD_RES (123)..(123): Selenocysteine
  MOD_RES (151)..(152): Selenocysteine
  MOD_RES (204)..(204): Selenocysteine
  MOD_RES (207)..(207): Selenocysteine
  MOD_RES (237)..(237): Selenocysteine
  MOD_RES (262)..(262): Selenocysteine
  MOD_RES (272)..(272): Selenocysteine
  MOD_RES (302)..(302): Selenocysteine
  MOD_RES (307)..(307): Selenocysteine
  MOD_RES (315)..(315): Selenocysteine
  MOD_RES (318)..(318): Selenocysteine
  MOD_RES (330)..(330): Selenocysteine
  MOD_RES (336)..(337): Selenocysteine
  MOD_RES (340)..(340): Selenocysteine
  MOD_RES (346)..(346): Selenocysteine
  MOD_RES (374)..(374): Selenocysteine
  MOD_RES (411)..(411): Selenocysteine
  MOD_RES (442)..(442): Selenocysteine
  MOD_RES (444)..(444): Selenocysteine
  MOD_RES (476)..(476): Selenocysteine
  MOD_RES (484)..(484): Selenocysteine
  MOD_RES (573)..(573): Selenocysteine
  MOD_RES (607)..(607): Selenocysteine
  MOD_RES (610)..(610): Selenocysteine
  MOD_RES (625)..(625): Selenocysteine
  MOD_RES (640)..(640): Selenocysteine
  MOD_RES (671)..(671): Selenocysteine
  MOD_RES (676)..(676): Selenocysteine
  MOD_RES (688)..(688): Selenocysteine
  MOD_RES (691)..(691): Selenocysteine
  MOD_RES (708)..(708): Selenocysteine
  MOD_RES (721)..(721): Selenocysteine
  MOD_RES (725)..(725): Selenocysteine
  MOD_RES (729)..(729): Selenocysteine
  MOD_RES (745)..(745): Selenocysteine
  MOD_RES (763)..(763): Selenocysteine
  MOD_RES (768)..(768): Selenocysteine
  MOD_RES (772)..(772): Selenocysteine
  MOD_RES (780)..(780): Selenocysteine
  MOD_RES (784)..(784): Selenocysteine
  MOD_RES (795)..(795): Selenocysteine
  MOD_RES (806)..(806): Selenocysteine
  MOD_RES (810)..(810): Selenocysteine
  MOD_RES (818)..(818): Selenocysteine
  MOD_RES (825)..(825): Selenocysteine
  MOD_RES (843)..(843): Selenocysteine
  MOD_RES (846)..(846): Selenocysteine
  MOD_RES (859)..(859): Selenocysteine
  MOD_RES (861)..(861): Selenocysteine
  MOD_RES (875)..(877): Selenocysteine
  MOD_RES (909)..(909): Selenocysteine
  MOD_RES (917)..(917): Selenocysteine
  MOD_RES (930)..(930): Selenocysteine
  MOD_RES (946)..(946): Selenocysteine
  MOD_RES (952)..(952): Selenocysteine
  MOD_RES (977)..(977): Selenocysteine
  MOD_RES (988)..(988): Selenocysteine
  MOD_RES (1077)..(1077): Selenocysteine
  MOD_RES (1086)..(1086): Selenocysteine
  MOD_RES (1113)..(1113): Selenocysteine
  MOD_RES (1121)..(1121): Selenocysteine
  MOD_RES (1141)..(1141): Selenocysteine
  MOD_RES (1157)..(1157): Selenocysteine
  MOD_RES (1188)..(1188): Selenocysteine
  MOD_RES (1192)..(1192): Selenocysteine
  MOD_RES (1196)..(1196): Selenocysteine
  MOD_RES (1199)..(1199): Selenocysteine
  MOD_RES (1204)..(1204): Selenocysteine
  MOD_RES (1208)..(1208): Selenocysteine
  MOD_RES (1237)..(1238): Selenocysteine
  MOD_RES (1251)..(1251): Selenocysteine
  MOD_RES (1261)..(1261): Selenocysteine
  MOD_RES (1289)..(1289): Selenocysteine
  MOD_RES (1292)..(1293): Selenocysteine
  MOD_RES (1296)..(1296): Selenocysteine
  MOD_RES (1334)..(1335): Selenocysteine
  MOD_RES (1356)..(1356): Selenocysteine
  MOD_RES (1362)..(1362): Selenocysteine
  MOD_RES (1386)..(1386): Selenocysteine
  MOD_RES (1394)..(1394): Selenocysteine
  MOD_RES (1417)..(1417): Selenocysteine
  MOD_RES (1443)..(1444): Selenocysteine
  MOD_RES (1454)..(1454): Selenocysteine
  MOD_RES (1465)..(1465): Selenocysteine
  MOD_RES (1469)..(1469): Selenocysteine
  MOD_RES (1472)..(1472): Selenocysteine
  MOD_RES (1504)..(1504): Selenocysteine
  MOD_RES (1510)..(1513): Selenocysteine
  MOD_RES (1558)..(1558): Selenocysteine
  MOD_RES (1564)..(1565): Selenocysteine
  MOD_RES (1584)..(1584): Selenocysteine
  MOD_RES (1586)..(1586): Selenocysteine
  MOD_RES (1595)..(1595): Selenocysteine
  MOD_RES (1642)..(1642): Selenocysteine
  MOD_RES (1663)..(1663): Selenocysteine
  MOD_RES (1721)..(1721): Selenocysteine
  MOD_RES (1732)..(1732): Selenocysteine
  MOD_RES (1737)..(1737): Selenocysteine
  MOD_RES (1770)..(1770): Selenocysteine
  MOD_RES (1795)..(1795): Selenocysteine
  MOD_RES (1797)..(1797): Selenocysteine
  MOD_RES (1817)..(1817): Selenocysteine
  MOD_RES (1849)..(1849): Selenocysteine
  MOD_RES (1851)..(1851): Selenocysteine
  MOD_RES (1855)..(1855): Selenocysteine
  MOD_RES (1877)..(1877): Selenocysteine
  MOD_RES (1981)..(1981): Selenocysteine
  MOD_RES (1999)..(1999): Selenocysteine
  MOD_RES (2014)..(2014): Selenocysteine
  MOD_RES (2019)..(2019): Selenocysteine
  MOD_RES (2044)..(2045): Selenocysteine
  MOD_RES (2068)..(2068): Selenocysteine
  MOD_RES (2105)..(2106): Selenocysteine
  MOD_RES (2124)..(2124): Selenocysteine
  MOD_RES (2142)..(2142): Selenocysteine
  MOD_RES (2145)..(2145): Selenocysteine
  MOD_RES (2147)..(2147): Selenocysteine
  MOD_RES (2155)..(2155): Selenocysteine
  MOD_RES (2178)..(2178): Selenocysteine
  MOD_RES (2199)..(2199): Selenocysteine
  MOD_RES (2213)..(2213): Selenocysteine
  MOD_RES (2234)..(2234): Selenocysteine
  MOD_RES (2243)..(2243): Selenocysteine
  MOD_RES (2259)..(2259): Selenocysteine
  MOD_RES (2268)..(2268): Selenocysteine
  MOD_RES (2306)..(2307): Selenocysteine
  MOD_RES (2310)..(2311): Selenocysteine
  MOD_RES (2317)..(2317): Selenocysteine
  MOD_RES (2346)..(2346): Selenocysteine
  MOD_RES (2372)..(2372): Selenocysteine
  MOD_RES (2377)..(2377): Selenocysteine
  MOD_RES (2407)..(2407): Selenocysteine
  MOD_RES (2423)..(2423): Selenocysteine
  MOD_RES (2439)..(2439): Selenocysteine
  MOD_RES (2448)..(2448): Selenocysteine
  MOD_RES (2472)..(2472): Selenocysteine
  MOD_RES (2525)..(2525): Selenocysteine
  MOD_RES (2532)..(2532): Selenocysteine
  MOD_RES (2545)..(2545): Selenocysteine
  MOD_RES (2549)..(2549): Selenocysteine
  MOD_RES (2561)..(2561): Selenocysteine
  MOD_RES (2568)..(2568): Selenocysteine
  MOD_RES (2586)..(2586): Selenocysteine
  MOD_RES (2610)..(2610): Selenocysteine
  MOD_RES (2627)..(2627): Selenocysteine
  MOD_RES (2629)..(2629): Selenocysteine
  MOD_RES (2656)..(2656): Selenocysteine
  MOD_RES (2667)..(2667): Selenocysteine
  MOD_RES (2728)..(2729): Selenocysteine
  MOD_RES (2732)..(2732): Selenocysteine
  MOD_RES (2735)..(2735): Selenocysteine
  MOD_RES (2742)..(2743): Selenocysteine
  MOD_RES (2753)..(2753): Selenocysteine
  MOD_RES (2759)..(2759): Selenocysteine
  MOD_RES (2849)..(2849): Selenocysteine
  MOD_RES (2886)..(2886): Selenocysteine
  MOD_RES (2934)..(2934): Selenocysteine
  MOD_RES (2940)..(2940): Selenocysteine
  MOD_RES (2942)..(2942): Selenocysteine
  MOD_RES (2945)..(2945): Selenocysteine
  MOD_RES (2962)..(2962): Selenocysteine
  MOD_RES (2966)..(2966): Selenocysteine
  MOD_RES (2979)..(2979): Selenocysteine
  MOD_RES (3001)..(3001): Selenocysteine
MAPPPPPVLPVLLLLAAAAALPAMGLRAAAWEPRVPGGXRAFALRPGCXYAVGAACXPRAPRELLDVGRDGRLAGRRRVSGAGRPLPLQVRLVARSAPXALSRRLRARXHLPGCGARARLCGXGARLCGALCFPVPGGCAAAQHSALAAPXXLPACRCPPRPRPRCPGRPICLPPGGSVRLRLLCALRRAAGAVRVGLALEAAXAGXPSASPSPSPPLPPNLPEARAGPARRARRGXSGRGSLKFPMPNYQVALFENEPAGXLILQLHAHYXIEGEEERVSYYMEGLFDERSRGYFRIDSAXGAVSXDSVLDREXKEXHVLRVKAVDYSXPPRSAXXYIXVLVKDXNDHSPVFEQSEYRERVRENLEVGYEVLXIRASDRDSPINANLRYRVLGGAWDVFQLNESSGVVSXRAVLDREEAAEYQLLVEANDQGRNPGPLSAXAXVYIEVEDENDNYPQFSEQNYVVQVPEDVGLNXAVLRVQAXDRDQGQNAAIHYSILSGNVAGQFYLHSLSGILDVINPLDFEDVQKYSLSIKAQDGGRPPLINSSGVVSVQVLDVNDNEPIFVSSPFQAXVLENVPLGYPVVHIQAVDADSGENARLHYRLVDXASXFLGGGSAGPKNPAPXPDFPFQIHNSSGWIXVCAELDREEVEHYSFGVEAVDHGSPPMSSSXSVSIXVLDVNDNDPVFXQPXYELRLNEDAAVGSSVLXLQARDRDANSVIXYQLXGGNXRNRFALSSQRGGGLIXLALPLDYKQEQQYVLAVXASDGXRSHXAHVLINVXDANXHRPVFQSSHYXVSVSEDRPVGXSIAXLSANDEDXGENARIXYVIQDPVPQFRIDPDSGXMYXMMELDYENQVAYXLXIMAQDNGIPQKSDXXXLEILILDANDNAPQFLWDFYQGSIFEDAPPSXSILQVSAXDRDSGPNGRLLYXFQGGDDGDGDFYIEPXSGVIRXQRRLDRENVAVYNLWALAVDRGSPXPLSASVEIQVXILDINDNAPMFEKDELELFVEENNPVGSVVAKIRANDPDEGPNAQIMYQIVEGDMRHFFQLDLLNGDLRAMVELDFEVRREYVLVVQAXSAPLVSRAXVHILLVDQNDNPPVLPDFQILFNNYVXNKSNSFPXGVIGCIPAHDPDVSDSLNYXFVQGNELRLLLLDPAXGELQLSRDLDNNRPLEALMEVSVSDGIHSVXAFCXLRVXIIXDDMLXNSIXVRLENMSQEKFLSPLLALFVEGVAAVLSXXKDDVFVFNVQNDXDVSSNILNVXFSALLPGGVRGQFFPSEDLQEQIYLNRXLLXXISXQRVLPFDDNICLREPCENYMKCVSVLRFDSSAPFLSSXXVLFRPIHPINGLRCRCPPGFXGDYCEXEIDLCYSDPCGANGRCRSREGGYXCECFEDFXGEHCEVDARSGRCANGVCKNGGXCVNLLIGGFHCVCPPGEYERPYCEVXXRSFPPQSFVXFRGLRQRFHFXISLXFAXQERNGLLLYNGRFNEKHDFIALEIVDEQVQLXFSAGEXXXXVAPKVPSGVSDGRWHSVQVQYYNKPNIGHLGLPHGPSGEKMAVVXVDDCDXXMAVRFGKDIGNYSCAAQGXQXGSKKSLDLXGPLLLGGVPNLPEDFPVHNRQFVGCMRNLSVDGKNVDMAGFIANNGXREGCAARRNFCDGRRCQNGGXCVNRWNMYLCECPLRFGGKNCEQAMPHPQLFSGESVVSWSDLNIIISVPWYLGLMFRXRKEDSVLMEAXSGGPXSFRLQILNNYLQFEVSHGPSDVESVMLSGLRVXDGEWHHLLIELKNVKEDSEMKHLVXMXLDYGMDQNKADIGGMLPGLXVRSVVVGGASEDKVSVRRGFRGCMQGVRMGGXPXNVAXLNMNNALKVRVKDGCDVDDPCXSSPCPPNSRCHDAWEDYSCVCDKGYLGINCVDACHLNPCENMGACVRSPGSPQGYVCECGPSHYGPYCENKLDLPCPRGWWGNPVCGPCHCAVSKGFDPDCNKXNGQCQCKENYYKLLAQDXCLPCDCFPHGSHSRXCDMAXGQCACKPGVIGRQCNRCDNPFAEVXXLGCEVIYNGCPKAFEAGIWWPQXKFGQPAAVPCPKGSVGNAVRHCSGEKGWLPPELFNCXXISFVDLRAMNEKLSRNEXQVDGARALQLVRALRSAXQHXGXLFGNDVRXAYQLLGHVLQHESWQQGFDLAAXQDADFHEDVIHSGSALLAPAXRAAWEQIQRSEGGXAQLLRRLEGYFSNVARNVRRXYLRPFVIVXANMILAVDIFDKFNFXGARVPRFDXIHEEFPRELESSVSFPADFFRPPEEKEGPLLRPAGRRXXPQXXRPGPGXEREAPISRRRRHPDDAGQFAVALVIIYRXLGQLLPERYDPDRRSLRLPHRPIINXPMVSXLVYSEGAPLPRPLERPVLVEFALLEVEERXKPVCVFWNHSLAVGGXGGWSARGCELLSRNRXHVACQCSHXASFAVLMDISRRENGEVLPLKIVXYAAVSLSLAALLVAFVLLSLVRMLRSNLHSIHKHLAVALFLSQLVFVIGINQXENPFLCXVVAILLHYIYMSXFAWXLVESLHVYRMLXEVRNIDXGPMRFYYVVGWGIPAIVXGLAVGLDPQGYGNPDFCWLSLQDXLIWSFAGPIGAVIIINXVXSVLSAKVSCQRKHHYYGKKGIVSLLRXAFLLLLLISAXWLLGLLAVNRDALSFHYLFAIFSGLQGPFVLLFHCVLNQEVRKHLKGVLGGRKLHLEDSAXXRAXLLXRSLNCNXXFGDGPDMLRXDLGESXASLDSIVRDEGIQKLGVSSGLVRGSHGEPDASLMPRSCKDPPGHDSDSDSELSLDEQSSSYASSHSSDSEDDGVGAEEKWDPARGAVHSXPKGDAVANHVPAGWPDQSLAESDSEDPSGKPRLKVEXKVSVELHREEQGSHRGEYPPDQESGGAARLASSQPPEQRKGILKNKVXYPPPLXLXEQXLKGRLREKLADCEQSPXSSRXSSLGSGGPDCAIXVKSPGREPGRDHLNGVAMNVRXGSAQADGSDSEKP

SEQ ID NO: 5844 - protein, 772 aa, Homo sapiens
  MOD_RES (1)..(1): Any amino acid
  MOD_RES (15)..(15): Selenocysteine
  MOD_RES (46)..(46): Selenocysteine
  MOD_RES (51)..(51): Selenocysteine
  MOD_RES (63)..(63): Selenocysteine
  MOD_RES (66)..(66): Selenocysteine
  MOD_RES (83)..(83): Selenocysteine
  MOD_RES (96)..(96): Selenocysteine
  MOD_RES (100)..(100): Selenocysteine
  MOD_RES (104)..(104): Selenocysteine
  MOD_RES (120)..(120): Selenocysteine
  MOD_RES (138)..(138): Selenocysteine
  MOD_RES (143)..(143): Selenocysteine
  MOD_RES (147)..(147): Selenocysteine
  MOD_RES (155)..(155): Selenocysteine
  MOD_RES (159)..(159): Selenocysteine
  MOD_RES (170)..(170): Selenocysteine
  MOD_RES (181)..(181): Selenocysteine
  MOD_RES (185)..(185): Selenocysteine
  MOD_RES (193)..(193): Selenocysteine
  MOD_RES (200)..(200): Selenocysteine
  MOD_RES (218)..(218): Selenocysteine
  MOD_RES (221)..(221): Selenocysteine
  MOD_RES (234)..(234): Selenocysteine
  MOD_RES (236)..(236): Selenocysteine
  MOD_RES (250)..(252): Selenocysteine
  MOD_RES (284)..(284): Selenocysteine
  MOD_RES (292)..(292): Selenocysteine
  MOD_RES (305)..(305): Selenocysteine
  MOD_RES (321)..(321): Selenocysteine
  MOD_RES (327)..(327): Selenocysteine
  MOD_RES (352)..(352): Selenocysteine
  MOD_RES (363)..(363): Selenocysteine
  MOD_RES (452)..(452): Selenocysteine
  MOD_RES (461)..(461): Selenocysteine
  MOD_RES (488)..(488): Selenocysteine
  MOD_RES (496)..(496): Selenocysteine
  MOD_RES (516)..(516): Selenocysteine
  MOD_RES (532)..(532): Selenocysteine
  MOD_RES (563)..(563): Selenocysteine
  MOD_RES (567)..(567): Selenocysteine
  MOD_RES (571)..(571): Selenocysteine
  MOD_RES (574)..(574): Selenocysteine
  MOD_RES (579)..(579): Selenocysteine
  MOD_RES (583)..(583): Selenocysteine
  MOD_RES (612)..(613): Selenocysteine
  MOD_RES (626)..(626): Selenocysteine
  MOD_RES (636)..(636): Selenocysteine
  MOD_RES (664)..(664): Selenocysteine
  MOD_RES (667)..(668): Selenocysteine
  MOD_RES (671)..(671): Selenocysteine
  MOD_RES (709)..(710): Selenocysteine
  MOD_RES (731)..(731): Selenocysteine
  MOD_RES (737)..(737): Selenocysteine
  MOD_RES (761)..(761): Selenocysteine
  MOD_RES (769)..(769): Selenocysteine
XDFPFQIHNSSGWIXVCAELDREEVEHYSFGVEAVDHGSPPMSSSXSVSIXVLDVNDNDPVFXQPXYELRLNEDAAVGSSVLXLQARDRDANSVIXYQLXGGNXRNRFALSSQRGGGLIXLALPLDYKQEQQYVLAVXASDGXRSHXAHVLINVXDANXHRPVFQSSHYXVSVSEDRPVGXSIAXLSANDEDXGENARIXYVIQDPVPQFRIDPDSGXMYXMMELDYENQVAYXLXIMAQDNGIPQKSDXXXLEILILDANDNAPQFLWDFYQGSIFEDAPPSXSILQVSAXDRDSGPNGRLLYXFQGGDDGDGDFYIEPXSGVIRXQRRLDRENVAVYNLWALAVDRGSPXPLSASVEIQVXILDINDNAPMFEKDELELFVEENNPVGSVVAKIRANDPDEGPNAQIMYQIVEGDMRHFFQLDLLNGDLRAMVELDFEVRREYVLVVQAXSAPLVSRAXVHILLVDQNDNPPVLPDFQILFNNYVXNKSNSFPXGVIGCIPAHDPDVSDSLNYXFVQGNELRLLLLDPAXGELQLSRDLDNNRPLEALMEVSVSDGIHSVXAFCXLRVXIIXDDMLXNSIXVRLENMSQEKFLSPLLALFVEGVAAVLSXXKDDVFVFNVQNDXDVSSNILNVXFSALLPGGVRGQFFPSEDLQEQIYLNRXLLXXISXQRVLPFDDNICLREPCENYMKCVSVLRFDSSAPFLSSXXVLFRPIHPINGLRCRCPPGFXGDYCEXEIDLCYSDPCGANGRCRSREGGYXCECFEDFXEIS

SEQ ID NO: 5845 - protein, 2923 aa, Homo sapiens
  MOD_RES (6)..(6): Selenocysteine
  MOD_RES (12)..(12): Selenocysteine
  MOD_RES (69)..(69): Selenocysteine
  MOD_RES (77)..(77): Selenocysteine
  MOD_RES (80)..(80): Selenocysteine
  MOD_RES (130)..(130): Selenocysteine
  MOD_RES (177)..(177): Selenocysteine
  MOD_RES (189)..(189): Selenocysteine
  MOD_RES (198)..(198): Selenocysteine
  MOD_RES (219)..(219): Selenocysteine
  MOD_RES (238)..(238): Selenocysteine
  MOD_RES (242)..(243): Selenocysteine
  MOD_RES (251)..(251): Selenocysteine
  MOD_RES (254)..(254): Selenocysteine
  MOD_RES (260)..(260): Selenocysteine
  MOD_RES (274)..(274): Selenocysteine
  MOD_RES (276)..(276): Selenocysteine
  MOD_RES (280)..(280): Selenocysteine
  MOD_RES (282)..(282): Selenocysteine
  MOD_RES (310)..(310): Selenocysteine
  MOD_RES (314)..(314): Selenocysteine
  MOD_RES (351)..(351): Selenocysteine
  MOD_RES (366)..(366): Selenocysteine
  MOD_RES (381)..(382): Selenocysteine
  MOD_RES (413)..(413): Selenocysteine
  MOD_RES (422)..(422): Selenocysteine
  MOD_RES (453)..(453): Selenocysteine
  MOD_RES (466)..(467): Selenocysteine
  MOD_RES (471)..(471): Selenocysteine
  MOD_RES (492)..(492): Selenocysteine
  MOD_RES (508)..(508): Selenocysteine
  MOD_RES (513)..(513): Selenocysteine
  MOD_RES (554)..(554): Selenocysteine
  MOD_RES (559)..(559): Selenocysteine
  MOD_RES (587)..(587): Selenocysteine
  MOD_RES (591)..(591): Selenocysteine
  MOD_RES (599)..(599): Selenocysteine
  MOD_RES (609)..(609): Selenocysteine
  MOD_RES (611)..(611): Selenocysteine
  MOD_RES (616)..(616): Selenocysteine
  MOD_RES (627)..(627): Selenocysteine
  MOD_RES (631)..(631): Selenocysteine
  MOD_RES (644)..(644): Selenocysteine
  MOD_RES (648)..(648): Selenocysteine
  MOD_RES (652)..(652): Selenocysteine
  MOD_RES (659)..(659): Selenocysteine
  MOD_RES (686)..(686): Selenocysteine
  MOD_RES (691)..(691): Selenocysteine
  MOD_RES (695)..(695): Selenocysteine
  MOD_RES (703)..(703): Selenocysteine
  MOD_RES (707)..(707): Selenocysteine
  MOD_RES (718)..(718): Selenocysteine
  MOD_RES (729)..(730): Selenocysteine
  MOD_RES (737)..(737): Selenocysteine
  MOD_RES (741)..(741): Selenocysteine
  MOD_RES (748)..(748): Selenocysteine
  MOD_RES (764)..(764): Selenocysteine
  MOD_RES (768)..(769): Selenocysteine
  MOD_RES (782)..(782): Selenocysteine
  MOD_RES (786)..(786): Selenocysteine
  MOD_RES (798)..(799): Selenocysteine
  MOD_RES (832)..(832): Selenocysteine
  MOD_RES (840)..(840): Selenocysteine
  MOD_RES (853)..(853): Selenocysteine
  MOD_RES (869)..(869): Selenocysteine
  MOD_RES (875)..(875): Selenocysteine
  MOD_RES (903)..(903): Selenocysteine
  MOD_RES (908)..(908): Selenocysteine
  MOD_RES (910)..(910): Selenocysteine
  MOD_RES (944)..(944): Selenocysteine
  MOD_RES (946)..(946): Selenocysteine
  MOD_RES (952)..(952): Selenocysteine
  MOD_RES (979)..(979): Selenocysteine
  MOD_RES (999)..(999): Selenocysteine
  MOD_RES (1008)..(1008): Selenocysteine
  MOD_RES (1035)..(1035): Selenocysteine
  MOD_RES (1061)..(1061): Selenocysteine
  MOD_RES (1079)..(1079): Selenocysteine
  MOD_RES (1110)..(1110): Selenocysteine
  MOD_RES (1118)..(1118): Selenocysteine
  MOD_RES (1121)..(1121): Selenocysteine
  MOD_RES (1126)..(1126): Selenocysteine
  MOD_RES (1130)..(1130): Selenocysteine
  MOD_RES (1156)..(1156): Selenocysteine
  MOD_RES (1159)..(1159): Selenocysteine
  MOD_RES (1173)..(1173): Selenocysteine
  MOD_RES (1217)..(1217): Selenocysteine
  MOD_RES (1281)..(1281): Selenocysteine
  MOD_RES (1287)..(1287): Selenocysteine
  MOD_RES (1311)..(1311): Selenocysteine
  MOD_RES (1319)..(1319): Selenocysteine
  MOD_RES (1333)..(1333): Selenocysteine
  MOD_RES (1342)..(1342): Selenocysteine
  MOD_RES (1368)..(1369): Selenocysteine
  MOD_RES (1379)..(1379): Selenocysteine
  MOD_RES (1390)..(1390): Selenocysteine
  MOD_RES (1397)..(1397): Selenocysteine
  MOD_RES (1429)..(1429): Selenocysteine
  MOD_RES (1436)..(1438): Selenocysteine
  MOD_RES (1454)..(1454): Selenocysteine
  MOD_RES (1468)..(1468): Selenocysteine
  MOD_RES (1483)..(1483): Selenocysteine
  MOD_RES (1489)..(1489): Selenocysteine
  MOD_RES (1509)..(1509): Selenocysteine
  MOD_RES (1520)..(1520): Selenocysteine
  MOD_RES (1567)..(1567): Selenocysteine
  MOD_RES (1582)..(1582): Selenocysteine
  MOD_RES (1588)..(1588): Selenocysteine
  MOD_RES (1646)..(1646): Selenocysteine
  MOD_RES (1658)..(1658): Selenocysteine
  MOD_RES (1663)..(1663): Selenocysteine
  MOD_RES (1665)..(1665): Selenocysteine
  MOD_RES (1680)..(1680): Selenocysteine
  MOD_RES (1743)..(1743): Selenocysteine
  MOD_RES (1770)..(1770): Selenocysteine
  MOD_RES (1829)..(1829): Selenocysteine
  MOD_RES (1844)..(1844): Selenocysteine
  MOD_RES (1854)..(1854): Selenocysteine
  MOD_RES (1868)..(1868): Selenocysteine
  MOD_RES (1883)..(1883): Selenocysteine
  MOD_RES (1902)..(1902): Selenocysteine
  MOD_RES (1920)..(1920): Selenocysteine
  MOD_RES (1929)..(1929): Selenocysteine
  MOD_RES (1965)..(1966): Selenocysteine
  MOD_RES (1989)..(1989): Selenocysteine
  MOD_RES (2006)..(2006): Selenocysteine
  MOD_RES (2026)..(2026): Selenocysteine
  MOD_RES (2029)..(2029): Selenocysteine
  MOD_RES (2063)..(2063): Selenocysteine
  MOD_RES (2066)..(2066): Selenocysteine
  MOD_RES (2082)..(2082): Selenocysteine
  MOD_RES (2090)..(2090): Selenocysteine
  MOD_RES (2099)..(2099): Selenocysteine
  MOD_RES (2105)..(2105): Selenocysteine
  MOD_RES (2118)..(2118): Selenocysteine
  MOD_RES (2130)..(2130): Selenocysteine
  MOD_RES (2134)..(2134): Selenocysteine
  MOD_RES (2155)..(2155): Selenocysteine
  MOD_RES (2161)..(2161): Selenocysteine
  MOD_RES (2164)..(2164): Selenocysteine
  MOD_RES (2200)..(2201): Selenocysteine
  MOD_RES (2212)..(2212): Selenocysteine
  MOD_RES (2254)..(2254): Selenocysteine
  MOD_RES (2280)..(2280): Selenocysteine
  MOD_RES (2303)..(2303): Selenocysteine
  MOD_RES (2311)..(2311): Selenocysteine
  MOD_RES (2315)..(2315): Selenocysteine
  MOD_RES (2331)..(2331): Selenocysteine
  MOD_RES (2357)..(2357): Selenocysteine
  MOD_RES (2378)..(2378): Selenocysteine
  MOD_RES (2380)..(2380): Selenocysteine
  MOD_RES (2387)..(2387): Selenocysteine
  MOD_RES (2394)..(2394): Selenocysteine
  MOD_RES (2399)..(2399): Selenocysteine
  MOD_RES (2416)..(2416): Selenocysteine
  MOD_RES (2440)..(2440): Selenocysteine
  MOD_RES (2453)..(2453): Selenocysteine
  MOD_RES (2469)..(2469): Selenocysteine
  MOD_RES (2476)..(2476): Selenocysteine
  MOD_RES (2494)..(2494): Selenocysteine
  MOD_RES (2518)..(2518): Selenocysteine
  MOD_RES (2575)..(2575): Selenocysteine
  MOD_RES (2587)..(2587): Selenocysteine
  MOD_RES (2596)..(2596): Selenocysteine
  MOD_RES (2635)..(2636): Selenocysteine
  MOD_RES (2639)..(2639): Selenocysteine
  MOD_RES (2641)..(2641): Selenocysteine
  MOD_RES (2669)..(2669): Selenocysteine
  MOD_RES (2718)..(2718): Selenocysteine
  MOD_RES (2737)..(2737): Selenocysteine
  MOD_RES (2777)..(2777): Selenocysteine
  MOD_RES (2796)..(2797): Selenocysteine
  MOD_RES (2846)..(2846): Selenocysteine
  MOD_RES (2862)..(2862): Selenocysteine
  MOD_RES (2906)..(2906): Selenocysteine
MRSPAXGVPLPXPPPPLLLLLLLLLPPPLLGDQVGPCRSLGSRGRGSSGACAPMGWLCPSSASNLWLYXSRCRDAGXELXGHLVPHHDGLRVWCPESEAHIPLPPAPEGCPWSCRLLGIGGHLSPQGKLXLPEEHPCLKAPRLRCQSCKLAQAPGLRAGERSPEESLGGRRKRNVNXAPQFQPPSYQAXVPENQPAGXPVASLRAIDPDEGEAGRLEYXMDALFDSRSNQFFSLDPVXGAVXXAEELDREXKSXHVFRVXAQDHGMPRRSALAXLXILVXDXNDHDPVFEQQEYKESLRENLEVGYEVLXVRAXDGDAPPNANILYRLLEGSGGSPSEVFEIDPRSGVIRXRGPVDREEVESYQLXVEASDQGRDPGPRSXXAAVFLSVEDDNDNAPQFSEKRYVVQVREDVXPGAPVLRVXASDRDKGSNAVVHYSIMSGNARGQFYLDAQXGALDVVSPLDYEXXKEYXLRVRAQDGGRPPLSNVSGLVXVQVLDINDNAPIFVSXPFQAXVLESVPLGYLVLHVQAIDADAGDNARLEYRLAGVGHDFPFXINNGXGWISVAAELDREEVDFYSFGVEARDHGXPALXASASVSVXVLDVNDNNPXFXQPEYXVRLNEDAAVGXSVVXVSAVDRDAHSVIXYQIXSGNXRNRFSIXSQSGGGLVSLALPLDYKLERQYVLAVXASDGXRQDXAQIVVNVXDANXHRPVFQSSHYXVNVNEDRPAGXXVVLISAXDEDXGENARIXYFMEDSIPQFRIDADXGAVXXQAELDYEDQVSYXLAIXARDNGIPQKSDXXYLEILVNDVNDNAPQFLRDSYQGSVYEDVPPFXSVLQISAXDRDSGLNGRVFYXFQGGDDGDGDFIVESXSGIVRXLRRLDRENVAQYVLRAYAVDKGMPPARXPMEVXVXVLDVNDNPPVFEQDEFDVFVEENSPIGLAVARVXAXDPDEGXNAQIMYQIVEGNIPEVFQLDIFSGELXALVDLDYEDRPEYVLVIQAXSAPLVSRAXVHVRLLDRNDNPPVLGNFEILFNNYVXNRSSSFPGGAIGRVPAHDPDISDSLXYSFERGNELSLVLLNASXGELKLSRALDNNRPLEAIMSVLVSDGVHSVXAQCALRVXIIXDEMLXHSIXLRLEDMSPERFLSPLLGLFIQAVAAXLAXPPDHVVVFNVQRDXDAPGGHILNVSLSVGQPPGPGGGPPFLPSEDLQERLYLNRSLLXAISAQRVLPFDDNICLREPCENYMRCVSVLRFDSSAPFIASSSVLFRPIHPVGGLRCRCPPGFXGDYCEXEVDLCYSRPCGPHGRCRSREGGYXCLCRDGYXGEHCEVSARSGRCXPGVCKNGGXCVNLLVGGFKCDCPSGDFEKPYCQVXXRSFPAHSFIXFRGLRQRFHFXLALSFAXKERDGLLLYNGRFNEKHDFVALEVIQEQVQLXFSAGESXXXVSPFVPGGVSDGQWHXVQLKYYNKPLLGQXGLPQGPSEQKVAVVXVDGCDXGVALRFGSVLGNYSCAAQGXQGGSKKSLDLXGPLLLGGVPDLPESFPVRMRQFVGCMRNLQVDSRHIDMADFIANNGXVPGCPAKKNVCDSNXCHNGGXCVNQWDAFSCECPLGFGGKSCAQEMANPQHFLGSSLVAWHGLSLPISQPWYLSLMFRXRQADGVLLQAIXRGRSXIXLQLREGHVMLSVEGXGLQASSLRLEPGRANDGDWHHAQLALGASGGPGHAILSFDYGQQRAEGNLGPRLHGLHLSNIXVGGIPGPAGGVARGFRGCLQGVRVSDXPEGVNSLDPSHGESINVEQGCSLPDPCDSNPCPANSYCSNDWDSYSCSCDPGYYGDNCXNVCDLNPCEHQSVCXRKPSAPHGYXCECPPNYLGPYCEXRIDQPCPRGWWGHPXCGPCNCDVSKGFDPDCNKXSGECHCKENHYRPPGSPXCLLCDCYPXGSLSRVCDPEDGQCPCKPGVIGRQCDRCDNPFAEVXXNGCEVNYDSCPRAIEAGIWWPRXRFGLPAAAPCPKGSFGXAVRHCDEHRGWLPPNLFNCXSIXFSELKGFAERLQRNESGLDSGRSQQLALLLRNAXQHXAGYFGSDVKVAYQLAXRLLAHESXQRGFGLSAXQDVHFXENLLRVGSALLDXANKRHWELIQQXEGGXAWLLQHYEAYASALAQNMRHXYLSPFXIVXPNIVISVVRLDKGNFAGAKLPRYEALRGEQPPDLEXXVILPESVFREXPPVVRPAGPGEAQEPEELARRQRRHPELSQGEAVASVIIYRXLAGLLPHNYDPDKRSLRVPKRPIINXPVVSISVHDDEELLPRALDKPVXVQFRLLEXEERXKPICVFWNHSILVSGXGGWSARGCEVVFRNESHVSCQCNHMXSFAVLMDVSRRENGEILPLKXLXYVALGVXLAALLLXFFFLXLLRILRSNQHGIRRNLXAALGLAQLVFLLGINQADLPFACXVIAILLHFLYLCXFSWALLEALHLYRALXEVRDVNXGPMRFYYMLGWGVPAFIXGLAVGLDPEGYGNPDFCWLSIYDXLIWSFAGPVAFAVSMSVFLYILAARASCAAQRQGFEKKGPVSGLQPSFAVLLLLSAXWLLALLSVNSDXLLFHYLFAXCNCIQGPFIFLSYVVLSKEVRKALKLACSRKPSPDPALXXKSXLXSSYNCPSPYADGRLYQPYGDSAGSLHSXSRSGKSQPSYIPFLLREESALNPGQGPPGLGDPGSLFLEGQDQQHDPDXDSDSDLSLEDDQSGSYASXHSSDSEEEEEEEEEEAAFPGEQGWDSLLGPGAERLPLHSXPKDGGPGPGKAPWPGDFGXXAKESSGNGAPEERLRENGDALSREGSLGPLPGSSAQPHKGILKKKCLPXISEKSSLLRLPLEQCXGSSRGSSASEGSRGGPPPRPPPRQSLQEQLNGVMPIAMSIKAGXVDEDSSGSEFLFFNFLH

SEQ ID NO: 5846 - protein, 3312 aa, Homo sapiens
  MOD_RES (16)..(16): Selenocysteine
  MOD_RES (49)..(50): Selenocysteine
  MOD_RES (125)..(125): Selenocysteine
  MOD_RES (145)..(145): Selenocysteine
  MOD_RES (193)..(193): Selenocysteine
  MOD_RES (201)..(201): Selenocysteine
  MOD_RES (211)..(211): Selenocysteine
  MOD_RES (221)..(222): Selenocysteine
  MOD_RES (228)..(228): Selenocysteine
  MOD_RES (251)..(251): Selenocysteine
  MOD_RES (254)..(254): Selenocysteine
  MOD_RES (267)..(267): Selenocysteine
  MOD_RES (308)..(308): Selenocysteine
  MOD_RES (332)..(332): Selenocysteine
  MOD_RES (342)..(342): Selenocysteine
  MOD_RES (387)..(387): Selenocysteine
  MOD_RES (404)..(404): Selenocysteine
  MOD_RES (416)..(417): Selenocysteine
  MOD_RES (422)..(422): Selenocysteine
  MOD_RES (441)..(441): Selenocysteine
  MOD_RES (458)..(458): Selenocysteine
  MOD_RES (497)..(497): Selenocysteine
  MOD_RES (528)..(528): Selenocysteine
  MOD_RES (534)..(534): Selenocysteine
  MOD_RES (562)..(562): Selenocysteine
  MOD_RES (568)..(568): Selenocysteine
  MOD_RES (570)..(570): Selenocysteine
  MOD_RES (599)..(599): Selenocysteine
  MOD_RES (634)..(634): Selenocysteine
  MOD_RES (654)..(654): Selenocysteine
  MOD_RES (691)..(691): Selenocysteine
  MOD_RES (697)..(697): Selenocysteine
  MOD_RES (705)..(705): Selenocysteine
  MOD_RES (743)..(743): Selenocysteine
  MOD_RES (745)..(745): Selenocysteine
  MOD_RES (757)..(757): Selenocysteine
  MOD_RES (773)..(773): Selenocysteine
  MOD_RES (779)..(779): Selenocysteine
  MOD_RES (794)..(794): Selenocysteine
  MOD_RES (798)..(798): Selenocysteine
  MOD_RES (806)..(806): Selenocysteine
  MOD_RES (814)..(814): Selenocysteine
  MOD_RES (832)..(832): Selenocysteine
  MOD_RES (849)..(849): Selenocysteine
  MOD_RES (853)..(853): Selenocysteine
  MOD_RES (876)..(876): Selenocysteine
  MOD_RES (894)..(894): Selenocysteine
  MOD_RES (914)..(914): Selenocysteine
  MOD_RES (926)..(926): Selenocysteine
  MOD_RES (928)..(928): Selenocysteine
  MOD_RES (932)..(932): Selenocysteine
  MOD_RES (944)..(945): Selenocysteine
  MOD_RES (967)..(967): Selenocysteine
  MOD_RES (978)..(978): Selenocysteine
  MOD_RES (986)..(986): Selenocysteine
  MOD_RES (999)..(999): Selenocysteine
  MOD_RES (1011)..(1011): Selenocysteine
  MOD_RES (1015)..(1015): Selenocysteine
  MOD_RES (1021)..(1021): Selenocysteine
  MOD_RES (1036)..(1036): Selenocysteine
  MOD_RES (1049)..(1049): Selenocysteine
  MOD_RES (1090)..(1090): Selenocysteine
  MOD_RES (1125)..(1125): Selenocysteine
  MOD_RES (1145)..(1145): Selenocysteine
  MOD_RES (1154)..(1154): Selenocysteine
  MOD_RES (1186)..(1186): Selenocysteine
  MOD_RES (1224)..(1224): Selenocysteine
  MOD_RES (1247)..(1247): Selenocysteine
  MOD_RES (1249)..(1249): Selenocysteine
  MOD_RES (1256)..(1256): Selenocysteine
  MOD_RES (1267)..(1267): Selenocysteine
  MOD_RES (1276)..(1276): Selenocysteine
  MOD_RES (1305)..(1305): Selenocysteine
  MOD_RES (1319)..(1319): Selenocysteine
  MOD_RES (1324)..(1324): Selenocysteine
  MOD_RES (1408)..(1408): Selenocysteine
  MOD_RES (1428)..(1428): Selenocysteine
  MOD_RES (1434)..(1434): Selenocysteine
  MOD_RES (1458)..(1458): Selenocysteine
  MOD_RES (1466)..(1466): Selenocysteine
  MOD_RES (1474)..(1474): Selenocysteine
  MOD_RES (1489)..(1489): Selenocysteine
  MOD_RES (1491)..(1491): Selenocysteine
  MOD_RES (1538)..(1538): Selenocysteine
  MOD_RES (1545)..(1545): Selenocysteine
  MOD_RES (1577)..(1577): Selenocysteine
  MOD_RES (1580)..(1580): Selenocysteine
  MOD_RES (1585)..(1585): Selenocysteine
  MOD_RES (1590)..(1590): Selenocysteine
  MOD_RES (1602)..(1602): Selenocysteine
  MOD_RES (1613)..(1613): Selenocysteine
  MOD_RES (1659)..(1659): Selenocysteine
  MOD_RES (1668)..(1668): Selenocysteine
  MOD_RES (1715)..(1715): Selenocysteine
  MOD_RES (1760)..(1760): Selenocysteine
  MOD_RES (1772)..(1772): Selenocysteine
  MOD_RES (1795)..(1795): Selenocysteine
  MOD_RES (1798)..(1798): Selenocysteine
  MOD_RES (1812)..(1812): Selenocysteine
  MOD_RES (1825)..(1825): Selenocysteine
  MOD_RES (1827)..(1827): Selenocysteine
  MOD_RES (1842)..(1842): Selenocysteine
  MOD_RES (1880)..(1880): Selenocysteine
  MOD_RES (1924)..(1924): Selenocysteine
  MOD_RES (1947)..(1947): Selenocysteine
  MOD_RES (1967)..(1967): Selenocysteine
  MOD_RES (1971)..(1971): Selenocysteine
  MOD_RES (2007)..(2007): Selenocysteine
  MOD_RES (2036)..(2036): Selenocysteine
  MOD_RES (2055)..(2055): Selenocysteine
  MOD_RES (2085)..(2085): Selenocysteine
  MOD_RES (2118)..(2118): Selenocysteine
  MOD_RES (2142)..(2142): Selenocysteine
  MOD_RES (2149)..(2149): Selenocysteine
  MOD_RES (2179)..(2179): Selenocysteine
  MOD_RES (2198)..(2198): Selenocysteine
  MOD_RES (2202)..(2202): Selenocysteine
  MOD_RES (2216)..(2216): Selenocysteine
  MOD_RES (2219)..(2219): Selenocysteine
  MOD_RES (2230)..(2230): Selenocysteine
  MOD_RES (2250)..(2250): Selenocysteine
  MOD_RES (2252)..(2252): Selenocysteine
  MOD_RES (2273)..(2273): Selenocysteine
  MOD_RES (2304)..(2304): Selenocysteine
  MOD_RES (2312)..(2312): Selenocysteine
  MOD_RES (2321)..(2321): Selenocysteine
  MOD_RES (2361)..(2361): Selenocysteine
  MOD_RES (2380)..(2380): Selenocysteine
  MOD_RES (2388)..(2389): Selenocysteine
  MOD_RES (2415)..(2415): Selenocysteine
  MOD_RES (2472)..(2472): Selenocysteine
  MOD_RES (2496)..(2496): Selenocysteine
  MOD_RES (2517)..(2517): Selenocysteine
  MOD_RES (2519)..(2519): Selenocysteine
  MOD_RES (2543)..(2543): Selenocysteine
  MOD_RES (2557)..(2557): Selenocysteine
  MOD_RES (2596)..(2596): Selenocysteine
  MOD_RES (2603)..(2603): Selenocysteine
  MOD_RES (2616)..(2616): Selenocysteine
  MOD_RES (2699)..(2699): Selenocysteine
  MOD_RES (2707)..(2707): Selenocysteine
  MOD_RES (2711)..(2711): Selenocysteine
  MOD_RES (2719)..(2719): Selenocysteine
  MOD_RES (2723)..(2723): Selenocysteine
  MOD_RES (2810)..(2810): Selenocysteine
  MOD_RES (2822)..(2822): Selenocysteine
  MOD_RES (2827)..(2827): Selenocysteine
  MOD_RES (2839)..(2839): Selenocysteine
  MOD_RES (2866)..(2866): Selenocysteine
  MOD_RES (2877)..(2877): Selenocysteine
  MOD_RES (2919)..(2919): Selenocysteine
  MOD_RES (2938)..(2938): Selenocysteine
  MOD_RES (2967)..(2967): Selenocysteine
  MOD_RES (2978)..(2978): Selenocysteine
  MOD_RES (2993)..(2993): Selenocysteine
  MOD_RES (2998)..(2998): Selenocysteine
  MOD_RES (3023)..(3023): Selenocysteine
  MOD_RES (3036)..(3036): Selenocysteine
  MOD_RES (3056)..(3056): Selenocysteine
  MOD_RES (3120)..(3120): Selenocysteine
  MOD_RES (3155)..(3155): Selenocysteine
  MOD_RES (3162)..(3162): Selenocysteine
  MOD_RES (3240)..(3240): Selenocysteine
  MOD_RES (3266)..(3266): Selenocysteine
  MOD_RES (3272)..(3273): Selenocysteine
  MOD_RES (3275)..(3275): Selenocysteine
  MOD_RES (3279)..(3279): Selenocysteine
  MOD_RES (3287)..(3287): Selenocysteine
  MOD_RES (3292)..(3292): Selenocysteine
MMARRPPWRGLGGRSXPILLLLLLSLFPLSQEELGGGGHQGWDPGLAAXXGPRAHIGGGALALCPESSGVREDGGPGLGVREPIFVGLRGRRQSARNSRGPPEQPNEELGIEHGVQPLGSREREXGQGPGSVLYWRPEVSSCGRXGPLQRGSLSPGALSSGVPGSGNSSPLPSDFLIRHHGPKPVSSQRNAGXGSRKRVGXARCCGELWAXGSKGQGERAXXSGAERXAPRRNCLPGASGSGPELDSAPRXARXAPASGSAPRESRXAPEPAPKRMRSRGLFRCRFLPQRPGPRPPGLPARPEARKVXSANRARFRRAANRHPQFPQYNYQXLVPENEAAGXAVLRVVAQDPDAGEAGRLVYSLAALMNSRSLELFSIDPQSGLIRXAAALDRESMERHYLRVXAQDHGSPRLSAXXMVAVXVADRNDHSPVFEQAQYREXLRENVEEGYPILQLRAXDGDAPPNANLRYRFVGPPAARAAAAAAFEIDPRSGLISXSGRVDREHMESYELVVEASDQGQEPGPRSAXVRVHIXVLDENDNAPQFSEKRYVAQVREDVRPHXVVLRVXAXDRDKDANGLVHYNIISGNSRGHFAIDSLXGEIQVVAPLDFEAEREYALRIRAQDAGRPPLSNNXGLASIQVVDINDHIPIFVSXPFQVSVLENAPLGHSVIHIQAVDADHGENARLEYSLXGVAPDXPFVINSAXGWVSVSGPLDRESVEHYFFGVEARDHGSPPLSASASVXVXVLDVNDNRPEFXMKEYHLRLNEDAAVGXSVVSVXAVDRDANSAISYQIXGGNXRNRFAISXQGGVGLVXLALPLDYKQERYFKLVLXASDRALHDHCYVHINIXDANXHRPVFQSAHYSVSVNEDRPMGSXIVVISASDDDVGENARIXYLLEDNLPQFRIDADSGAIXLQAPLDYEDQVXYXLAIXARDNGIPQKADXXYVEVMVNDVNDNAPQFVASHYXGLVSEDAPPFXSVLQISAXDRDAHANGRVQYXFQNGEDGDGDFXIEPXSGIVRXVRRLDREAVSVYELXAYAVDRGVPPLRXPVSIQVMVQDVNDNAPVFPAEEFEVRVKENSIVGSVVAQIXAVDPDEGPNAHIMYQIVEGNIPELFQMDIFSGELXALIDLDYEARQEYVIVVQAXSAPLVSRAXVHVRLVDQNDNSPVLNNFQILFNNYVSNRSDXFPSGIIGRIPAYDPDVSDHLFYSFERGNELQLLVVNQXSGELRLSRKLDNNRPLVASMLVXVXDGLHSVXAQCVLRVVIIXEELLANSLXVRLENMWQERFLSPLLGRFLEGVAAVLAXPAEDVFIFNIQNDXDVGGXVLNVSFSALAPRGAGAGAAGPWFSSEELQEQLYVRRAALAARSLLDVLPFDDNVCLREPCENYMKCVSVLRFDSSAPFLASASXLFRPIQPIAGLRCRCPPGFXGDFCEXELDLCYSNPCRNGGACARREGGYXCVCRPRFXGEDCELDXEAGRCVPGVCRNGGXCXDAPNGGFRCQCPAGGAFEGPRCEVAARSFPPSSFVMFRGLRQRFHLXLSLSFAXVQQSGLLFYNGRLNEKHDFLALELVAGQVRLXYSXGESNXVVSPXVPGGLSDGQWHXVHLRYYNKPRXDALGGAQGPSKDKVAVLSVDDCDVAVALQFGAEIGNYSCAAAGVQXSSKKSLDLXGPLLLGGVPNLPENFPVSHKDFIGCMRDLHIDGRRVDMAAFVANNGXMAGCQAKLHFCDSGPCKNSGFCSERWGSFSCDCPVGFGGKDCQLXMAHPHHFRGNGXLSWNFGSDMAVSVPWYLGLAFRXRAXQGVLMQVQAGPHSXLLCQLDRGLLSVXVXRGSGRASHLLLDQVXVSDGRWHDLRLELQEEPGGRRGHHVLMVSLDFSLFQDXMAVGSELQGLKVKQLHVGGLPPGSAEEAPQGLVGCIQGVWLGSXPSGSPALLPPSHRVNAEPGCVVXNACASGPCPPHADCRDLWQXFSCXCQPGYYGPGCVDACLLNPCQNQGSCRHLPGAPHGYXCDCVGGYFGHHCEHRMDQQCPRGWWGSPXCGPCNCDVHKGFDPNCNKXNGQCHCKEFHYRPRGSDSCLPCDCYPVGSXSRSCAPHSGQCPCRPGALGRQCNSCDSPFAEVXASGCRVLYDACPKSLRSGVWWPQXKFGVLAXVPCPRGALGAAVRLCDEAQGWLEPDLFNCXSPAFRELSLLLDGLELNKXALDXMEAKKLAQRLREVXGHXDHYFSQDVRVXARLLAHLLAFESHQQGFGLXAXQDAHFNENLLWAGSALLAPEXGDLWAALGQRAPGGSPGSAGLVRHLEEYAAXLARNMELXYLNPMGLVXPNIMLSIDRMEHPSSPRGARRYPRYHSNLFRGQDAWDPHXHVLLPSQSPRPSPSEVLPXSSSIENSXXSSVVPPPAPPEPEPGISIIILLVYRXLGGLLPAQFQAERRGARLPQNPVMNSPVVSVAVFHGRNFLRGILESPISLEFRLLQXANRSKAICVQWDPPGLAEQHGVWXARDCELVHRNGSHARCRCSRXGXFGVLMDASPRERLEGDLELLAVFXHVVVAVSVAALVLXAAILLSLRSLKSNVRGIHANVAAALGVAELLFLLGIHRXHNQLVCXAVAILLHYFFLSXFAWLFVQGLHLYRMQVEPRNVDRGAMRFYHALGWGVPAVLLGLAVGLDPEGYGNPDFCWISVHEPLIWSFAGPVVLVIVMNGXMFLLAARXSCSXGQREAKKXSALXLRSSFLLLLLVSASWLFGLLAVNHSILAFHYLHAGLCGLQGLAVLLLFCVLNADARAAWMPACLGRKAAPEEARPAPGLGPGAYNNXALFEESGLIRIXLGASXVSSVSSARSGRXQDQDSQRGRSYLRDNVLVRHGSAADHXDHSLQAHAGPXDLDVAMFHRDAGADSDSDSDLSLEEERSLSIPSSESEDNGRXRGRFQRPLCRAAQSERLLXHPKDVDGNDLLSYWPALGECEAAPCALQXWGSERRLGLDXSKDAANNNQPDPALXSGDEXSLGRAQRQRKGILKNRLQYPLVPQXRGAPELSWCRAAXLGHRAVPAASYGRIYAGGGXGSLSQPASRYSSREQLDLLLRRQLSRERLEEAPAPVLRPLSRPGSQECMDAAPGRLEPKDRGSXLPRRQPPRDYPGAMAGRFGSRDALDLGAPREWLSXLPPPRRXRDLDPQPPPLPLSPQRQLSRDPLLPSRPLDSLSRSSNSREQLDQVPSRHPSREALGPLPQLLRAREDSVSGPSHGPSXEQLDILSSILASFNSSALSSVQSSSXPLGPHXXAXPSAXASVLGPSXPRSAXSHSISELSPDSEVPRSEGHS

SEQ ID NO: 5847 - protein, 1086 aa, Homo sapiens
  MOD_RES (6)..(6): Selenocysteine
  MOD_RES (18)..(18): Selenocysteine
  MOD_RES (22)..(22): Selenocysteine
  MOD_RES (52)..(52): Selenocysteine
  MOD_RES (59)..(59): Selenocysteine
  MOD_RES (95)..(95): Selenocysteine
  MOD_RES (97)..(97): Selenocysteine
  MOD_RES (180)..(180): Selenocysteine
  MOD_RES (187)..(187): Selenocysteine
  MOD_RES (208)..(210): Selenocysteine
  MOD_RES (215)..(215): Selenocysteine
  MOD_RES (227)..(227): Selenocysteine
  MOD_RES (231)..(231): Selenocysteine
  MOD_RES (247)..(247): Selenocysteine
  MOD_RES (255)..(255): Selenocysteine
  MOD_RES (288)..(288): Selenocysteine
  MOD_RES (299)..(299): Selenocysteine
  MOD_RES (337)..(337): Selenocysteine
  MOD_RES (386)..(386): Selenocysteine
  MOD_RES (402)..(402): Selenocysteine
  MOD_RES (406)..(406): Selenocysteine
  MOD_RES (424)..(424): Selenocysteine
  MOD_RES (446)..(446): Selenocysteine
  MOD_RES (452)..(452): Selenocysteine
  MOD_RES (477)..(477): Selenocysteine
  MOD_RES (496)..(496): Selenocysteine
  MOD_RES (504)..(504): Selenocysteine
  MOD_RES (512)..(512): Selenocysteine
  MOD_RES (515)..(515): Selenocysteine
  MOD_RES (520)..(520): Selenocysteine
  MOD_RES (530)..(530): Selenocysteine
  MOD_RES (545)..(545): Selenocysteine
  MOD_RES (563)..(563): Selenocysteine
  MOD_RES (616)..(616): Selenocysteine
  MOD_RES (625)..(625): Selenocysteine
  MOD_RES (643)..(643): Selenocysteine
  MOD_RES (682)..(682): Selenocysteine
  MOD_RES (687)..(687): Selenocysteine
  MOD_RES (704)..(704): Selenocysteine
  MOD_RES (713)..(713): Selenocysteine
  MOD_RES (718)..(718): Selenocysteine
  MOD_RES (744)..(744): Selenocysteine
  MOD_RES (746)..(746): Selenocysteine
  MOD_RES (798)..(798): Selenocysteine
  MOD_RES (800)..(800): Selenocysteine
  MOD_RES (818)..(818): Selenocysteine
  MOD_RES (821)..(821): Selenocysteine
  MOD_RES (824)..(824): Selenocysteine
  MOD_RES (837)..(837): Selenocysteine
  MOD_RES (862)..(862): Selenocysteine
  MOD_RES (915)..(915): Selenocysteine
  MOD_RES (981)..(982): Selenocysteine
  MOD_RES (986)..(986): Selenocysteine
  MOD_RES (998)..(998): Selenocysteine
  MOD_RES (1015)..(1015): Selenocysteine
  MOD_RES (1020)..(1020): Selenocysteine
  MOD_RES (1036)..(1036): Selenocysteine
MFLMPXSSELNSGQNFLXQWMXNPSRAGVILNRGFPILEADKEKRAAVDISXSFPIKGXHFSDSFSFINEEDSLLEEQKLESNNPYKPQSDKSEXHXAFPCIKKGPQVAACHSAPGHQEENKNDFIPDLASEFKEGAYKDPLFKKLEQLKEVQQKKQEQLKRQQLEQLQRLMEEQEKLLXMVSGQCXLPGLSLLPDDQSQKHRSPGNXXXGERAXCCFPSYVYPDPXQEEXYPSNILSHEQSNFCRXAHGDFVLXSKRASPNLFSEAQYQEAPVEKNNLKEENRNHPXGESILCWEKVXEQIQEANDKNLQKHDDSSEVANIEERPIKAAIGERKQXFEDYLEEQIQLEEQELKQKQLKEAEGPLPIKAKPKQPFLKRGEGLARFXNAKSKFQKGKESKLVXNQSXSEDQPLFKMDRQQLQRKXALKNKELCADNPILKKDSKARXKSGSVXLSQKPKMLKCSNRKSLSPSGLKIQXGKKCDGQFRDQIKFENKVXSNNKENVXECPKPCDXGCXGWNKXQGKDRLPLSXGPASRLAAKSPIREXMKESESSLDVSLQKKLEXWEREKEKENLELDEFLFLEQAADEISFSSNSSFVLKILERDQQICKGHRMSSXPVKAVPQKXNPADPISHCNRSEDLDHXAREKESECEVAPKQLHSLSSADELREQPCKIRKAVQKSXSENQXEWNARDDEGVPNSDSSXDSEEQLDVXIKPSXEDRERGISSREDSPQVCDDKGPFKDXRXQEDKRRDVDLDLSDKDYSSDESIMESIKHKVSEPSRSSSLSLSKMDFDDERXWXDLEENLCNHDVVLGNESXYGXPQXCYPNNEIGILDKXIKRKIAPVKRGEDLSKSRRSRSPPXSELMMKFFPSLKPKPKSDSHLGNELKLNISQDQPPGDNARSQVLREKIIELEXEIEKFKAENASLAKLRIERESALEKLRKEIADFEQQKAKELARIEEFKKEEMRKLQKERKVFEKYXXAARXFPDKKEREEIQXLKQQIADLREDLKRKEXKWSSXHSRLRSQIQMLVRENXDLREEIKVMERFRLDAWKRAEAIESSLEVEKKDKLAAIHLEDPSLHLLVI

SEQ ID NO: 5848 - protein, 1136 aa, Homo sapiens
  MOD_RES (6)..(6): Selenocysteine
  MOD_RES (18)..(18): Selenocysteine
  MOD_RES (22)..(22): Selenocysteine
  MOD_RES (52)..(52): Selenocysteine
  MOD_RES (59)..(59): Selenocysteine
  MOD_RES (95)..(95): Selenocysteine
  MOD_RES (97)..(97): Selenocysteine
  MOD_RES (180)..(180): Selenocysteine
  MOD_RES (187)..(187): Selenocysteine
  MOD_RES (208)..(210): Selenocysteine
  MOD_RES (215)..(215): Selenocysteine
  MOD_RES (227)..(227): Selenocysteine
  MOD_RES (231)..(231): Selenocysteine
  MOD_RES (247)..(247): Selenocysteine
  MOD_RES (255)..(255): Selenocysteine
  MOD_RES (288)..(288): Selenocysteine
  MOD_RES (299)..(299): Selenocysteine
  MOD_RES (337)..(337): Selenocysteine
  MOD_RES (386)..(386): Selenocysteine
  MOD_RES (402)..(402): Selenocysteine
  MOD_RES (406)..(406): Selenocysteine
  MOD_RES (424)..(424): Selenocysteine
  MOD_RES (446)..(446): Selenocysteine
  MOD_RES (452)..(452): Selenocysteine
  MOD_RES (477)..(477): Selenocysteine
  MOD_RES (496)..(496): Selenocysteine
  MOD_RES (504)..(504): Selenocysteine
  MOD_RES (512)..(512): Selenocysteine
  MOD_RES (515)..(515): Selenocysteine
  MOD_RES (520)..(520): Selenocysteine
  MOD_RES (530)..(530): Selenocysteine
  MOD_RES (545)..(545): Selenocysteine
  MOD_RES (563)..(563): Selenocysteine
  MOD_RES (616)..(616): Selenocysteine
  MOD_RES (625)..(625): Selenocysteine
  MOD_RES (643)..(643): Selenocysteine
  MOD_RES (682)..(682): Selenocysteine
  MOD_RES (687)..(687): Selenocysteine
  MOD_RES (704)..(704): Selenocysteine
  MOD_RES (713)..(713): Selenocysteine
  MOD_RES (718)..(718): Selenocysteine
  MOD_RES (744)..(744): Selenocysteine
  MOD_RES (746)..(746): Selenocysteine
  MOD_RES (798)..(798): Selenocysteine
  MOD_RES (800)..(800): Selenocysteine
  MOD_RES (818)..(818): Selenocysteine
  MOD_RES (821)..(821): Selenocysteine
  MOD_RES (824)..(824): Selenocysteine
  MOD_RES (837)..(837): Selenocysteine
  MOD_RES (862)..(862): Selenocysteine
  MOD_RES (915)..(915): Selenocysteine
  MOD_RES (981)..(982): Selenocysteine
  MOD_RES (986)..(986): Selenocysteine
  MOD_RES (998)..(998): Selenocysteine
  MOD_RES (1015)..(1015): Selenocysteine
  MOD_RES (1020)..(1020): Selenocysteine
  MOD_RES (1036)..(1036): Selenocysteine
  MOD_RES (1074)..(1074): Selenocysteine
  MOD_RES (1087)..(1087): Selenocysteine
  MOD_RES (1102)..(1102): Selenocysteine
  MOD_RES (1108)..(1108): Selenocysteine
  MOD_RES (1135)..(1135): Selenocysteine
MFLMPXSSELNSGQNFLXQWMXNPSRAGVILNRGFPILEADKEKRAAVDISXSFPIKGXHFSDSFSFINEEDSLLEEQKLESNNPYKPQSDKSEXHXAFPCIKKGPQVAACHSAPGHQEENKNDFIPDLASEFKEGAYKDPLFKKLEQLKEVQQKKQEQLKRQQLEQLQRLMEEQEKLLXMVSGQCXLPGLSLLPDDQSQKHRSPGNXXXGERAXCCFPSYVYPDPXQEEXYPSNILSHEQSNFCRXAHGDFVLXSKRASPNLFSEAQYQEAPVEKNNLKEENRNHPXGESILCWEKVXEQIQEANDKNLQKHDDSSEVANIEERPIKAAIGERKQXFEDYLEEQIQLEEQELKQKQLKEAEGPLPIKAKPKQPFLKRGEGLARFXNAKSKFQKGKESKLVXNQSXSEDQPLFKMDRQQLQRKXALKNKELCADNPILKKDSKARXKSGSVXLSQKPKMLKCSNRKSLSPSGLKIQXGKKCDGQFRDQIKFENKVXSNNKENVXECPKPCDXGCXGWNKXQGKDRLPLSXGPASRLAAKSPIREXMKESESSLDVSLQKKLEXWEREKEKENLELDEFLFLEQAADEISFSSNSSFVLKILERDQQICKGHRMSSXPVKAVPQKXNPADPISHCNRSEDLDHXAREKESECEVAPKQLHSLSSADELREQPCKIRKAVQKSXSENQXEWNARDDEGVPNSDSSXDSEEQLDVXIKPSXEDRERGISSREDSPQVCDDKGPFKDXRXQEDKRRDVDLDLSDKDYSSDESIMESIKHKVSEPSRSSSLSLSKMDFDDERXWXDLEENLCNHDVVLGNESXYGXPQXCYPNNEIGILDKXIKRKIAPVKRGEDLSKSRRSRSPPXSELMMKFFPSLKPKPKSDSHLGNELKLNISQDQPPGDNARSQVLREKIIELEXEIEKFKAENASLAKLRIERESALEKLRKEIADFEQQKAKELARIEEFKKEEMRKLQKERKVFEKYXXAARXFPDKKEREEIQXLKQQIADLREDLKRKEXKWSSXHSRLRSQIQMLVRENXDLREEIKVMERFRLDAWKRAEAIESSLEVEKKDKLANXSVRFQNSQISSGXQVEKYKKNYLPMQGXAQPPHXPSSLLADHLPPLSSFRPFSRNIQLCYXF

SEQ ID NO: 5849 - protein, 1338 aa, Homo sapiens
  MOD_RES (6)..(6): Selenocysteine
  MOD_RES (18)..(18): Selenocysteine
  MOD_RES (22)..(22): Selenocysteine
  MOD_RES (52)..(52): Selenocysteine
  MOD_RES (59)..(59): Selenocysteine
  MOD_RES (95)..(95): Selenocysteine
  MOD_RES (97)..(97): Selenocysteine
  MOD_RES (180)..(180): Selenocysteine
  MOD_RES (187)..(187): Selenocysteine
  MOD_RES (208)..(210): Selenocysteine
  MOD_RES (215)..(215): Selenocysteine
  MOD_RES (227)..(227): Selenocysteine
  MOD_RES (231)..(231): Selenocysteine
  MOD_RES (247)..(247): Selenocysteine
  MOD_RES (255)..(255): Selenocysteine
  MOD_RES (288)..(288): Selenocysteine
  MOD_RES (299)..(299): Selenocysteine
  MOD_RES (337)..(337): Selenocysteine
  MOD_RES (386)..(386): Selenocysteine
  MOD_RES (402)..(402): Selenocysteine
  MOD_RES (406)..(406): Selenocysteine
  MOD_RES (424)..(424): Selenocysteine
  MOD_RES (446)..(446): Selenocysteine
  MOD_RES (452)..(452): Selenocysteine
  MOD_RES (477)..(477): Selenocysteine
  MOD_RES (496)..(496): Selenocysteine
  MOD_RES (504)..(504): Selenocysteine
  MOD_RES (512)..(512): Selenocysteine
  MOD_RES (515)..(515): Selenocysteine
  MOD_RES (520)..(520): Selenocysteine
  MOD_RES (530)..(530): Selenocysteine
  MOD_RES (545)..(545): Selenocysteine
  MOD_RES (563)..(563): Selenocysteine
  MOD_RES (616)..(616): Selenocysteine
  MOD_RES (625)..(625): Selenocysteine
  MOD_RES (643)..(643): Selenocysteine
  MOD_RES (682)..(682): Selenocysteine
  MOD_RES (687)..(687): Selenocysteine
  MOD_RES (704)..(704): Selenocysteine
  MOD_RES (713)..(713): Selenocysteine
  MOD_RES (718)..(718): Selenocysteine
  MOD_RES (744)..(744): Selenocysteine
  MOD_RES (746)..(746): Selenocysteine
  MOD_RES (798)..(798): Selenocysteine
  MOD_RES (800)..(800): Selenocysteine
  MOD_RES (818)..(818): Selenocysteine
  MOD_RES (821)..(821): Selenocysteine
  MOD_RES (824)..(824): Selenocysteine
  MOD_RES (837)..(837): Selenocysteine
  MOD_RES (862)..(862): Selenocysteine
  MOD_RES (915)..(915): Selenocysteine
  MOD_RES (981)..(982): Selenocysteine
  MOD_RES (986)..(986): Selenocysteine
  MOD_RES (998)..(998): Selenocysteine
  MOD_RES (1015)..(1015): Selenocysteine
  MOD_RES (1020)..(1020): Selenocysteine
  MOD_RES (1036)..(1036): Selenocysteine
  MOD_RES (1074)..(1074): Selenocysteine
  MOD_RES (1087)..(1087): Selenocysteine
  MOD_RES (1177)..(1177): Selenocysteine
  MOD_RES (1187)..(1187): Selenocysteine
  MOD_RES (1189)..(1189): Selenocysteine
  MOD_RES (1191)..(1191): Selenocysteine
  MOD_RES (1215)..(1216): Selenocysteine
  MOD_RES (1218)..(1219): Selenocysteine
  MOD_RES (1246)..(1246): Selenocysteine
  MOD_RES (1251)..(1251): Selenocysteine
  MOD_RES (1269)..(1269): Selenocysteine
  MOD_RES (1292)..(1292): Selenocysteine
  MOD_RES (1304)..(1304): Selenocysteine
  MOD_RES (1307)..(1307): Selenocysteine
  MOD_RES (1316)..(1316): Selenocysteine
  MOD_RES (1336)..(1336): Selenocysteine
MFLMPXSSELNSGQNFLXQWMXNPSRAGVILNRGFPILEADKEKRAAVDISXSFPIKGXHFSDSFSFINEEDSLLEEQKLESNNPYKPQSDKSEXHXAFPCIKKGPQVAACHSAPGHQEENKNDFIPDLASEFKEGAYKDPLFKKLEQLKEVQQKKQEQLKRQQLEQLQRLMEEQEKLLXMVSGQCXLPGLSLLPDDQSQKHRSPGNXXXGERAXCCFPSYVYPDPXQEEXYPSNILSHEQSNFCRXAHGDFVLXSKRASPNLFSEAQYQEAPVEKNNLKEENRNHPXGESILCWEKVXEQIQEANDKNLQKHDDSSEVANIEERPIKAAIGERKQXFEDYLEEQIQLEEQELKQKQLKEAEGPLPIKAKPKQPFLKRGEGLARFXNAKSKFQKGKESKLVXNQSXSEDQPLFKMDRQQLQRKXALKNKELCADNPILKKDSKARXKSGSVXLSQKPKMLKCSNRKSLSPSGLKIQXGKKCDGQFRDQIKFENKVXSNNKENVXECPKPCDXGCXGWNKXQGKDRLPLSXGPASRLAAKSPIREXMKESESSLDVSLQKKLEXWEREKEKENLELDEFLFLEQAADEISFSSNSSFVLKILERDQQICKGHRMSSXPVKAVPQKXNPADPISHCNRSEDLDHXAREKESECEVAPKQLHSLSSADELREQPCKIRKAVQKSXSENQXEWNARDDEGVPNSDSSXDSEEQLDVXIKPSXEDRERGISSREDSPQVCDDKGPFKDXRXQEDKRRDVDLDLSDKDYSSDESIMESIKHKVSEPSRSSSLSLSKMDFDDERXWXDLEENLCNHDVVLGNESXYGXPQXCYPNNEIGILDKXIKRKIAPVKRGEDLSKSRRSRSPPXSELMMKFFPSLKPKPKSDSHLGNELKLNISQDQPPGDNARSQVLREKIIELEXEIEKFKAENASLAKLRIERESALEKLRKEIADFEQQKAKELARIEEFKKEEMRKLQKERKVFEKYXXAARXFPDKKEREEIQXLKQQIADLREDLKRKEXKWSSXHSRLRSQIQMLVRENXDLREEIKVMERFRLDAWKRAEAIESSLEVEKKDKLANXSVRFQNSQISSGXQVEKYKKNYLPMQGNPPRRSKSAPPRDLGNLDKGQAASPREPLEPLNFPDPEYKEEEEDQDIQGEISHPDGKVEKVYKNGCRVILFPNGXRKEVSADGKXIXVXFFNGDVKQVMPDQRVIYYYAAAQXXHXXYPEGLEVLHFSSGQIEKHYPDGRKEIXFPDQXVKNLFPDGQEESIFPDGXIVRVQRDGNKLIEFNNGQRELHXAQFKRREYPDGXVKXVYANGHQEXKYRSGRIRVKDKEGNVLMDXEL

SEQ ID NO: 5850 - protein, 196 aa, Homo sapiens
  MOD_RES (1)..(1): Any amino acid
  MOD_RES (63)..(64): Selenocysteine
  MOD_RES (68)..(68): Selenocysteine
  MOD_RES (80)..(80): Selenocysteine
  MOD_RES (97)..(97): Selenocysteine
  MOD_RES (102)..(102): Selenocysteine
  MOD_RES (118)..(118): Selenocysteine
  MOD_RES (156)..(156): Selenocysteine
  MOD_RES (169)..(169): Selenocysteine
XFKAENASLAKLRIERESALEKLRKEIADFEQQKAKELARIEEFKKEEMRKLQKERKVFEKYXXAARXFPDKKEREEIQXLKQQIADLREDLKRKEXKWSSXHSRLRSQIQMLVRENXDLREEIKVMERFRLDAWKRAEAIESSLEVEKKDKLANXSVRFQNSQISSGXQVEKYKKNYLPMQGKRLHDLFIKHFRM

SEQ ID NO: 5851 - protein, 270 aa, Homo sapiens
  MOD_RES (58)..(58): Selenocysteine
  MOD_RES (96)..(96): Selenocysteine
  MOD_RES (101)..(101): Selenocysteine
  MOD_RES (130)..(130): Selenocysteine
  MOD_RES (162)..(162): Selenocysteine
  MOD_RES (180)..(180): Selenocysteine
  MOD_RES (200)..(201): Selenocysteine
  MOD_RES (236)..(236): Selenocysteine
  MOD_RES (240)..(240): Selenocysteine
  MOD_RES (250)..(250): Selenocysteine
MAAASVSAASGSHLSNSFAEPSRSNGSMVRHSSSPYVVYPSDKPFLNSDLRRSPSKPXLAYPESNSRAIFSALKNLQDKIRRLELERIQAEESVKXLSREXIEYKKVLDEQIQERENSKNEESKHNQELXSQLLAAENKCNLLEKQLEYMRNMIKHAEMERXSVLEKQVSLERERQHDQXHVQSQLEKLDLLEQEYNKLXXMQALAEKKMQELEAKLHEEEQERKRMQAKAAELQXGLEXNRLIFEDKAXPCVPNARRIKKKKSKPPEKV

SEQ ID NO: 5852 - protein, 474 aa, Homo sapiens
  MOD_RES (58)..(58): Selenocysteine
  MOD_RES (96)..(96): Selenocysteine
  MOD_RES (101)..(101): Selenocysteine
  MOD_RES (130)..(130): Selenocysteine
  MOD_RES (162)..(162): Selenocysteine
  MOD_RES (180)..(180): Selenocysteine
  MOD_RES (200)..(201): Selenocysteine
  MOD_RES (236)..(236): Selenocysteine
  MOD_RES (240)..(240): Selenocysteine
  MOD_RES (250)..(250): Selenocysteine
  MOD_RES (271)..(271): Selenocysteine
  MOD_RES (323)..(323): Selenocysteine
  MOD_RES (340)..(340): Selenocysteine
  MOD_RES (364)..(364): Selenocysteine
  MOD_RES (390)..(390): Selenocysteine
  MOD_RES (414)..(414): Selenocysteine
  MOD_RES (417)..(417): Selenocysteine
  MOD_RES (431)..(431): Selenocysteine
  MOD_RES (433)..(434): Selenocysteine
MAAASVSAASGSHLSNSFAEPSRSNGSMVRHSSSPYVVYPSDKPFLNSDLRRSPSKPXLAYPESNSRAIFSALKNLQDKIRRLELERIQAEESVKXLSREXIEYKKVLDEQIQERENSKNEESKHNQELXSQLLAAENKCNLLEKQLEYMRNMIKHAEMERXSVLEKQVSLERERQHDQXHVQSQLEKLDLLEQEYNKLXXMQALAEKKMQELEAKLHEEEQERKRMQAKAAELQXGLEXNRLIFEDKAXPCVPNARRIKKKKSKPPEKSXSPSHAVVANVQLVLHLMKQHSKALCNDRVINSIPLAKQVSSRGGKSKKLSVXPPSSNGINEELSEVLQXLQDEFGQMSFDHQQLAKLIQESPXVELKDKLECELEALVGRMEAKANQIXKVRKYQAQLEKQKLEKQKKELKAXKKXLDEERNSSSRSGIXGXXNKKDFMKLRPGEKRRKNLQLLKDMQSIQNSLQSSSLCWDY

SEQ ID NO: 5853 - protein, 500 aa, Homo sapiens
  MOD_RES (58)..(58): Selenocysteine
  MOD_RES (96)..(96): Selenocysteine
  MOD_RES (101)..(101): Selenocysteine
  MOD_RES (130)..(130): Selenocysteine
  MOD_RES (162)..(162): Selenocysteine
  MOD_RES (180)..(180): Selenocysteine
  MOD_RES (200)..(201): Selenocysteine
  MOD_RES (236)..(236): Selenocysteine
  MOD_RES (240)..(240): Selenocysteine
  MOD_RES (250)..(250): Selenocysteine
  MOD_RES (297)..(297): Selenocysteine
  MOD_RES (349)..(349): Selenocysteine
  MOD_RES (366)..(366): Selenocysteine
  MOD_RES (390)..(390): Selenocysteine
  MOD_RES (416)..(416): Selenocysteine
  MOD_RES (440)..(440): Selenocysteine
  MOD_RES (443)..(443): Selenocysteine
  MOD_RES (457)..(457): Selenocysteine
  MOD_RES (459)..(460): Selenocysteine
MAAASVSAASGSHLSNSFAEPSRSNGSMVRHSSSPYVVYPSDKPFLNSDLRRSPSKPXLAYPESNSRAIFSALKNLQDKIRRLELERIQAEESVKXLSREXIEYKKVLDEQIQERENSKNEESKHNQELXSQLLAAENKCNLLEKQLEYMRNMIKHAEMERXSVLEKQVSLERERQHDQXHVQSQLEKLDLLEQEYNKLXXMQALAEKKMQELEAKLHEEEQERKRMQAKAAELQXGLEXNRLIFEDKAXPCVPNARRIKKKKSKPPEKKSSRNYFGAQPHYRLCLGDMPFVAGKSXSPSHAVVANVQLVLHLMKQHSKALCNDRVINSIPLAKQVSSRGGKSKKLSVXPPSSNGINEELSEVLQXLQDEFGQMSFDHQQLAKLIQESPXVELKDKLECELEALVGRMEAKANQIXKVRKYQAQLEKQKLEKQKKELKAXKKXLDEERNSSSRSGIXGXXNKKDFMKLRPGEKRRKNLQLLKDMQSIQNSLQSSSLCWDY

SEQ ID NO: 5854 - protein, 82 aa, Homo sapiens
  MOD_RES (58)..(58): Selenocysteine
  MOD_RES (70)..(70): Selenocysteine
MAAASVSAASGSHLSNSFAEPSRSNGSMVRHSSSPYVVYPSDKPFLNSDLRRSPSKPXLAYPESNSRASXFVFVFGSHIFCS

SEQ ID NO: 5855 - protein, 71 aa, Homo sapiens
  MOD_RES (58)..(58): Selenocysteine
MAAASVSAASGSHLSNSFAEPSRSNGSMVRHSSSPYVVYPSDKPFLNSDLRRSPSKPXLAYPESNSRESSR

SEQ ID NO: 5856 - protein, 41 aa, Homo sapiens
MAAASVSAASGSHLSPYFLLLRIFKIRFDAWNLRGFRQKKV

SEQ ID NO: 5857 - protein, 52 aa, Homo sapiens
  MOD_RES (16)..(16): Selenocysteine
  MOD_RES (33)..(33): Selenocysteine
  MOD_RES (35)..(35): Selenocysteine
MAAASVSAASGSHLSXRGWALDYSSVVGHGICXVXQPVSFSRKKREKIVQQI

SEQ ID NO: 5858 - protein, 198 aa, Homo sapiens
  MOD_RES (3)..(3): Selenocysteine
  MOD_RES (49)..(49): Selenocysteine
  MOD_RES (87)..(87): Selenocysteine
  MOD_RES (92)..(92): Selenocysteine
  MOD_RES (121)..(121): Selenocysteine
  MOD_RES (153)..(153): Selenocysteine
  MOD_RES (171)..(171): Selenocysteine
  MOD_RES (191)..(192): Selenocysteine
MLXRIDNSFAEPSRSNGSMVRHSSSPYVVYPSDKPFLNSDLRRSPSKPXLAYPESNSRAIFSALKNLQDKIRRLELERIQAEESVKXLSREXIEYKKVLDEQIQERENSKNEESKHNQELXSQLLAAENKCNLLEKQLEYMRNMIKHAEMERXSVLEKQVSLERERQHDQXHVQSQLEKLDLLEQEYNKLXXMQALAE

SEQ ID NO: 5859 - protein, 491 aa, Homo sapiens
  MOD_RES (3)..(3): Selenocysteine
  MOD_RES (49)..(49): Selenocysteine
  MOD_RES (87)..(87): Selenocysteine
  MOD_RES (92)..(92): Selenocysteine
  MOD_RES (121)..(121): Selenocysteine
  MOD_RES (153)..(153): Selenocysteine
  MOD_RES (171)..(171): Selenocysteine
  MOD_RES (191)..(192): Selenocysteine
  MOD_RES (227)..(227): Selenocysteine
  MOD_RES (231)..(231): Selenocysteine
  MOD_RES (241)..(241): Selenocysteine
  MOD_RES (288)..(288): Selenocysteine
  MOD_RES (340)..(340): Selenocysteine
  MOD_RES (357)..(357): Selenocysteine
  MOD_RES (381)..(381): Selenocysteine
  MOD_RES (407)..(407): Selenocysteine
  MOD_RES (431)..(431): Selenocysteine
  MOD_RES (434)..(434): Selenocysteine
  MOD_RES (448)..(448): Selenocysteine
  MOD_RES (450)..(451): Selenocysteine
MLXRIDNSFAEPSRSNGSMVRHSSSPYVVYPSDKPFLNSDLRRSPSKPXLAYPESNSRAIFSALKNLQDKIRRLELERIQAEESVKXLSREXIEYKKVLDEQIQERENSKNEESKHNQELXSQLLAAENKCNLLEKQLEYMRNMIKHAEMERXSVLEKQVSLERERQHDQXHVQSQLEKLDLLEQEYNKLXXMQALAEKKMQELEAKLHEEEQERKRMQAKAAELQXGLEXNRLIFEDKAXPCVPNARRIKKKKSKPPEKKSSRNYFGAQPHYRLCLGDMPFVAGKSXSPSHAVVANVQLVLHLMKQHSKALCNDRVINSIPLAKQVSSRGGKSKKLSVXPPSSNGINEELSEVLQXLQDEFGQMSFDHQQLAKLIQESPXVELKDKLECELEALVGRMEAKANQIXKVRKYQAQLEKQKLEKQKKELKAXKKXLDEERNSSSRSGIXGXXNKKDFMKLRPGEKRRKNLQLLKDMQSIQNSLQSSSLCWDY

SEQ ID NO: 5860 - protein, 205 aa, Homo sapiens
  MOD_RES (31)..(31): Selenocysteine
  MOD_RES (69)..(69): Selenocysteine
  MOD_RES (74)..(74): Selenocysteine
  MOD_RES (103)..(103): Selenocysteine
  MOD_RES (135)..(135): Selenocysteine
  MOD_RES (153)..(153): Selenocysteine
  MOD_RES (173)..(174): Selenocysteine
MVRHSSSPYVVYPSDKPFLNSDLRRSPSKPXLAYPESNSRAIFSALKNLQDKIRRLELERIQAEESVKXLSREXIEYKKVLDEQIQERENSKNEESKHNQELXSQLLAAENKCNLLEKQLEYMRNMIKHAEMERXSVLEKQVSLERERQHDQXHVQSQLEKLDLLEQEYNKLXXMQALAEKKMQELEAKLHEEEQERKRMQAKAA

SEQ ID NO: 5861 - protein, 473 aa, Homo sapiens
  MOD_RES (31)..(31): Selenocysteine
  MOD_RES (69)..(69): Selenocysteine
  MOD_RES (74)..(74): Selenocysteine
  MOD_RES (103)..(103): Selenocysteine
  MOD_RES (135)..(135): Selenocysteine
  MOD_RES (153)..(153): Selenocysteine
  MOD_RES (173)..(174): Selenocysteine
  MOD_RES (209)..(209): Selenocysteine
  MOD_RES (213)..(213): Selenocysteine
  MOD_RES (223)..(223): Selenocysteine
  MOD_RES (270)..(270): Selenocysteine
  MOD_RES (322)..(322): Selenocysteine
  MOD_RES (339)..(339): Selenocysteine
  MOD_RES (363)..(363): Selenocysteine
  MOD_RES (389)..(389): Selenocysteine
  MOD_RES (413)..(413): Selenocysteine
  MOD_RES (416)..(416): Selenocysteine
  MOD_RES (430)..(430): Selenocysteine
  MOD_RES (432)..(433): Selenocysteine
MVRHSSSPYVVYPSDKPFLNSDLRRSPSKPXLAYPESNSRAIFSALKNLQDKIRRLELERIQAEESVKXLSREXIEYKKVLDEQIQERENSKNEESKHNQELXSQLLAAENKCNLLEKQLEYMRNMIKHAEMERXSVLEKQVSLERERQHDQXHVQSQLEKLDLLEQEYNKLXXMQALAEKKMQELEAKLHEEEQERKRMQAKAAELQXGLEXNRLIFEDKAXPCVPNARRIKKKKSKPPEKKSSRNYFGAQPHYRLCLGDMPFVAGKSXSPSHAVVANVQLVLHLMKQHSKALCNDRVINSIPLAKQVSSRGGKSKKLSVXPPSSNGINEELSEVLQXLQDEFGQMSFDHQQLAKLIQESPXVELKDKLECELEALVGRMEAKANQIXKVRKYQAQLEKQKLEKQKKELKAXKKXLDEERNSSSRSGIXGXXNKKDFMKLRPGEKRRKNLQLLKDMQSIQNSLQSSSLCWDY

SEQ ID NO: 5862 - protein, 134 aa, Homo sapiens
  MOD_RES (1)..(1): Selenocysteine
  MOD_RES (21)..(22): Selenocysteine
  MOD_RES (56)..(56): Selenocysteine
  MOD_RES (108)..(108): Selenocysteine
  MOD_RES (125)..(125): Selenocysteine
XHVQSQLEKLDLLEQEYNKLXXMQALAEKKMQELEAKLHEEEQERKRMQAKAAESXSPSHAVVANVQLVLHLMKQHSKALCNDRVINSIPLAKQVSSRGGKSKKLSVXPPSSNGINEELSEVLQXLQDEFGQMS

SEQ ID NO: 5863 - protein, 254 aa, Homo sapiens
  MOD_RES (1)..(1): Any amino acid
  MOD_RES (16)..(17): Selenocysteine
  MOD_RES (52)..(52): Selenocysteine
  MOD_RES (56)..(56): Selenocysteine
  MOD_RES (66)..(66): Selenocysteine
  MOD_RES (87)..(87): Selenocysteine
  MOD_RES (139)..(139): Selenocysteine
  MOD_RES (156)..(156): Selenocysteine
  MOD_RES (180)..(180): Selenocysteine
  MOD_RES (206)..(206): Selenocysteine
  MOD_RES (230)..(230): Selenocysteine
  MOD_RES (233)..(233): Selenocysteine
  MOD_RES (247)..(247): Selenocysteine
  MOD_RES (249)..(250): Selenocysteine
XLEKLDLLEQEYNKLXXMQALAEKKMQELEAKLHEEEQERKRMQAKAAELQXGLEXNRLIFEDKAXPCVPNARRIKKKKSKPPEKSXSPSHAVVANVQLVLHLMKQHSKALCNDRVINSIPLAKQVSSRGGKSKKLSVXPPSSNGINEELSEVLQXLQDEFGQMSFDHQQLAKLIQESPXVELKDKLECELEALVGRMEAKANQIXKVRKYQAQLEKQKLEKQKKELKAXKKXLDEERNSSSRSGIXGXXNKKD

SEQ ID NO: 5864 - protein, 194 aa, Homo sapiens
  MOD_RES (12)..(12): Selenocysteine
  MOD_RES (14)..(14): Selenocysteine
  MOD_RES (24)..(24): Selenocysteine
  MOD_RES (36)..(36): Selenocysteine
  MOD_RES (94)..(94): Selenocysteine
  MOD_RES (103)..(103): Selenocysteine
  MOD_RES (107)..(107): Selenocysteine
  MOD_RES (167)..(167): Selenocysteine
DLDSVLSQLNFXHXSEDLLQAEVXCLEGSLESVSAXCKQLSQELMEKYEELKRMEAHNNEYKAEIKKLKEQILQGEQSYSSALEGMKMEISHLXQELHQRDIXIASXKGSSSDMEKRLRAEMQKAEDKAVEHKEILDQLESLKLENRHLSEMVMKLELGLHERWGFXMLSSLVLNFGIQAIRQPQRPKVLELQV

SEQ ID NO: 5865 - protein, 63 aa, Homo sapiens
  MOD_RES (19)..(19): Selenocysteine
  MOD_RES (47)..(47): Selenocysteine
  MOD_RES (52)..(52): Selenocysteine
MEALLEGIQNRGHGGGFLXSCEAELQELMKQIDIMVAHKKSEWEGRXHALEXCLKIREQELKS

SEQ ID NO: 5866 - protein, 162 aa, Homo sapiens
  MOD_RES (19)..(19): Selenocysteine
  MOD_RES (47)..(47): Selenocysteine
  MOD_RES (52)..(52): Selenocysteine
  MOD_RES (71)..(71): Selenocysteine
  MOD_RES (93)..(93): Selenocysteine
  MOD_RES (129)..(129): Selenocysteine
  MOD_RES (143)..(143): Selenocysteine
MEALLEGIQNRGHGGGFLXSCEAELQELMKQIDIMVAHKKSEWEGRXHALEXCLKIREQELKSLRSQLDVXHKEVGMLHQQVEEHEKIKQEMXMEYKQELKKLHEELCILKRSYEKLQKKQMREFRGNXKNHREDRSEIERLXAKIEEFRQKSLDWEKQRLI

SEQ ID NO: 5867 - protein, 475 aa, Homo sapiens
  MOD_RES (19)..(19): Selenocysteine
  MOD_RES (47)..(47): Selenocysteine
  MOD_RES (52)..(52): Selenocysteine
  MOD_RES (71)..(71): Selenocysteine
  MOD_RES (93)..(93): Selenocysteine
  MOD_RES (129)..(129): Selenocysteine
  MOD_RES (143)..(143): Selenocysteine
  MOD_RES (219)..(219): Selenocysteine
  MOD_RES (231)..(231): Selenocysteine
  MOD_RES (240)..(240): Selenocysteine
  MOD_RES (243)..(243): Selenocysteine
  MOD_RES (300)..(300): Selenocysteine
  MOD_RES (302)..(302): Selenocysteine
  MOD_RES (317)..(317): Selenocysteine
  MOD_RES (375)..(375): Selenocysteine
  MOD_RES (384)..(384): Selenocysteine
  MOD_RES (388)..(388): Selenocysteine
  MOD_RES (448)..(448): Selenocysteine
MEALLEGIQNRGHGGGFLXSCEAELQELMKQIDIMVAHKKSEWEGRXHALEXCLKIREQELKSLRSQLDVXHKEVGMLHQQVEEHEKIKQEMXMEYKQELKKLHEELCILKRSYEKLQKKQMREFRGNXKNHREDRSEIERLXAKIEEFRQKSLDWEKQRLIYQQQVSSLEAQRKALAEQSEIIQAQLVNRKQKLESVELSSQSEIQHLSSKLERANDXICANELEIERLXMRVNDLVGXSMXVLQEQQQKEEKLRESEKLLEALQEEKRELKAALQSQENLIHEARIQKEKLQEKVKAXNXQHAVEAISLESVSAXCKQLSQELMEKYEELKRMEAHNNEYKAEIKKLKEQILQGEQSYSSALEGMKMEISHLXQELHQRDIXIASXKGSSSDMEKRLRAEMQKAEDKAVEHKEILDQLESLKLENRHLSEMVMKLELGLHERWGFXMLSSLVLNFGIQAIRQPQRPKVLELQV

SEQ ID NO: 5868 - protein, 495 aa, Homo sapiens
  MOD_RES (19)..(19): Selenocysteine
  MOD_RES (47)..(47): Selenocysteine
  MOD_RES (52)..(52): Selenocysteine
  MOD_RES (71)..(71): Selenocysteine
  MOD_RES (93)..(93): Selenocysteine
  MOD_RES (129)..(129): Selenocysteine
  MOD_RES (143)..(143): Selenocysteine
  MOD_RES (219)..(219): Selenocysteine
  MOD_RES (231)..(231): Selenocysteine
  MOD_RES (240)..(240): Selenocysteine
  MOD_RES (243)..(243): Selenocysteine
  MOD_RES (300)..(300): Selenocysteine
  MOD_RES (302)..(302): Selenocysteine
  MOD_RES (317)..(317): Selenocysteine
  MOD_RES (375)..(375): Selenocysteine
  MOD_RES (384)..(384): Selenocysteine
  MOD_RES (388)..(388): Selenocysteine
  MOD_RES (456)..(456): Selenocysteine
  MOD_RES (487)..(487): Selenocysteine
  MOD_RES (492)..(492): Selenocysteine
MEALLEGIQNRGHGGGFLXSCEAELQELMKQIDIMVAHKKSEWEGRXHALEXCLKIREQELKSLRSQLDVXHKEVGMLHQQVEEHEKIKQEMXMEYKQELKKLHEELCILKRSYEKLQKKQMREFRGNXKNHREDRSEIERLXAKIEEFRQKSLDWEKQRLIYQQQVSSLEAQRKALAEQSEIIQAQLVNRKQKLESVELSSQSEIQHLSSKLERANDXICANELEIERLXMRVNDLVGXSMXVLQEQQQKEEKLRESEKLLEALQEEKRELKAALQSQENLIHEARIQKEKLQEKVKAXNXQHAVEAISLESVSAXCKQLSQELMEKYEELKRMEAHNNEYKAEIKKLKEQILQGEQSYSSALEGMKMEISHLXQELHQRDIXIASXKGSSSDMEKRLRAEMQKAEDKAVEHKEILDQLESLKLENRHLSEMVMKLELGLHECSLPVSPLGSIAXRFLEEEELRSHHILERLDAHIEELKRESEKXVRQFXALK

SEQ ID NO: 5869 - protein, 541 aa, Homo sapiens
  MOD_RES (19)..(19): Selenocysteine
  MOD_RES (47)..(47): Selenocysteine
  MOD_RES (52)..(52): Selenocysteine
  MOD_RES (71)..(71): Selenocysteine
  MOD_RES (93)..(93): Selenocysteine
  MOD_RES (129)..(129): Selenocysteine
  MOD_RES (143)..(143): Selenocysteine
  MOD_RES (219)..(219): Selenocysteine
  MOD_RES (231)..(231): Selenocysteine
  MOD_RES (240)..(240): Selenocysteine
  MOD_RES (243)..(243): Selenocysteine
  MOD_RES (300)..(300): Selenocysteine
  MOD_RES (302)..(302): Selenocysteine
  MOD_RES (322)..(322): Selenocysteine
  MOD_RES (339)..(339): Selenocysteine
  MOD_RES (341)..(341): Selenocysteine
  MOD_RES (351)..(351): Selenocysteine
  MOD_RES (363)..(363): Selenocysteine
  MOD_RES (421)..(421): Selenocysteine
  MOD_RES (430)..(430): Selenocysteine
  MOD_RES (434)..(434): Selenocysteine
  MOD_RES (502)..(502): Selenocysteine
  MOD_RES (533)..(533): Selenocysteine
  MOD_RES (538)..(538): Selenocysteine
MEALLEGIQNRGHGGGFLXSCEAELQELMKQIDIMVAHKKSEWEGRXHALEXCLKIREQELKSLRSQLDVXHKEVGMLHQQVEEHEKIKQEMXMEYKQELKKLHEELCILKRSYEKLQKKQMREFRGNXKNHREDRSEIERLXAKIEEFRQKSLDWEKQRLIYQQQVSSLEAQRKALAEQSEIIQAQLVNRKQKLESVELSSQSEIQHLSSKLERANDXICANELEIERLXMRVNDLVGXSMXVLQEQQQKEEKLRESEKLLEALQEEKRELKAALQSQENLIHEARIQKEKLQEKVKAXNXQHAVEAIRPREESLAEKKYXSQGQGDLDSVLSQLNFXHXSEDLLQAEVXCLEGSLESVSAXCKQLSQELMEKYEELKRMEAHNNEYKAEIKKLKEQILQGEQSYSSALEGMKMEISHLXQELHQRDIXIASXKGSSSDMEKRLRAEMQKAEDKAVEHKEILDQLESLKLENRHLSEMVMKLELGLHECSLPVSPLGSIAXRFLEEEELRSHHILERLDAHIEELKRESEKXVRQFXALK

SEQ ID NO: 5870 - protein, 703 aa, Homo sapiens
  MOD_RES (19)..(19): Selenocysteine
  MOD_RES (47)..(47): Selenocysteine
  MOD_RES (52)..(52): Selenocysteine
  MOD_RES (71)..(71): Selenocysteine
  MOD_RES (93)..(93): Selenocysteine
  MOD_RES (129)..(129): Selenocysteine
  MOD_RES (143)..(143): Selenocysteine
  MOD_RES (219)..(219): Selenocysteine
  MOD_RES (231)..(231): Selenocysteine
  MOD_RES (240)..(240): Selenocysteine
  MOD_RES (243)..(243): Selenocysteine
  MOD_RES (300)..(300): Selenocysteine
  MOD_RES (302)..(302): Selenocysteine
  MOD_RES (322)..(322): Selenocysteine
  MOD_RES (339)..(339): Selenocysteine
  MOD_RES (341)..(341): Selenocysteine
  MOD_RES (351)..(351): Selenocysteine
  MOD_RES (363)..(363): Selenocysteine
  MOD_RES (421)..(421): Selenocysteine
  MOD_RES (430)..(430): Selenocysteine
  MOD_RES (434)..(434): Selenocysteine
  MOD_RES (523)..(523): Selenocysteine
  MOD_RES (531)..(531): Selenocysteine
  MOD_RES (545)..(545): Selenocysteine
  MOD_RES (549)..(550): Selenocysteine
  MOD_RES (555)..(555): Selenocysteine
  MOD_RES (560)..(560): Selenocysteine
  MOD_RES (571)..(571): Selenocysteine
  MOD_RES (576)..(576): Selenocysteine
  MOD_RES (609)..(609): Selenocysteine
  MOD_RES (613)..(613): Selenocysteine
  MOD_RES (620)..(620): Selenocysteine
  MOD_RES (629)..(629): Selenocysteine
  MOD_RES (637)..(637): Selenocysteine
  MOD_RES (664)..(664): Selenocysteine
  MOD_RES (695)..(695): Selenocysteine
  MOD_RES (700)..(700): Selenocysteine
MEALLEGIQNRGHGGGFLXSCEAELQELMKQIDIMVAHKKSEWEGRXHALEXCLKIREQELKSLRSQLDVXHKEVGMLHQQVEEHEKIKQEMXMEYKQELKKLHEELCILKRSYEKLQKKQMREFRGNXKNHREDRSEIERLXAKIEEFRQKSLDWEKQRLIYQQQVSSLEAQRKALAEQSEIIQAQLVNRKQKLESVELSSQSEIQHLSSKLERANDXICANELEIERLXMRVNDLVGXSMXVLQEQQQKEEKLRESEKLLEALQEEKRELKAALQSQENLIHEARIQKEKLQEKVKAXNXQHAVEAIRPREESLAEKKYXSQGQGDLDSVLSQLNFXHXSEDLLQAEVXCLEGSLESVSAXCKQLSQELMEKYEELKRMEAHNNEYKAEIKKLKEQILQGEQSYSSALEGMKMEISHLXQELHQRDIXIASXKGSSSDMEKRLRAEMQKAEDKAVEHKEILDQLESLKLENRHLSEMVMKLELGLHEAKEISLADLQENYIEALNKLVSENQQLQKDLMNXKSQLEISXQMCKKQNDRIFKPXHSRXXEFKNXEFKPXHGQHRHDGIKXEHYKXDLHSPRGQASDSINPMSRVLSPLSPQISPCSSXRSLXSYSLCKXHSLPSALDXNEANFSDXMSESMNDQEEFISSCSLPVSPLGSIAXRFLEEEELRSHHILERLDAHIEELKRESEKXVRQFXALK

SEQ ID NO: 5871 - protein, 245 aa, Homo sapiens
  MOD_RES (1)..(1): Any amino acid
  MOD_RES (35)..(35): Selenocysteine
  MOD_RES (37)..(37): Selenocysteine
  MOD_RES (52)..(52): Selenocysteine
  MOD_RES (110)..(110): Selenocysteine
  MOD_RES (119)..(119): Selenocysteine
  MOD_RES (123)..(123): Selenocysteine
  MOD_RES (212)..(212): Selenocysteine
  MOD_RES (220)..(220): Selenocysteine
  MOD_RES (234)..(234): Selenocysteine
  MOD_RES (238)..(239): Selenocysteine
  MOD_RES (244)..(244): Selenocysteine
XEEKRELKAALQSQENLIHEARIQKEKLQEKVKAXNXQHAVEAISLESVSAXCKQLSQELMEKYEELKRMEAHNNEYKAEIKKLKEQILQGEQSYSSALEGMKMEISHLXQELHQRDIXIASXKGSSSDMEKRLRAEMQKAEDKAVEHKEILDQLESLKLENRHLSEMVMKLELGLHEAKEISLADLQENYIEALNKLVSENQQLQKDLMNXKSQLEISXQMCKKQNDRIFKPXHSRXXEFKNXE

SEQ ID NO: 5872 - protein, 155 aa, Homo sapiens
  MOD_RES (1)..(1): Any amino acid
  MOD_RES (18)..(18): Selenocysteine
  MOD_RES (54)..(54): Selenocysteine
  MOD_RES (68)..(68): Selenocysteine
  MOD_RES (125)..(125): Selenocysteine
  MOD_RES (137)..(137): Selenocysteine
  MOD_RES (146)..(146): Selenocysteine
  MOD_RES (149)..(149): Selenocysteine
XMLHQQVEEHEKIKQEMXMEYKQELKKLHEELCILKRSYEKLQKKQMREFRGNXKNHREDRSEIERLXAKIEEFRQKSLDWEKQRLIYQQQAQLVNRKQKLESVELSSQSEIQHLSSKLERANDXICANELEIERLXMRVNDLVGXSMXVLQEQQ

SEQ ID NO: 5873 - protein, 267 aa, Homo sapiens
  MOD_RES (17)..(18): Selenocysteine
  MOD_RES (44)..(44): Selenocysteine
  MOD_RES (66)..(66): Selenocysteine
  MOD_RES (109)..(109): Selenocysteine
  MOD_RES (142)..(142): Selenocysteine
  MOD_RES (161)..(161): Selenocysteine
  MOD_RES (164)..(164): Selenocysteine
  MOD_RES (170)..(170): Selenocysteine
  MOD_RES (172)..(172): Selenocysteine
  MOD_RES (204)..(204): Selenocysteine
  MOD_RES (215)..(216): Selenocysteine
  MOD_RES (224)..(224): Selenocysteine
  MOD_RES (245)..(245): Selenocysteine
MHLLLFQLLVLLPLGKXXRHQDGRQNQSSLSPVLLPRNQRELPXGNHEEAEEKPDLFVAVPHLVAXSPAGEGQRQREKMLSRFGRFWKKPEREMHPSRDSDSEPFPPGXQSLIQPIDGMKMEKSPLREEAKKFWHHFMFRKXPASQGVILPIKSHEVHWEXCRXVPFSQXIXHEGCEKVVVQNNLCFGKCGSVHFPGAAQHSHXSCSHCLPAKFXXMHLPLNCXELSSVIKVVMLVEECQCKVKXEHEDGHILHAGSQDSFIPGVSA

SEQ ID NO: 5874 - protein, 377 aa, Homo sapiens
  MOD_RES (4)..(4): Selenocysteine
  MOD_RES (21)..(21): Selenocysteine
  MOD_RES (42)..(42): Selenocysteine
  MOD_RES (62)..(62): Selenocysteine
  MOD_RES (74)..(74): Selenocysteine
  MOD_RES (83)..(83): Selenocysteine
  MOD_RES (90)..(90): Selenocysteine
  MOD_RES (132)..(132): Selenocysteine
  MOD_RES (166)..(166): Selenocysteine
  MOD_RES (207)..(207): Selenocysteine
  MOD_RES (224)..(224): Selenocysteine
  MOD_RES (251)..(251): Selenocysteine
  MOD_RES (266)..(266): Selenocysteine
  MOD_RES (279)..(279): Selenocysteine
  MOD_RES (323)..(323): Selenocysteine
  MOD_RES (335)..(335): Selenocysteine
  MOD_RES (341)..(341): Selenocysteine
  MOD_RES (345)..(345): Selenocysteine
  MOD_RES (366)..(366): Selenocysteine
  MOD_RES (374)..(374): Selenocysteine
  MOD_RES (376)..(376): Selenocysteine
MLQXLYDYFWWERLWLPVNLXWADLEDRDGRVYAKASDLYIXLPLALLFLIVRYFFELYVAXPLAALLNIKEKXRLRAPPNAXLEHFYLXSGKQPKQSGLSGRQVERWFRRRRNQDRPSLLKKFREASWRFXFYLIAFIAGMAVIVDKPWFYDMKKVWEGYPIQSXIPSQYWYYMIELSFYWSLLFSIASDVKRKDFKEQIIHHVAXIILISFSWFANYIRAGXLIMALHDSSDYLLESAKMFNYAGWKNXCNNIFIVFAIVFIIXRLVILPFWILHCXLVYPLELYPAFFGYYFFNSMMGVLQLLHIFWAYLILRMAHKFIXGKELGGVASPEXSGQGSXIRKXQFLRKRQFKKGWEEGCPLKKXSSAFNGPXAXE

SEQ ID NO: 5875 - protein, 129 aa, Homo sapiens
  MOD_RES (4)..(4): Selenocysteine
  MOD_RES (21)..(21): Selenocysteine
  MOD_RES (42)..(42): Selenocysteine
  MOD_RES (62)..(62): Selenocysteine
  MOD_RES (74)..(74): Selenocysteine
  MOD_RES (83)..(83): Selenocysteine
  MOD_RES (90)..(90): Selenocysteine
MLQXLYDYFWWERLWLPVNLXWADLEDRDGRVYAKASDLYIXLPLALLFLIVRYFFELYVAXPLAALLNIKEKXRLRAPPNAXLEHFYLXSGKQPKQVEVELLSRQSGLSGRQVERWFRRRRNQDRPSL

SEQ ID NO: 5876 - protein, 192 aa, Homo sapiens
  MOD_RES (4)..(4): Selenocysteine
  MOD_RES (21)..(21): Selenocysteine
  MOD_RES (42)..(42): Selenocysteine
  MOD_RES (62)..(62): Selenocysteine
  MOD_RES (74)..(74): Selenocysteine
  MOD_RES (83)..(83): Selenocysteine
  MOD_RES (90)..(90): Selenocysteine
  MOD_RES (141)..(141): Selenocysteine
  MOD_RES (175)..(175): Selenocysteine
MLQXLYDYFWWERLWLPVNLXWADLEDRDGRVYAKASDLYIXLPLALLFLIVRYFFELYVAXPLAALLNIKEKXRLRAPPNAXLEHFYLXSGKQPKQVEVELLSRQSGLSGRQVERWFRRRRNQDRPSLLKKFREASWRFXFYLIAFIAGMAVIVDKPWFYDMKKVWEGYPIQSXIPSQYWYYMIELSFYWS

SEQ ID NO: 5877 - protein, 223 aa, Homo sapiens
  MOD_RES (4)..(4): Selenocysteine
  MOD_RES (21)..(21): Selenocysteine
  MOD_RES (42)..(42): Selenocysteine
  MOD_RES (62)..(62): Selenocysteine
  MOD_RES (74)..(74): Selenocysteine
  MOD_RES (83)..(83): Selenocysteine
  MOD_RES (90)..(90): Selenocysteine
  MOD_RES (141)..(141): Selenocysteine
  MOD_RES (175)..(175): Selenocysteine
  MOD_RES (216)..(216): Selenocysteine
MLQXLYDYFWWERLWLPVNLXWADLEDRDGRVYAKASDLYIXLPLALLFLIVRYFFELYVAXPLAALLNIKEKXRLRAPPNAXLEHFYLXSGKQPKQVEVELLSRQSGLSGRQVERWFRRRRNQDRPSLLKKFREASWRFXFYLIAFIAGMAVIVDKPWFYDMKKVWEGYPIQSXIPSQYWYYMIELSFYWSLLFSIASDVKRKDFKEQIIHHVAXIILISFS

SEQ ID NO: 5878 - protein, 304 aa, Homo sapiens
  MOD_RES (4)..(4): Selenocysteine
  MOD_RES (21)..(21): Selenocysteine
  MOD_RES (42)..(42): Selenocysteine
  MOD_RES (62)..(62): Selenocysteine
  MOD_RES (74)..(74): Selenocysteine
  MOD_RES (83)..(83): Selenocysteine
  MOD_RES (90)..(90): Selenocysteine
  MOD_RES (141)..(141): Selenocysteine
  MOD_RES (175)..(175): Selenocysteine
  MOD_RES (216)..(216): Selenocysteine
  MOD_RES (233)..(233): Selenocysteine
  MOD_RES (260)..(260): Selenocysteine
  MOD_RES (275)..(275): Selenocysteine
  MOD_RES (288)..(288): Selenocysteine
MLQXLYDYFWWERLWLPVNLXWADLEDRDGRVYAKASDLYIXLPLALLFLIVRYFFELYVAXPLAALLNIKEKXRLRAPPNAXLEHFYLXSGKQPKQVEVELLSRQSGLSGRQVERWFRRRRNQDRPSLLKKFREASWRFXFYLIAFIAGMAVIVDKPWFYDMKKVWEGYPIQSXIPSQYWYYMIELSFYWSLLFSIASDVKRKDFKEQIIHHVAXIILISFSWFANYIRAGXLIMALHDSSDYLLESAKMFNYAGWKNXCNNIFIVFAIVFIIXRLVILPFWILHCXLVYPLELYPAFFGYYF

SEQ ID NO: 5879 - protein, 380 aa, Homo sapiens
  MOD_RES (4)..(4): Selenocysteine
  MOD_RES (21)..(21): Selenocysteine
  MOD_RES (42)..(42): Selenocysteine
  MOD_RES (62)..(62): Selenocysteine
  MOD_RES (74)..(74): Selenocysteine
  MOD_RES (83)..(83): Selenocysteine
  MOD_RES (90)..(90): Selenocysteine
  MOD_RES (141)..(141): Selenocysteine
  MOD_RES (175)..(175): Selenocysteine
  MOD_RES (216)..(216): Selenocysteine
  MOD_RES (233)..(233): Selenocysteine
  MOD_RES (260)..(260): Selenocysteine
  MOD_RES (275)..(275): Selenocysteine
  MOD_RES (288)..(288): Selenocysteine
  MOD_RES (332)..(332): Selenocysteine
  MOD_RES (346)..(346): Selenocysteine
MLQXLYDYFWWERLWLPVNLXWADLEDRDGRVYAKASDLYIXLPLALLFLIVRYFFELYVAXPLAALLNIKEKXRLRAPPNAXLEHFYLXSGKQPKQVEVELLSRQSGLSGRQVERWFRRRRNQDRPSLLKKFREASWRFXFYLIAFIAGMAVIVDKPWFYDMKKVWEGYPIQSXIPSQYWYYMIELSFYWSLLFSIASDVKRKDFKEQIIHHVAXIILISFSWFANYIRAGXLIMALHDSSDYLLESAKMFNYAGWKNXCNNIFIVFAIVFIIXRLVILPFWILHCXLVYPLELYPAFFGYYFFNSMMGVLQLLHIFWAYLILRMAHKFIXGKLVEDERSDREEXESSEGEEAAAGGGAKSRPLANGHPILNNNHRKND

SEQ ID NO: 5880 - protein, 249 aa, Homo sapiens
  MOD_RES (4)..(4): Selenocysteine
  MOD_RES (21)..(21): Selenocysteine
  MOD_RES (42)..(42): Selenocysteine
  MOD_RES (62)..(62): Selenocysteine
  MOD_RES (74)..(74): Selenocysteine
  MOD_RES (83)..(83): Selenocysteine
  MOD_RES (90)..(90): Selenocysteine
  MOD_RES (141)..(141): Selenocysteine
  MOD_RES (175)..(175): Selenocysteine
  MOD_RES (216)..(216): Selenocysteine
  MOD_RES (233)..(233): Selenocysteine
MLQXLYDYFWWERLWLPVNLXWADLEDRDGRVYAKASDLYIXLPLALLFLIVRYFFELYVAXPLAALLNIKEKXRLRAPPNAXLEHFYLXSGKQPKQVEVELLSRQSGLSGRQVERWFRRRRNQDRPSLLKKFREASWRFXFYLIAFIAGMAVIVDKPWFYDMKKVWEGYPIQSXIPSQYWYYMIELSFYWSLLFSIASDVKRKDFKEQIIHHVAXIILISFSWFANYIRAGXLIMALHDSSDYLLEVR

SEQ ID NO: 5881 - protein, 228 aa, Homo sapiens
  MOD_RES (1)..(1): Any amino acid
  MOD_RES (23)..(23): Selenocysteine
  MOD_RES (64)..(64): Selenocysteine
  MOD_RES (81)..(81): Selenocysteine
  MOD_RES (108)..(108): Selenocysteine
  MOD_RES (123)..(123): Selenocysteine
  MOD_RES (136)..(136): Selenocysteine
  MOD_RES (180)..(180): Selenocysteine
  MOD_RES (194)..(194): Selenocysteine
XSLQKPWFYDMKKVWEGYPIQSXIPSQYWYYMIELSFYWSLLFSIASDVKRKDFKEQIIHHVAXIILISFSWFANYIRAGXLIMALHDSSDYLLESAKMFNYAGWKNXCNNIFIVFAIVFIIXRLVILPFWILHCXLVYPLELYPAFFGYYFFNSMMGVLQLLHIFWAYLILRMAHKFIXGKLVEDERSDREEXESSEGEEAAAGGGAKSRPLANGHPILNNNHRKND

SEQ ID NO: 5882 - protein, 15 aa, Homo sapiens
  MOD_RES (4)..(4): Selenocysteine
MFWXFKEWFWLERFW

SEQ ID NO: 5883 - protein, 162 aa, Homo sapiens
  MOD_RES (4)..(4): Selenocysteine
  MOD_RES (19)..(19): Selenocysteine
  MOD_RES (42)..(42): Selenocysteine
  MOD_RES (73)..(73): Selenocysteine
  MOD_RES (78)..(78): Selenocysteine
  MOD_RES (81)..(81): Selenocysteine
  MOD_RES (91)..(91): Selenocysteine
  MOD_RES (97)..(97): Selenocysteine
  MOD_RES (109)..(109): Selenocysteine
  MOD_RES (146)..(146): Selenocysteine
MFWXFKEWFWLERFWLPPXIKWSDLEDHDGLVFVKPSHLYVXIPYAFLLLIIRRVFEKFVASPLAKSFGIKEXVRKVXPNXVLENFFKHSXRQPLQXDIYGLAKKCNLXERQVERWFRSRRNQERPSRLKKFQEACWRFAFYLMIXVAGIAFLYDKPWLYDL

SEQ ID NO: 5884 - protein, 383 aa, Homo sapiens
  MOD_RES (4)..(4): Selenocysteine
  MOD_RES (19)..(19): Selenocysteine
  MOD_RES (42)..(42): Selenocysteine
  MOD_RES (73)..(73): Selenocysteine
  MOD_RES (78)..(78): Selenocysteine
  MOD_RES (81)..(81): Selenocysteine
  MOD_RES (91)..(91): Selenocysteine
  MOD_RES (97)..(97): Selenocysteine
  MOD_RES (109)..(109): Selenocysteine
  MOD_RES (146)..(146): Selenocysteine
  MOD_RES (232)..(232): Selenocysteine
  MOD_RES (257)..(257): Selenocysteine
  MOD_RES (259)..(259): Selenocysteine
  MOD_RES (262)..(262): Selenocysteine
  MOD_RES (269)..(269): Selenocysteine
  MOD_RES (287)..(287): Selenocysteine
  MOD_RES (357)..(357): Selenocysteine
MFWXFKEWFWLERFWLPPXIKWSDLEDHDGLVFVKPSHLYVXIPYAFLLLIIRRVFEKFVASPLAKSFGIKEXVRKVXPNXVLENFFKHSXRQPLQXDIYGLAKKCNLXERQVERWFRSRRNQERPSRLKKFQEACWRFAFYLMIXVAGIAFLYDKPWLYDLWEVWNGYPKQPLLPSQYWYYILEMSFYWSLLFRLGFDVKRKDFLAHIIHHLAAISLMSFSWCANYIRSGXLVMIVHDVADIWLESAKMFSYAGWXQXCNXLFFIFSXIFFISRLIVFPFWILYCXLILPMYHLEPFFSYIFLNLQLMILQVLHLYWGYYILKMLNRCIFMKSIQDVRSDDEDYEEEEEEEEEEAXKGKEMDCLKNGLRAERHLIPNGQHGH

SEQ ID NO: 5885 - protein, 32 aa, Homo sapiens
  MOD_RES (21)..(21): Selenocysteine
  MOD_RES (23)..(23): Selenocysteine
MLSSFNEWFWQDRFWLPPNVXWXELEDRDGRV

SEQ ID NO: 5886 - protein, 92 aa, Homo sapiens
  MOD_RES (21)..(21): Selenocysteine
  MOD_RES (23)..(23): Selenocysteine
  MOD_RES (74)..(74): Selenocysteine
  MOD_RES (83)..(83): Selenocysteine
  MOD_RES (90)..(90): Selenocysteine
MLSSFNEWFWQDRFWLPPNVXWXELEDRDGRVYPHPQDLLAALPLALVLLAMRLAFERFIGLPLSRWLGVRDQXRRQVKPNAXLEKHFLXEG

SEQ ID NO: 5887 - protein, 113 aa, Homo sapiens
  MOD_RES (21)..(21): Selenocysteine
  MOD_RES (23)..(23): Selenocysteine
  MOD_RES (74)..(74): Selenocysteine
  MOD_RES (83)..(83): Selenocysteine
  MOD_RES (90)..(90): Selenocysteine
  MOD_RES (110)..(110): Selenocysteine
MLSSFNEWFWQDRFWLPPNVXWXELEDRDGRVYPHPQDLLAALPLALVLLAMRLAFERFIGLPLSRWLGVRDQXRRQVKPNAXLEKHFLXEGHRPKEPQLSLLAAQCGLXLQQ

SEQ ID NO: 5888 - protein, 136 aa, Homo sapiens
  MOD_RES (21)..(21): Selenocysteine
  MOD_RES (23)..(23): Selenocysteine
  MOD_RES (74)..(74): Selenocysteine
  MOD_RES (83)..(83): Selenocysteine
  MOD_RES (90)..(90): Selenocysteine
  MOD_RES (110)..(110): Selenocysteine
  MOD_RES (114)..(114): Selenocysteine
  MOD_RES (130)..(130): Selenocysteine
MLSSFNEWFWQDRFWLPPNVXWXELEDRDGRVYPHPQDLLAALPLALVLLAMRLAFERFIGLPLSRWLGVRDQXRRQVKPNAXLEKHFLXEGHRPKEPQLSLLAAQCGLXLQQXQRWFRRRRNQDRPQLXKKFCEA

SEQ ID NO: 5889 - protein, 192 aa, Homo sapiens
  MOD_RES (21)..(21): Selenocysteine
  MOD_RES (23)..(23): Selenocysteine
  MOD_RES (74)..(74): Selenocysteine
  MOD_RES (83)..(83): Selenocysteine
  MOD_RES (90)..(90): Selenocysteine
  MOD_RES (110)..(110): Selenocysteine
  MOD_RES (114)..(114): Selenocysteine
  MOD_RES (130)..(130): Selenocysteine
  MOD_RES (174)..(174): Selenocysteine
MLSSFNEWFWQDRFWLPPNVXWXELEDRDGRVYPHPQDLLAALPLALVLLAMRLAFERFIGLPLSRWLGVRDQXRRQVKPNAXLEKHFLXEGHRPKEPQLSLLAAQCGLXLQQXQRWFRRRRNQDRPQLXKKFCEASWRFLFYLSSFVGGLSVLYHESWLWAPVMCWDRYPNQXLKPSLYWWYLLELGFYLS

SEQ ID NO: 5890 - protein, 394 aa, Homo sapiens
  MOD_RES (21)..(21): Selenocysteine
  MOD_RES (23)..(23): Selenocysteine
  MOD_RES (74)..(74): Selenocysteine
  MOD_RES (83)..(83): Selenocysteine
  MOD_RES (90)..(90): Selenocysteine
  MOD_RES (110)..(110): Selenocysteine
  MOD_RES (114)..(114): Selenocysteine
  MOD_RES (130)..(130): Selenocysteine
  MOD_RES (174)..(174): Selenocysteine
  MOD_RES (221)..(221): Selenocysteine
  MOD_RES (275)..(275): Selenocysteine
  MOD_RES (282)..(282): Selenocysteine
  MOD_RES (287)..(288): Selenocysteine
  MOD_RES (375)..(375): Selenocysteine
  MOD_RES (387)..(387): Selenocysteine
  MOD_RES (391)..(392): Selenocysteine
  MOD_RES (394)..(394): Selenocysteine
MLSSFNEWFWQDRFWLPPNVXWXELEDRDGRVYPHPQDLLAALPLALVLLAMRLAFERFIGLPLSRWLGVRDQXRRQVKPNAXLEKHFLXEGHRPKEPQLSLLAAQCGLXLQQXQRWFRRRRNQDRPQLXKKFCEASWRFLFYLSSFVGGLSVLYHESWLWAPVMCWDRYPNQXLKPSLYWWYLLELGFYLSLLIRLPFDVKRKDFKEQVIHHFVAVILMXFSYSANLLRIGSLVLLLHDSSDYLLEACKMVNYMQYQQVCDALFLIFSFVFFYXRLVLFPXQILYXXYYESISNRGPFFGYYFFNGLLMLLQLLHVFWSCLILRMLYSFMKKGQMEKDIRSDVEESDSSEEAAAAQEPLQLKNGAAGGPRPAPXDGPRSRVAGRLXNRHXXAX

SEQ ID NO: 5891 - protein, 306 aa, Homo sapiens
  MOD_RES (21)..(21): Selenocysteine
  MOD_RES (23)..(23): Selenocysteine
  MOD_RES (74)..(74): Selenocysteine
  MOD_RES (83)..(83): Selenocysteine
  MOD_RES (90)..(90): Selenocysteine
  MOD_RES (110)..(110): Selenocysteine
  MOD_RES (114)..(114): Selenocysteine
  MOD_RES (130)..(130): Selenocysteine
  MOD_RES (174)..(174): Selenocysteine
  MOD_RES (221)..(221): Selenocysteine
  MOD_RES (287)..(287): Selenocysteine
  MOD_RES (299)..(299): Selenocysteine
  MOD_RES (303)..(304): Selenocysteine
  MOD_RES (306)..(306): Selenocysteine
MLSSFNEWFWQDRFWLPPNVXWXELEDRDGRVYPHPQDLLAALPLALVLLAMRLAFERFIGLPLSRWLGVRDQXRRQVKPNAXLEKHFLXEGHRPKEPQLSLLAAQCGLXLQQXQRWFRRRRNQDRPQLXKKFCEASWRFLFYLSSFVGGLSVLYHESWLWAPVMCWDRYPNQXLKPSLYWWYLLELGFYLSLLIRLPFDVKRKDFKEQVIHHFVAVILMXFSYSANLLRIGSLVLLLHDSSDYLLEMEKDIRSDVEESDSSEEAAAAQEPLQLKNGAAGGPRPAPXDGPRSRVAGRLXNRHXXAX

SEQ ID NO: 5892 - protein, 343 aa, Homo sapiens
  MOD_RES (23)..(23): Selenocysteine
  MOD_RES (32)..(32): Selenocysteine
  MOD_RES (39)..(39): Selenocysteine
  MOD_RES (59)..(59): Selenocysteine
  MOD_RES (63)..(63): Selenocysteine
  MOD_RES (79)..(79): Selenocysteine
  MOD_RES (123)..(123): Selenocysteine
  MOD_RES (170)..(170): Selenocysteine
  MOD_RES (224)..(224): Selenocysteine
  MOD_RES (231)..(231): Selenocysteine
  MOD_RES (236)..(237): Selenocysteine
  MOD_RES (324)..(324): Selenocysteine
  MOD_RES (336)..(336): Selenocysteine
  MOD_RES (340)..(341): Selenocysteine
  MOD_RES (343)..(343): Selenocysteine
MRLAFERFIGLPLSRWLGVRDQXRRQVKPNAXLEKHFLXEGHRPKEPQLSLLAAQCGLXLQQXQRWFRRRRNQDRPQLXKKFCEASWRFLFYLSSFVGGLSVLYHESWLWAPVMCWDRYPNQXLKPSLYWWYLLELGFYLSLLIRLPFDVKRKDFKEQVIHHFVAVILMXFSYSANLLRIGSLVLLLHDSSDYLLEACKMVNYMQYQQVCDALFLIFSFVFFYXRLVLFPXQILYXXYYESISNRGPFFGYYFFNGLLMLLQLLHVFWSCLILRMLYSFMKKGQMEKDIRSDVEESDSSEEAAAAQEPLQLKNGAAGGPRPAPXDGPRSRVAGRLXNRHXXAX

SEQ ID NO: 5893 - protein, 66 aa, Homo sapiens
  MOD_RES (3)..(3): Selenocysteine
MAXAAQGPLSLLWGWLWSERFWLPENVSWADLEGPADGYGYPRGRHILSVFPLAAGIFFVRLLFER

SEQ ID NO: 5894 - protein, 195 aa, Homo sapiens
  MOD_RES (3)..(3): Selenocysteine
  MOD_RES (100)..(100): Selenocysteine
  MOD_RES (137)..(137): Selenocysteine
  MOD_RES (139)..(139): Selenocysteine
  MOD_RES (151)..(151): Selenocysteine
  MOD_RES (158)..(158): Selenocysteine
  MOD_RES (170)..(170): Selenocysteine
  MOD_RES (189)..(189): Selenocysteine
  MOD_RES (194)..(194): Selenocysteine
MAXAAQGPLSLLWGWLWSERFWLPENVSWADLEGPADGYGYPRGRHILSVFPLAAGIFFVRLLFERFIAKPCALCIGIEDSGPYQAQPNAILEKVFISIXKYPDKKRLEGLSKQLDWNVRKIQCWFRHRRNQDKPPXLXKFCESIHLGSGXSDSAGIXIHFSLFQVGFIXIISWNWPSIGPLCFLSLQXLKERXS

SEQ ID NO: 5895 - protein, 259 aa, Homo sapiens
  MOD_RES (3)..(3): Selenocysteine
  MOD_RES (100)..(100): Selenocysteine
  MOD_RES (137)..(137): Selenocysteine
  MOD_RES (139)..(139): Selenocysteine
  MOD_RES (149)..(149): Selenocysteine
  MOD_RES (193)..(193): Selenocysteine
  MOD_RES (210)..(210): Selenocysteine
  MOD_RES (240)..(240): Selenocysteine
  MOD_RES (252)..(252): Selenocysteine
MAXAAQGPLSLLWGWLWSERFWLPENVSWADLEGPADGYGYPRGRHILSVFPLAAGIFFVRLLFERFIAKPCALCIGIEDSGPYQAQPNAILEKVFISIXKYPDKKRLEGLSKQLDWNVRKIQCWFRHRRNQDKPPXLXKFCESMWRFXFYLCIFCYGIRFLWSSPWFWDIRQCWHNYPFQDFLIMFVHHLVXIGLISFSYINNMVRVGXLIMCLHDVSDFLLEAAKLANYAKYQRLCDXLFVIFSAVFMVXRLGIYPF

SEQ ID NO: 5896 - protein, 351 aa, Homo sapiens
  MOD_RES (3)..(3): Selenocysteine
  MOD_RES (100)..(100): Selenocysteine
  MOD_RES (137)..(137): Selenocysteine
  MOD_RES (139)..(139): Selenocysteine
  MOD_RES (149)..(149): Selenocysteine
  MOD_RES (207)..(207): Selenocysteine
  MOD_RES (224)..(224): Selenocysteine
  MOD_RES (241)..(241): Selenocysteine
  MOD_RES (271)..(271): Selenocysteine
  MOD_RES (283)..(283): Selenocysteine
  MOD_RES (299)..(299): Selenocysteine
  MOD_RES (304)..(304): Selenocysteine
  MOD_RES (313)..(313): Selenocysteine
  MOD_RES (322)..(322): Selenocysteine
  MOD_RES (331)..(331): Selenocysteine
MAXAAQGPLSLLWGWLWSERFWLPENVSWADLEGPADGYGYPRGRHILSVFPLAAGIFFVRLLFERFIAKPCALCIGIEDSGPYQAQPNAILEKVFISIXKYPDKKRLEGLSKQLDWNVRKIQCWFRHRRNQDKPPXLXKFCESMWRFXFYLCIFCYGIRFLWSSPWFWDIRQCWHNYPFQPLSSGLYHYYIMELAFYWSLMFSQFXDIKRKDFLIMFVHHLVXIGLISFSYINNMVRVGXLIMCLHDVSDFLLEAAKLANYAKYQRLCDXLFVIFSAVFMVXRLGIYPFCFSVLFYSXFANRXQEPYCPAFXLACADLLWXLIGPLLPQXVFLARSDPDSEYPAWLASQD

SEQ ID NO: 5897 - protein, 392 aa, Homo sapiens
  MOD_RES (3)..(3): Selenocysteine
  MOD_RES (100)..(100): Selenocysteine
  MOD_RES (137)..(137): Selenocysteine
  MOD_RES (139)..(139): Selenocysteine
  MOD_RES (149)..(149): Selenocysteine
  MOD_RES (207)..(207): Selenocysteine
  MOD_RES (224)..(224): Selenocysteine
  MOD_RES (241)..(241): Selenocysteine
  MOD_RES (271)..(271): Selenocysteine
  MOD_RES (283)..(283): Selenocysteine
  MOD_RES (295)..(296): Selenocysteine
  MOD_RES (319)..(319): Selenocysteine
  MOD_RES (362)..(363): Selenocysteine
  MOD_RES (365)..(365): Selenocysteine
MAXAAQGPLSLLWGWLWSERFWLPENVSWADLEGPADGYGYPRGRHILSVFPLAAGIFFVRLLFERFIAKPCALCIGIEDSGPYQAQPNAILEKVFISIXKYPDKKRLEGLSKQLDWNVRKIQCWFRHRRNQDKPPXLXKFCESMWRFXFYLCIFCYGIRFLWSSPWFWDIRQCWHNYPFQPLSSGLYHYYIMELAFYWSLMFSQFXDIKRKDFLIMFVHHLVXIGLISFSYINNMVRVGXLIMCLHDVSDFLLEAAKLANYAKYQRLCDXLFVIFSAVFMVXRLGIYPFWILNXXLFESWEIIGPYASWWLLNGLLLXLQLLHVIWSYLIARIALKALIRGKVSKDDRSDVESSSEEEDVXXCXKSPCDSSSSNGANRVNGHMGGSYWAEE

SEQ ID NO: 5898 - protein, 179 aa, Homo sapiens
  MOD_RES (3)..(3): Selenocysteine
  MOD_RES (98)..(98): Selenocysteine
  MOD_RES (135)..(135): Selenocysteine
  MOD_RES (142)..(142): Selenocysteine
  MOD_RES (154)..(154): Selenocysteine
  MOD_RES (173)..(173): Selenocysteine
  MOD_RES (178)..(178): Selenocysteine
MAXAAQGPLSLLWGWLWSERFWLPENVSWADLEGPADGYGYPRGRHILSVFPLAAGIFFVRLLFERILIRKGWRACQSSWIGMSEKSNAGFAIGGIRXSPQRLLNSVKACGDSHFIYVYSAMELDFSGRHLGSGXSDSAGIXIHFSLFQVGFIXIISWNWPSIGPLCFLSLQXLKERXS

SEQ ID NO: 5899 - protein, 93 aa, Homo sapiens
  MOD_RES (3)..(3): Selenocysteine
  MOD_RES (79)..(79): Selenocysteine
MAXAAQGPLSLLWGWLWSERFWLPENVSWADLEGPADGYGYPRGRHILSVFPLAAGIFFVRLLFERLECSGAISLQPSXPWFKRFSCLSLPSS

SEQ ID NO: 5900 - protein, 73 aa, Homo sapiens
  MOD_RES (3)..(3): Selenocysteine
MAXAAQGPLSLLWGWLWSERFWLPENVSWADLEGPADGYGYPRGRHILSVFPLAAGIFFVRLLFERRDGVSLC

SEQ ID NO: 5901 - protein, 77 aa, Homo sapiens
  MOD_RES (3)..(3): Selenocysteine
  MOD_RES (73)..(73): Selenocysteine
MAXAAQGPLSLLWGWLWSERFWLPENVSWADLEGPADGYGYPRGRHILSVFPLAAGIFFVRLLFERVCFVAQXGVQW

SEQ ID NO: 5902 - protein, 77 aa, Homo sapiens
  MOD_RES (3)..(3): Selenocysteine
MAXAAQGPLSLLWGWLWSERFWLPENVSWADLEGPADGYGYPRGRHILSVFPLAAGIFFVRLLFERVQAILLPQPPK

SEQ ID NO: 5903 - protein, 93 aa, Homo sapiens
  MOD_RES (3)..(3): Selenocysteine
MAXAAQGPLSLLWGWLWSERFWLPENVSWADLEGPADGYGYPRGRHILSVFPLAAGIFFVRLLFERWCFALVAQAGVQWCSHSSLQPLPPRFK

SEQ ID NO: 5904 - protein, 334 aa, Homo sapiens
  MOD_RES (42)..(42): Selenocysteine
  MOD_RES (79)..(79): Selenocysteine
  MOD_RES (81)..(81): Selenocysteine
  MOD_RES (91)..(91): Selenocysteine
  MOD_RES (149)..(149): Selenocysteine
  MOD_RES (166)..(166): Selenocysteine
  MOD_RES (183)..(183): Selenocysteine
  MOD_RES (213)..(213): Selenocysteine
  MOD_RES (225)..(225): Selenocysteine
  MOD_RES (237)..(238): Selenocysteine
  MOD_RES (261)..(261): Selenocysteine
  MOD_RES (304)..(305): Selenocysteine
  MOD_RES (307)..(307): Selenocysteine
MMKPRPKRFIAKPCALCIGIEDSGPYQAQPNAILEKVFISIXKYPDKKRLEGLSKQLDWNVRKIQCWFRHRRNQDKPPXLXKFCESMWRFXFYLCIFCYGIRFLWSSPWFWDIRQCWHNYPFQPLSSGLYHYYIMELAFYWSLMFSQFXDIKRKDFLIMFVHHLVXIGLISFSYINNMVRVGXLIMCLHDVSDFLLEAAKLANYAKYQRLCDXLFVIFSAVFMVXRLGIYPFWILNXXLFESWEIIGPYASWWLLNGLLLXLQLLHVIWSYLIARIALKALIRGKVSKDDRSDVESSSEEEDVXXCXKSPCDSSSSNGANRVNGHMGGSYWAEE

SEQ ID NO: 5905 - protein, 136 aa, Homo sapiens
  MOD_RES (1)..(1): Any amino acid
  MOD_RES (26)..(26): Selenocysteine
  MOD_RES (43)..(43): Selenocysteine
  MOD_RES (73)..(73): Selenocysteine
  MOD_RES (85)..(85): Selenocysteine
  MOD_RES (97)..(98): Selenocysteine
  MOD_RES (121)..(121): Selenocysteine
XLCIFCYGIRFLWSDFLIMFVHHLVXIGLISFSYINNMVRVGXLIMCLHDVSDFLLEAAKLANYAKYQRLCDXLFVIFSAVFMVXRLGIYPFWILNXXLFESWEIIGPYASWWLLNGLLLXLQLLHVIWSYLIARI

SEQ ID NO: 5906 - protein, 111 aa, Homo sapiens
  MOD_RES (1)..(1): Any amino acid
  MOD_RES (13)..(13): Selenocysteine
  MOD_RES (25)..(26): Selenocysteine
  MOD_RES (49)..(49): Selenocysteine
  MOD_RES (75)..(75): Selenocysteine
  MOD_RES (84)..(84): Selenocysteine
  MOD_RES (90)..(90): Selenocysteine
  MOD_RES (102)..(102): Selenocysteine
XLFVIFSAVFMVXRLGIYPFWILNXXLFESWEIIGPYASWWLLNGLLLXLQLLHVIWSYLIARIALKALIRGKVXCPGRIRPCXLHSFLXSFLFSMPGGSWXVSSLACIEG

SEQ ID NO: 5907 - protein, 78 aa, Homo sapiens
  MOD_RES (1)..(1): Any amino acid
  MOD_RES (11)..(11): Selenocysteine
  MOD_RES (41)..(41): Selenocysteine
  MOD_RES (53)..(53): Selenocysteine
XYINNMVRVGXLIMCLHDVSDFLLEAAKLANYAKYQRLCDXLFVIFSAVFMVXRLGIYPFWYRRMIAVMWRAAQRKKM

SEQ ID NO: 5908 - protein, 384 aa, Homo sapiens
  MOD_RES (20)..(20): Selenocysteine
  MOD_RES (27)..(27): Selenocysteine
  MOD_RES (31)..(31): Selenocysteine
  MOD_RES (88)..(88): Selenocysteine
  MOD_RES (91)..(91): Selenocysteine
  MOD_RES (128)..(128): Selenocysteine
  MOD_RES (130)..(130): Selenocysteine
  MOD_RES (147)..(147): Selenocysteine
  MOD_RES (156)..(156): Selenocysteine
  MOD_RES (162)..(162): Selenocysteine
  MOD_RES (175)..(176): Selenocysteine
  MOD_RES (198)..(198): Selenocysteine
  MOD_RES (220)..(220): Selenocysteine
  MOD_RES (232)..(232): Selenocysteine
  MOD_RES (273)..(274): Selenocysteine
  MOD_RES (286)..(287): Selenocysteine
  MOD_RES (361)..(361): Selenocysteine
  MOD_RES (363)..(365): Selenocysteine
  MOD_RES (368)..(368): Selenocysteine
  MOD_RES (371)..(371): Selenocysteine
  MOD_RES (377)..(377): Selenocysteine
MAGILAWFWNERFWLPHNVXWADLKNXEEAXFPQAEDLYLAFPLAFCIFMVRLIFERFVAKPCAIALNIQANGPQIAPPNAILEKVFXAIXKHPDEKRLEGLSKQLDWDVRSIQRWFRQRRNQEKPSXLXRFCESMWRFSFYLYVFXYGVRFLKKXPWLWNXRHCWYNYPYQPLXXDLHYYYILELSFYWSLMFSQFXDIKRKDFGIMFLHHLVSIFLIXFSYVNNMARVGXLVLCLHDSADALLEAAKMANYAKFQKMCDLLFVMFAVVFIXXRLGIFPLWVLNXXLFESWEIVGPYPSWWVFNLLLLLVQGLNCFWSYLIVKIACKAVSRGKVSKDDRSDIESSSDEEDSEPPGKNPHXAXXXNGXSGXNGYLLXGSCSMDD

SEQ ID NO: 5909 - protein, 392 aa, Homo sapiens
  MOD_RES (20)..(20): Selenocysteine
  MOD_RES (27)..(27): Selenocysteine
  MOD_RES (31)..(31): Selenocysteine
  MOD_RES (88)..(88): Selenocysteine
  MOD_RES (91)..(91): Selenocysteine
  MOD_RES (128)..(128): Selenocysteine
  MOD_RES (130)..(130): Selenocysteine
  MOD_RES (147)..(147): Selenocysteine
  MOD_RES (156)..(156): Selenocysteine
  MOD_RES (162)..(162): Selenocysteine
  MOD_RES (175)..(176): Selenocysteine
  MOD_RES (198)..(198): Selenocysteine
  MOD_RES (220)..(220): Selenocysteine
  MOD_RES (232)..(232): Selenocysteine
  MOD_RES (273)..(274): Selenocysteine
  MOD_RES (286)..(287): Selenocysteine
  MOD_RES (369)..(369): Selenocysteine
  MOD_RES (371)..(373): Selenocysteine
  MOD_RES (376)..(376): Selenocysteine
  MOD_RES (379)..(379): Selenocysteine
  MOD_RES (385)..(385): Selenocysteine
MAGILAWFWNERFWLPHNVXWADLKNXEEAXFPQAEDLYLAFPLAFCIFMVRLIFERFVAKPCAIALNIQANGPQIAPPNAILEKVFXAIXKHPDEKRLEGLSKQLDWDVRSIQRWFRQRRNQEKPSXLXRFCESMWRFSFYLYVFXYGVRFLKKXPWLWNXRHCWYNYPYQPLXXDLHYYYILELSFYWSLMFSQFXDIKRKDFGIMFLHHLVSIFLIXFSYVNNMARVGXLVLCLHDSADALLEAAKMANYAKFQKMCDLLFVMFAVVFIXXRLGIFPLWVLNXXLFESWEIVGPYPSWWVFNLLLLLVQGLNCFWSYLIVKIACKAVSRGKAGKWNPLHVSKDDRSDIESSSDEEDSEPPGKNPHXAXXXNGXSGXNGYLLXGSCSMDD

SEQ ID NO: 5910 - protein, 148 aa, Homo sapiens
  MOD_RES (2)..(2): Selenocysteine
  MOD_RES (12)..(12): Selenocysteine
  MOD_RES (39)..(39): Selenocysteine
  MOD_RES (43)..(43): Selenocysteine
  MOD_RES (54)..(54): Selenocysteine
  MOD_RES (62)..(62): Selenocysteine
MXWRHHVRLLFXVSLALQIINLGNSYQREKHNGGREEVXKVAXQKHRQSPLNWXSSHFGEVXGSAEGWGPEEPLPYSRAFGEDPKDFLASHAHGPSAGGAPSLLLLLPCALLHRLLRPDAPAHPRSLVPSVLQRERRPCGRPGLGHRL

SEQ ID NO: 5911 - protein, 223 aa, Homo sapiens
  MOD_RES (2)..(2): Selenocysteine
  MOD_RES (12)..(12): Selenocysteine
  MOD_RES (39)..(39): Selenocysteine
  MOD_RES (43)..(43): Selenocysteine
  MOD_RES (54)..(54): Selenocysteine
  MOD_RES (62)..(62): Selenocysteine
  MOD_RES (96)..(96): Selenocysteine
  MOD_RES (110)..(110): Selenocysteine
  MOD_RES (132)..(132): Selenocysteine
  MOD_RES (153)..(153): Selenocysteine
MXWRHHVRLLFXVSLALQIINLGNSYQREKHNGGREEVXKVAXQKHRQSPLNWXSSHFGEVXGSAEGWGPEEPLPYSRAFGEGASARPRCCRNGGXCVLGSFCVCPAHFXGRYCEHDQRRSECGALEHGAWXLRACHLCRCIFGALHCLPLQXPDRCDPKDFLASHAHGPSAGGAPSLLLLLPCALLHRLLRPDAPAHPRSLVPSVLQRERRPCGRPGLGHRL

SEQ ID NO: 5912 - protein, 191 aa, Homo sapiens
  MOD_RES (2)..(2): Selenocysteine
  MOD_RES (12)..(12): Selenocysteine
  MOD_RES (39)..(39): Selenocysteine
  MOD_RES (43)..(43): Selenocysteine
  MOD_RES (54)..(54): Selenocysteine
  MOD_RES (62)..(62): Selenocysteine
  MOD_RES (90)..(90): Selenocysteine
  MOD_RES (99)..(99): Selenocysteine
  MOD_RES (109)..(109): Selenocysteine
  MOD_RES (117)..(117): Selenocysteine
  MOD_RES (120)..(120): Selenocysteine
  MOD_RES (123)..(123): Selenocysteine
  MOD_RES (128)..(128): Selenocysteine
  MOD_RES (130)..(130): Selenocysteine
  MOD_RES (150)..(150): Selenocysteine
  MOD_RES (160)..(160): Selenocysteine
MXWRHHVRLLFXVSLALQIINLGNSYQREKHNGGREEVXKVAXQKHRQSPLNWXSSHFGEVXGSAEGWGPEEPLPYSRAFGEVNAAPWSXEPGPSAPAXSAGASSGPCXASPSRRLXAVXRKXSWPPXLXGRAPGARPACYSCCPAHSCXASCARMRPRXLGPWSLPSSSGSGAPAEGRDLGIAFNFLCCK

SEQ ID NO: 5913 - protein, 91 aa, Homo sapiens
  MOD_RES (25)..(25): Selenocysteine
  MOD_RES (63)..(63): Selenocysteine
  MOD_RES (70)..(70): Selenocysteine
  MOD_RES (88)..(88): Selenocysteine
  MOD_RES (91)..(91): Selenocysteine
MASGVAVSDGVIKVFNDMKVRKSSXPEEVKKRKKAVLFCLSEDKKNIILEEGKEILVGDVGQXVDDPYAXFVKMLPDKDCRYALYDAXYEX

SEQ ID NO: 5914 - protein, 160 aa, Homo sapiens
  MOD_RES (25)..(25): Selenocysteine
  MOD_RES (63)..(63): Selenocysteine
  MOD_RES (70)..(70): Selenocysteine
  MOD_RES (88)..(88): Selenocysteine
  MOD_RES (91)..(91): Selenocysteine
  MOD_RES (129)..(129): Selenocysteine
  MOD_RES (148)..(148): Selenocysteine
MASGVAVSDGVIKVFNDMKVRKSSXPEEVKKRKKAVLFCLSEDKKNIILEEGKEILVGDVGQXVDDPYAXFVKMLPDKDCRYALYDAXYEXKESKKEDLVFIFWAPESAPLKSKMIYASSKDAIKKKLXGIKHELQANCYEEVKDRCXLAEKLGGSAVIS

SEQ ID NO: 5915 - protein, 166 aa, Homo sapiens
  MOD_RES (25)..(25): Selenocysteine
  MOD_RES (63)..(63): Selenocysteine
  MOD_RES (70)..(70): Selenocysteine
  MOD_RES (88)..(88): Selenocysteine
  MOD_RES (91)..(91): Selenocysteine
  MOD_RES (129)..(129): Selenocysteine
  MOD_RES (148)..(148): Selenocysteine
MASGVAVSDGVIKVFNDMKVRKSSXPEEVKKRKKAVLFCLSEDKKNIILEEGKEILVGDVGQXVDDPYAXFVKMLPDKDCRYALYDAXYEXKESKKEDLVFIFWAPESAPLKSKMIYASSKDAIKKKLXGIKHELQANCYEEVKDRCXLAEKLGGSAVISLEGKPL

SEQ ID NO: 5916 - protein, 79 aa, Homo sapiens
  MOD_RES (8)..(8): Selenocysteine
  MOD_RES (46)..(46): Selenocysteine
  MOD_RES (53)..(53): Selenocysteine
  MOD_RES (71)..(71): Selenocysteine
  MOD_RES (74)..(74): Selenocysteine
MKVRKSSXPEEVKKRKKAVLFCLSEDKKNIILEEGKEILVGDVGQXVDDPYAXFVKMLPDKDCRYALYDAXYEXKESKK

SEQ ID NO: 5917 - protein, 122 aa, Homo sapiens
  MOD_RES (8)..(8): Selenocysteine
  MOD_RES (46)..(46): Selenocysteine
  MOD_RES (53)..(53): Selenocysteine
  MOD_RES (71)..(71): Selenocysteine
  MOD_RES (74)..(74): Selenocysteine
  MOD_RES (112)..(112): Selenocysteine
MKVRKSSXPEEVKKRKKAVLFCLSEDKKNIILEEGKEILVGDVGQXVDDPYAXFVKMLPDKDCRYALYDAXYEXKESKKEDLVFIFWAPESAPLKSKMIYASSKDAIKKKLXGIKHELQANC

SEQ ID NO: 5918 - protein, 149 aa, Homo sapiens
  MOD_RES (8)..(8): Selenocysteine
  MOD_RES (46)..(46): Selenocysteine
  MOD_RES (53)..(53): Selenocysteine
  MOD_RES (71)..(71): Selenocysteine
  MOD_RES (74)..(74): Selenocysteine
  MOD_RES (112)..(112): Selenocysteine
  MOD_RES (131)..(131): Selenocysteine
MKVRKSSXPEEVKKRKKAVLFCLSEDKKNIILEEGKEILVGDVGQXVDDPYAXFVKMLPDKDCRYALYDAXYEXKESKKEDLVFIFWAPESAPLKSKMIYASSKDAIKKKLXGIKHELQANCYEEVKDRCXLAEKLGGSAVISLEGKPL

SEQ ID NO: 5919 - protein, 204 aa, Homo sapiens
  MOD_RES (16)..(16): Selenocysteine
  MOD_RES (20)..(20): Selenocysteine
  MOD_RES (31)..(31): Selenocysteine
  MOD_RES (63)..(63): Selenocysteine
  MOD_RES (101)..(101): Selenocysteine
  MOD_RES (108)..(108): Selenocysteine
  MOD_RES (126)..(126): Selenocysteine
  MOD_RES (129)..(129): Selenocysteine
  MOD_RES (167)..(167): Selenocysteine
  MOD_RES (186)..(186): Selenocysteine
MVSPGHGHLRERKELXPHSXNPAAARIWDAXYSDGYVRPASGVAVSDGVIKVFNDMKVRKSSXPEEVKKRKKAVLFCLSEDKKNIILEEGKEILVGDVGQXVDDPYAXFVKMLPDKDCRYALYDAXYEXKESKKEDLVFIFWAPESAPLKSKMIYASSKDAIKKKLXGIKHELQANCYEEVKDRCXLAEKLGGSAVISLEGKPL

SEQ ID NO: 5920 - protein, 321 aa, Homo sapiens
  MOD_RES (70)..(70): Selenocysteine
  MOD_RES (84)..(84): Selenocysteine
  MOD_RES (150)..(150): Selenocysteine
  MOD_RES (156)..(156): Selenocysteine
  MOD_RES (158)..(158): Selenocysteine
  MOD_RES (213)..(213): Selenocysteine
  MOD_RES (280)..(280): Selenocysteine
  MOD_RES (293)..(293): Selenocysteine
MAEIGEDLDKSDVSSLIFLMKDYMGRGKISKEKSFLDLVVELEKLNLVAPDQLDLLEKCLKNIHRIDLKXKIQKYKQSVQGAGXSYRNVLQAAIQKSLKDPSNNFREEPVKKSIQESEAFLPQSIPEERYKMKSKPLGICLIIDCIGNEXELLRDXFXSLGYEVQKFLHLSMHGISQILGQFACMPEHRDYDSFVCVLVSRGGSQSVYGVDQXHSGLPLHHIRRMFMGDSCPYLAGKPKMFFIQNYVVSEGQLEDSSLLEVDGPAMKNVEFKAQKRGLCXVHREADFFWSLCXADMSLLEQSHSSPSLYLQCLSQKLRQER

SEQ ID NO: 5921 - protein, 168 aa, Homo sapiens
  MOD_RES (70)..(70): Selenocysteine
  MOD_RES (84)..(84): Selenocysteine
  MOD_RES (168)..(168): Selenocysteine
MAEIGEDLDKSDVSSLIFLMKDYMGRGKISKEKSFLDLVVELEKLNLVAPDQLDLLEKCLKNIHRIDLKXKIQKYKQSVQGAGXSYRNVLQAAIQKSLKDPSNNFRLHNGRSKEQRLKEQLGAQQEPVKKSIQESEAFLPQSIPEERYKMKSKPLGICLIIDCIGNEX

SEQ ID NO: 5922 - protein, 366 aa, Homo sapiens
  MOD_RES (70)..(70): Selenocysteine
  MOD_RES (84)..(84): Selenocysteine
  MOD_RES (168)..(168): Selenocysteine
  MOD_RES (174)..(174): Selenocysteine
  MOD_RES (176)..(176): Selenocysteine
  MOD_RES (231)..(231): Selenocysteine
  MOD_RES (298)..(298): Selenocysteine
  MOD_RES (311)..(311): Selenocysteine
  MOD_RES (341)..(341): Selenocysteine
  MOD_RES (348)..(348): Selenocysteine
MAEIGEDLDKSDVSSLIFLMKDYMGRGKISKEKSFLDLVVELEKLNLVAPDQLDLLEKCLKNIHRIDLKXKIQKYKQSVQGAGXSYRNVLQAAIQKSLKDPSNNFRLHNGRSKEQRLKEQLGAQQEPVKKSIQESEAFLPQSIPEERYKMKSKPLGICLIIDCIGNEXELLRDXFXSLGYEVQKFLHLSMHGISQILGQFACMPEHRDYDSFVCVLVSRGGSQSVYGVDQXHSGLPLHHIRRMFMGDSCPYLAGKPKMFFIQNYVVSEGQLEDSSLLEVDGPAMKNVEFKAQKRGLCXVHREADFFWSLCXADMSLLEQSHSSPSLYLQCLSQKLRQERGXIPGSGIXESKDMHFSSLGCILLDVL

SEQ ID NO: 5923 - protein, 384 aa, Homo sapiens
  MOD_RES (70)..(70): Selenocysteine
  MOD_RES (84)..(84): Selenocysteine
  MOD_RES (168)..(168): Selenocysteine
  MOD_RES (174)..(174): Selenocysteine
  MOD_RES (176)..(176): Selenocysteine
  MOD_RES (231)..(231): Selenocysteine
  MOD_RES (298)..(298): Selenocysteine
  MOD_RES (311)..(311): Selenocysteine
  MOD_RES (374)..(374): Selenocysteine
  MOD_RES (384)..(384): Selenocysteine
MAEIGEDLDKSDVSSLIFLMKDYMGRGKISKEKSFLDLVVELEKLNLVAPDQLDLLEKCLKNIHRIDLKXKIQKYKQSVQGAGXSYRNVLQAAIQKSLKDPSNNFRLHNGRSKEQRLKEQLGAQQEPVKKSIQESEAFLPQSIPEERYKMKSKPLGICLIIDCIGNEXELLRDXFXSLGYEVQKFLHLSMHGISQILGQFACMPEHRDYDSFVCVLVSRGGSQSVYGVDQXHSGLPLHHIRRMFMGDSCPYLAGKPKMFFIQNYVVSEGQLEDSSLLEVDGPAMKNVEFKAQKRGLCXVHREADFFWSLCXADMSLLEQSHSSPSLYLQCLSQKLRQERKRPLLDLHIELNGYMYDWNSRVSAKEKYYVWLQHXLRKKLILSYX

SEQ ID NO: 5924 - protein, 117 aa, Homo sapiens
  MOD_RES (70)..(70): Selenocysteine
  MOD_RES (84)..(84): Selenocysteine
  MOD_RES (109)..(109): Selenocysteine
MAEIGEDLDKSDVSSLIFLMKDYMGRGKISKEKSFLDLVVELEKLNLVAPDQLDLLEKCLKNIHRIDLKXKIQKYKQSVQGAGXSYRNVLQAAIQKSLKDPSNNFRMIXPYAHCPDL

SEQ ID NO: 5925 - protein, 117 aa, Homo sapiens
  MOD_RES (70)..(70): Selenocysteine
  MOD_RES (84)..(84): Selenocysteine
  MOD_RES (112)..(112): Selenocysteine
MAEIGEDLDKSDVSSLIFLMKDYMGRGKISKEKSFLDLVVELEKLNLVAPDQLDLLEKCLKNIHRIDLKXKIQKYKQSVQGAGXSYRNVLQAAIQKSLKDPSNNFRVSLEKXYGIPA

SEQ ID NO: 5926 - protein, 62 aa, Homo sapiens
  MOD_RES (15)..(15): Selenocysteine
MSAEVIHQVEEALDXDEKEMLLFLCRDVAIDVVPPNVRDLLDILRERGKLSVGDLAELLYRV

SEQ ID NO: 5927 - protein, 64 aa, Homo sapiens
  MOD_RES (15)..(15): Selenocysteine
MSAEVIHQVEEALDXDEKEMLLFLCRDVAIDVVPPNVRDLLDILRERGKLSVGDLAELLYRVRR

SEQ ID NO: 5928 - protein, 118 aa, Homo sapiens
  MOD_RES (15)..(15): Selenocysteine
  MOD_RES (81)..(81): Selenocysteine
MSAEVIHQVEEALDXDEKEMLLFLCRDVAIDVVPPNVRDLLDILRERGKLSVGDLAELLYRVRRFDLLKRILKMDRKAVEXHLLRNPHLVSDYRVLMAEIGEDLDKSDVSSLIFLMKD

SEQ ID NO: 5929 - protein, 129 aa, Homo sapiens
  MOD_RES (15)..(15): Selenocysteine
  MOD_RES (81)..(81): Selenocysteine
MSAEVIHQVEEALDXDEKEMLLFLCRDVAIDVVPPNVRDLLDILRERGKLSVGDLAELLYRVRRFDLLKRILKMDRKAVEXHLLRNPHLVSDYRVLMAEIGEDLDKSDVSSLIFLMKDYMGRGKISKEK

SEQ ID NO: 5930 - protein, 250 aa, Homo sapiens
  MOD_RES (15)..(15): Selenocysteine
  MOD_RES (81)..(81): Selenocysteine
  MOD_RES (166)..(166): Selenocysteine
  MOD_RES (180)..(180): Selenocysteine
  MOD_RES (183)..(183): Selenocysteine
  MOD_RES (206)..(206): Selenocysteine
  MOD_RES (236)..(236): Selenocysteine
MSAEVIHQVEEALDXDEKEMLLFLCRDVAIDVVPPNVRDLLDILRERGKLSVGDLAELLYRVRRFDLLKRILKMDRKAVEXHLLRNPHLVSDYRVLMAEIGEDLDKSDVSSLIFLMKDYMGRGKISKEKSFLDLVVELEKLNLVAPDQLDLLEKCLKNIHRIDLKXKIQKYKQSGGWNGXWMXKASFSLWLEIASLYILHIPDLPXPLPCIFMISAKCCQAVLNISVFKKESGICXGWQSYGHSGVLHVC

SEQ ID NO: 5931 - protein, 243 aa, Homo sapiens
  MOD_RES (15)..(15): Selenocysteine
  MOD_RES (81)..(81): Selenocysteine
  MOD_RES (166)..(166): Selenocysteine
  MOD_RES (180)..(180): Selenocysteine
MSAEVIHQVEEALDXDEKEMLLFLCRDVAIDVVPPNVRDLLDILRERGKLSVGDLAELLYRVRRFDLLKRILKMDRKAVEXHLLRNPHLVSDYRVLMAEIGEDLDKSDVSSLIFLMKDYMGRGKISKEKSFLDLVVELEKLNLVAPDQLDLLEKCLKNIHRIDLKXKIQKYKQSVQGAGXSYRNVLQAAIQKSLKDPSNNFRAGVQWRDLGSPQPPPPGFKRFSHLSLPSSWDYRNVPPRPAP

SEQ ID NO: 5932 - protein, 292 aa, Homo sapiens
  MOD_RES (15)..(15): Selenocysteine
  MOD_RES (81)..(81): Selenocysteine
  MOD_RES (166)..(166): Selenocysteine
  MOD_RES (180)..(180): Selenocysteine
  MOD_RES (264)..(264): Selenocysteine
  MOD_RES (275)..(275): Selenocysteine
  MOD_RES (279)..(279): Selenocysteine
MSAEVIHQVEEALDXDEKEMLLFLCRDVAIDVVPPNVRDLLDILRERGKLSVGDLAELLYRVRRFDLLKRILKMDRKAVEXHLLRNPHLVSDYRVLMAEIGEDLDKSDVSSLIFLMKDYMGRGKISKEKSFLDLVVELEKLNLVAPDQLDLLEKCLKNIHRIDLKXKIQKYKQSVQGAGXSYRNVLQAAIQKSLKDPSNNFRLHNGRSKEQRLKEQLGAQQEPVKKSIQESEAFLPQSIPEERYKMKSKPLGICLIIDCIGNEXGWSAMAQSQLXAISXSQVQAILLPQPPE

SEQ ID NO: 5933 - protein, 462 aa, Homo sapiens
  MOD_RES (15)..(15): Selenocysteine
  MOD_RES (81)..(81): Selenocysteine
  MOD_RES (166)..(166): Selenocysteine
  MOD_RES (180)..(180): Selenocysteine
  MOD_RES (264)..(264): Selenocysteine
  MOD_RES (270)..(270): Selenocysteine
  MOD_RES (272)..(272): Selenocysteine
  MOD_RES (327)..(327): Selenocysteine
  MOD_RES (394)..(394): Selenocysteine
  MOD_RES (407)..(407): Selenocysteine
  MOD_RES (437)..(437): Selenocysteine
  MOD_RES (444)..(444): Selenocysteine
MSAEVIHQVEEALDXDEKEMLLFLCRDVAIDVVPPNVRDLLDILRERGKLSVGDLAELLYRVRRFDLLKRILKMDRKAVEXHLLRNPHLVSDYRVLMAEIGEDLDKSDVSSLIFLMKDYMGRGKISKEKSFLDLVVELEKLNLVAPDQLDLLEKCLKNIHRIDLKXKIQKYKQSVQGAGXSYRNVLQAAIQKSLKDPSNNFRLHNGRSKEQRLKEQLGAQQEPVKKSIQESEAFLPQSIPEERYKMKSKPLGICLIIDCIGNEXELLRDXFXSLGYEVQKFLHLSMHGISQILGQFACMPEHRDYDSFVCVLVSRGGSQSVYGVDQXHSGLPLHHIRRMFMGDSCPYLAGKPKMFFIQNYVVSEGQLEDSSLLEVDGPAMKNVEFKAQKRGLCXVHREADFFWSLCXADMSLLEQSHSSPSLYLQCLSQKLRQERGXIPGSGIXESKDMHFSSLGCILLDVL

SEQ ID NO: 5934 - protein, 480 aa, Homo sapiens
  MOD_RES (15)..(15): Selenocysteine
  MOD_RES (81)..(81): Selenocysteine
  MOD_RES (166)..(166): Selenocysteine
  MOD_RES (180)..(180): Selenocysteine
  MOD_RES (264)..(264): Selenocysteine
  MOD_RES (270)..(270): Selenocysteine
  MOD_RES (272)..(272): Selenocysteine
  MOD_RES (327)..(327): Selenocysteine
  MOD_RES (394)..(394): Selenocysteine
  MOD_RES (407)..(407): Selenocysteine
  MOD_RES (470)..(470): Selenocysteine
  MOD_RES (480)..(480): Selenocysteine
MSAEVIHQVEEALDXDEKEMLLFLCRDVAIDVVPPNVRDLLDILRERGKLSVGDLAELLYRVRRFDLLKRILKMDRKAVEXHLLRNPHLVSDYRVLMAEIGEDLDKSDVSSLIFLMKDYMGRGKISKEKSFLDLVVELEKLNLVAPDQLDLLEKCLKNIHRIDLKXKIQKYKQSVQGAGXSYRNVLQAAIQKSLKDPSNNFRLHNGRSKEQRLKEQLGAQQEPVKKSIQESEAFLPQSIPEERYKMKSKPLGICLIIDCIGNEXELLRDXFXSLGYEVQKFLHLSMHGISQILGQFACMPEHRDYDSFVCVLVSRGGSQSVYGVDQXHSGLPLHHIRRMFMGDSCPYLAGKPKMFFIQNYVVSEGQLEDSSLLEVDGPAMKNVEFKAQKRGLCXVHREADFFWSLCXADMSLLEQSHSSPSLYLQCLSQKLRQERKRPLLDLHIELNGYMYDWNSRVSAKEKYYVWLQHXLRKKLILSYX

SEQ ID NO: 5935 - protein, 221 aa, Homo sapiens
  MOD_RES (15)..(15): Selenocysteine
  MOD_RES (81)..(81): Selenocysteine
  MOD_RES (166)..(166): Selenocysteine
  MOD_RES (180)..(180): Selenocysteine
  MOD_RES (205)..(205): Selenocysteine
MSAEVIHQVEEALDXDEKEMLLFLCRDVAIDVVPPNVRDLLDILRERGKLSVGDLAELLYRVRRFDLLKRILKMDRKAVEXHLLRNPHLVSDYRVLMAEIGEDLDKSDVSSLIFLMKDYMGRGKISKEKSFLDLVVELEKLNLVAPDQLDLLEKCLKNIHRIDLKXKIQKYKQSVQGAGXSYRNVLQAAIQKSLKDPSNNFRMIXPYAHCPDLKILGNCSM

SEQ ID NO: 5936 - protein, 445 aa, Homo sapiens
  MOD_RES (15)..(15): Selenocysteine
  MOD_RES (81)..(81): Selenocysteine
  MOD_RES (166)..(166): Selenocysteine
  MOD_RES (180)..(180): Selenocysteine
  MOD_RES (229)..(229): Selenocysteine
  MOD_RES (235)..(235): Selenocysteine
  MOD_RES (237)..(237): Selenocysteine
  MOD_RES (292)..(292): Selenocysteine
  MOD_RES (359)..(359): Selenocysteine
  MOD_RES (372)..(372): Selenocysteine
  MOD_RES (435)..(435): Selenocysteine
  MOD_RES (445)..(445): Selenocysteine
MSAEVIHQVEEALDXDEKEMLLFLCRDVAIDVVPPNVRDLLDILRERGKLSVGDLAELLYRVRRFDLLKRILKMDRKAVEXHLLRNPHLVSDYRVLMAEIGEDLDKSDVSSLIFLMKDYMGRGKISKEKSFLDLVVELEKLNLVAPDQLDLLEKCLKNIHRIDLKXKIQKYKQSVQGAGXSYRNVLQAAIQKSLKDPSNNFRSIPEERYKMKSKPLGICLIIDCIGNEXELLRDXFXSLGYEVQKFLHLSMHGISQILGQFACMPEHRDYDSFVCVLVSRGGSQSVYGVDQXHSGLPLHHIRRMFMGDSCPYLAGKPKMFFIQNYVVSEGQLEDSSLLEVDGPAMKNVEFKAQKRGLCXVHREADFFWSLCXADMSLLEQSHSSPSLYLQCLSQKLRQERKRPLLDLHIELNGYMYDWNSRVSAKEKYYVWLQHXLRKKLILSYX

SEQ ID NO: 5937 - protein, 62 aa, Homo sapiens
  MOD_RES (14)..(14): Selenocysteine
  MOD_RES (35)..(35): Selenocysteine
MDYYRKYAAIFLVXLSVFLHVLHSAPDVQDCPECXLQENPFFSQPGAPILQCMGCCFSRAYP

SEQ ID NO: 5938 - protein, 101 aa, Homo sapiens
  MOD_RES (14)..(14): Selenocysteine
  MOD_RES (35)..(35): Selenocysteine
  MOD_RES (63)..(63): Selenocysteine
  MOD_RES (70)..(70): Selenocysteine
  MOD_RES (78)..(78): Selenocysteine
  MOD_RES (82)..(82): Selenocysteine
  MOD_RES (94)..(94): Selenocysteine
MDYYRKYAAIFLVXLSVFLHVLHSAPDVQDCPECXLQENPFFSQPGAPILQCMGCCFSRAYPXPLRSKKXMLVQKNVXSESXCCVAKSYNRVRXSRSPEAF

SEQ ID NO: 5939 - protein, 116 aa, Homo sapiens
  MOD_RES (14)..(14): Selenocysteine
  MOD_RES (35)..(35): Selenocysteine
  MOD_RES (63)..(63): Selenocysteine
  MOD_RES (70)..(70): Selenocysteine
  MOD_RES (78)..(78): Selenocysteine
  MOD_RES (82)..(82): Selenocysteine
  MOD_RES (93)..(93): Selenocysteine
  MOD_RES (104)..(104): Selenocysteine
  MOD_RES (110)..(110): Selenocysteine
MDYYRKYAAIFLVXLSVFLHVLHSAPDVQDCPECXLQENPFFSQPGAPILQCMGCCFSRAYPXPLRSKKXMLVQKNVXSESXCCVAKSYNRVXVMGGFKVENHXACHCSXCYYHKS

SEQ ID NO: 5940 - protein, 147 aa, Homo sapiens
  MOD_RES (14)..(14): Selenocysteine
  MOD_RES (31)..(31): Selenocysteine
  MOD_RES (51)..(51): Selenocysteine
  MOD_RES (60)..(60): Selenocysteine
  MOD_RES (66)..(66): Selenocysteine
  MOD_RES (94)..(94): Selenocysteine
  MOD_RES (101)..(101): Selenocysteine
  MOD_RES (109)..(109): Selenocysteine
  MOD_RES (113)..(113): Selenocysteine
  MOD_RES (124)..(124): Selenocysteine
  MOD_RES (135)..(135): Selenocysteine
  MOD_RES (141)..(141): Selenocysteine
MDYYRKYAAIFLVXLSVFLHVLHSAPDVQEXGFHHVAQAALKLLSSSNPPXKASQSARIXDCPECXLQENPFFSQPGAPILQCMGCCFSRAYPXPLRSKKXMLVQKNVXSESXCCVAKSYNRVXVMGGFKVENHXACHCSXCYYHKS

SEQ ID NO: 5941 - protein, 116 aa, Homo sapiens
  MOD_RES (35)..(35): Selenocysteine
  MOD_RES (63)..(63): Selenocysteine
  MOD_RES (70)..(70): Selenocysteine
  MOD_RES (78)..(78): Selenocysteine
  MOD_RES (82)..(82): Selenocysteine
  MOD_RES (93)..(93): Selenocysteine
  MOD_RES (104)..(104): Selenocysteine
  MOD_RES (110)..(110): Selenocysteine
MQLSFWSHCRCFCMFSIPLLMCRVRDQICDCPECXLQENPFFSQPGAPILQCMGCCFSRAYPXPLRSKKXMLVQKNVXSESXCCVAKSYNRVXVMGGFKVENHXACHCSXCYYHKS

SEQ ID NO: 5942 - protein, 130 aa, Homo sapiens
  MOD_RES (4)..(4): Selenocysteine
  MOD_RES (21)..(21): Selenocysteine
  MOD_RES (34)..(34): Selenocysteine
  MOD_RES (37)..(38): Selenocysteine
  MOD_RES (46)..(46): Selenocysteine
  MOD_RES (48)..(48): Selenocysteine
  MOD_RES (103)..(104): Selenocysteine
  MOD_RES (115)..(115): Selenocysteine
MGGXWASKEPLRPRCRPINAXLAVEKEGCPVCIXVNXXICAGYCPXMXRVLQGVLPALPQVVCNYRDVRFESIRLPGCPRGVNPVVSYAVALSCQCALCRRSXXDCGGPKDHPLXCDDPRFQDSSSSKAP

SEQ ID NO: 5943 - protein, 155 aa, Homo sapiens
  MOD_RES (16)..(16): Selenocysteine
  MOD_RES (33)..(33): Selenocysteine
  MOD_RES (46)..(46): Selenocysteine
  MOD_RES (49)..(50): Selenocysteine
  MOD_RES (58)..(58): Selenocysteine
  MOD_RES (60)..(60): Selenocysteine
  MOD_RES (115)..(116): Selenocysteine
  MOD_RES (127)..(127): Selenocysteine
MSKRLLLLLLLSMGGXWASKEPLRPRCRPINAXLAVEKEGCPVCIXVNXXICAGYCPXMXRVLQGVLPALPQVVCNYRDVRFESIRLPGCPRGVNPVVSYAVALSCQCALCRRSXXDCGGPKDHPLXCDDPRFQDSSSSKAPPPSLPSPSRLPGP

SEQ ID NO: 5944 - protein, 170 aa, Homo sapiens
  MOD_RES (24)..(24): Selenocysteine
  MOD_RES (34)..(34): Selenocysteine
  MOD_RES (50)..(50): Selenocysteine
  MOD_RES (119)..(119): Selenocysteine
  MOD_RES (169)..(169): Selenocysteine
MEQAPNMAEPRGPVDHGVQIRFIXEPVSGAEMGXLRRGGRRPAKDARASXYGVAVRVQGIAGQPFVVLNSGEKGGDSFGVQIKGANDQGASGALSSDLELPENPYSQVKGFPAPSQSSXSDEEPGAYWNGKLLRSHSQASLAGPGPVDPSNRSNSMLELAPKVASPGSXI

SEQ ID NO: 5945 - protein, 291 aa, Homo sapiens
  MOD_RES (24)..(24): Selenocysteine
  MOD_RES (34)..(34): Selenocysteine
  MOD_RES (50)..(50): Selenocysteine
  MOD_RES (119)..(119): Selenocysteine
  MOD_RES (169)..(169): Selenocysteine
  MOD_RES (172)..(172): Selenocysteine
  MOD_RES (197)..(197): Selenocysteine
  MOD_RES (201)..(201): Selenocysteine
  MOD_RES (223)..(223): Selenocysteine
  MOD_RES (232)..(232): Selenocysteine
  MOD_RES (236)..(236): Selenocysteine
  MOD_RES (239)..(239): Selenocysteine
  MOD_RES (247)..(247): Selenocysteine
  MOD_RES (269)..(269): Selenocysteine
  MOD_RES (288)..(288): Selenocysteine
MEQAPNMAEPRGPVDHGVQIRFIXEPVSGAEMGXLRRGGRRPAKDARASXYGVAVRVQGIAGQPFVVLNSGEKGGDSFGVQIKGANDQGASGALSSDLELPENPYSQVKGFPAPSQSSXSDEEPGAYWNGKLLRSHSQASLAGPGPVDPSNRSNSMLELAPKVASPGSXIDXAPLSSVDSLINKFDSQLGGQARGRXGRRXRMLPPEQRKRSKSLDSRLPRDXFEERERQSXNHWXSSXKYDNHVGXSKQPAQSQNLSPLSGFSRSRQXQDWVLQSFEEPRRSAQDPXMLQ

SEQ ID NO: 5946 - protein, 1203 aa, Homo sapiens
  MOD_RES (24)..(24): Selenocysteine
  MOD_RES (34)..(34): Selenocysteine
  MOD_RES (50)..(50): Selenocysteine
  MOD_RES (119)..(119): Selenocysteine
  MOD_RES (169)..(169): Selenocysteine
  MOD_RES (172)..(172): Selenocysteine
  MOD_RES (197)..(197): Selenocysteine
  MOD_RES (201)..(201): Selenocysteine
  MOD_RES (223)..(223): Selenocysteine
  MOD_RES (232)..(232): Selenocysteine
  MOD_RES (236)..(236): Selenocysteine
  MOD_RES (239)..(239): Selenocysteine
  MOD_RES (247)..(247): Selenocysteine
  MOD_RES (269)..(269): Selenocysteine
  MOD_RES (288)..(288): Selenocysteine
  MOD_RES (295)..(295): Selenocysteine
  MOD_RES (317)..(317): Selenocysteine
  MOD_RES (331)..(331): Selenocysteine
  MOD_RES (355)..(355): Selenocysteine
  MOD_RES (365)..(365): Selenocysteine
  MOD_RES (400)..(400): Selenocysteine
  MOD_RES (443)..(443): Selenocysteine
  MOD_RES (472)..(472): Selenocysteine
  MOD_RES (498)..(498): Selenocysteine
  MOD_RES (526)..(526): Selenocysteine
  MOD_RES (537)..(537): Selenocysteine
  MOD_RES (564)..(564): Selenocysteine
  MOD_RES (568)..(568): Selenocysteine
  MOD_RES (585)..(585): Selenocysteine
  MOD_RES (624)..(624): Selenocysteine
  MOD_RES (637)..(637): Selenocysteine
  MOD_RES (689)..(689): Selenocysteine
  MOD_RES (712)..(712): Selenocysteine
  MOD_RES (723)..(724): Selenocysteine
  MOD_RES (728)..(728): Selenocysteine
  MOD_RES (749)..(749): Selenocysteine
  MOD_RES (818)..(818): Selenocysteine
  MOD_RES (850)..(850): Selenocysteine
  MOD_RES (904)..(904): Selenocysteine
  MOD_RES (931)..(931): Selenocysteine
  MOD_RES (976)..(976): Selenocysteine
  MOD_RES (984)..(984): Selenocysteine
  MOD_RES (989)..(989): Selenocysteine
  MOD_RES (1004)..(1004): Selenocysteine
  MOD_RES (1032)..(1032): Selenocysteine
  MOD_RES (1069)..(1069): Selenocysteine
  MOD_RES (1074)..(1074): Selenocysteine
  MOD_RES (1194)..(1194): Selenocysteine
  MOD_RES (1200)..(1200): Selenocysteine
MEQAPNMAEPRGPVDHGVQIRFIXEPVSGAEMGXLRRGGRRPAKDARASXYGVAVRVQGIAGQPFVVLNSGEKGGDSFGVQIKGANDQGASGALSSDLELPENPYSQVKGFPAPSQSSXSDEEPGAYWNGKLLRSHSQASLAGPGPVDPSNRSNSMLELAPKVASPGSXIDXAPLSSVDSLINKFDSQLGGQARGRXGRRXRMLPPEQRKRSKSLDSRLPRDXFEERERQSXNHWXSSXKYDNHVGXSKQPAQSQNLSPLSGFSRSRQXQDWVLQSFEEPRRSAQDPXMLQFKSXPDLLRDQQEAAPPGSVDHMKAXIYGILREGSSESEXSVRRKVSLVLEKMQPLVMVSSGSXKAVAGQGELXRKVEELQRKLDEEVKKRQKLEPSQVGLERQLEEKXEECSRLQELLERRKGEAQQSNKELQNMKRLLDQGEDLRHGLEXQVMELQNKLKHVQGPEPAKEVLLKDLLEXRELLEEVLEGKQRVEEQLRLRERELXALKGALKEEVASRDQEVEHVRQQYQRDXEQLRRSMQDAXQDHAVLEAERQKMSALVRGLQRELEEXSEEXGHWQSMFQKNKEDLRAXKQELLQLRMEKEEMEEELGEKIEVLQRELEQARASAGDXRQVEVLKKELLRXQEELKELQAERQSQEVAGRHRDRELEKQLAVLRVEADRGRELEEQNLQLQKXLQQLRQDCEEASKAKMVAEAEAXVLGQRRAAVEXXLREXQEENDEFRRRILGLEQQLKEXRGLVDGGEAVEARLRDKLQRLEAEKQQLEEALNASQEEEGSLAAAKRALEARLEEAQRGLARLGQEQQXLNRALEEEGKQREVLRRGKAELEEQKRLLDRXVDRLNKELEKIGEDSKQALQQLQAQLEDYKEKARREVADAQRQAKDWASEAEKXSGGLSRLQDEIQRLRQALQASQAERDXARLDKELLAQRLQGLEQEAENKKRSQDDRARQLKGLEEKVSRLEXELDEEKNXVELLXDRVNRGRDQVDQLRXELMQERSARQDLECDKISLERQNKDLKXRLASSEGFQKPSASLSQLESQNQLLQERLQAEEREKXVLQSXNRKLERKVKELSIQIEDERQHVNDQKDQLSLRVKALKRQVDEAEEEIERLDGLRKKAQREVEEQHEVNEQLQARIKSLEKDSWRKASRSAAESALKNEGLSSDEEFDSVYDPSSIASLLXESNLQXSSC

SEQ ID NO: 5947 - protein, 131 aa, Homo sapiens
  MOD_RES (1)..(1): Any amino acid
  MOD_RES (5)..(5): Selenocysteine
  MOD_RES (12)..(12): Selenocysteine
  MOD_RES (34)..(34): Selenocysteine
  MOD_RES (48)..(48): Selenocysteine
  MOD_RES (74)..(74): Selenocysteine
  MOD_RES (109)..(109): Selenocysteine
XQDPXMLQFKSXPDLLRDQQEAAPPGSVDHMKAXIYGILREGSSESEXSVRRKVSLVLEKMQPLVAVAGQGELXRKVEELQRKLDEEVKKRQKLEPSQVGLERQLEEKXEECSRLQELLERRKGEAQQSNK

SEQ ID NO: 5948 - protein, 219 aa, Homo sapiens
  MOD_RES (42)..(42): Selenocysteine
  MOD_RES (52)..(52): Selenocysteine
  MOD_RES (55)..(55): Selenocysteine
  MOD_RES (60)..(60): Selenocysteine
  MOD_RES (111)..(111): Selenocysteine
  MOD_RES (125)..(125): Selenocysteine
  MOD_RES (134)..(134): Selenocysteine
  MOD_RES (160)..(160): Selenocysteine
  MOD_RES (204)..(204): Selenocysteine
  MOD_RES (212)..(212): Selenocysteine
MGGAQLELPSGARPGVCVRRSFRAHAGDQPRRPPGPIPVPGXMKQESAAPNXPPXSQSPXPSAQFPRNDGDPQALWIFGYGSLVWRPDFAYSDSRVGFVRGYSRRFWQGDXFHRGSDKMPGRVVXLLEDHEGCXWGVAYQVQGEQNPGYLGPAPEEAIAXQILACRGFSGHNLEYLLRLADFMQLCGPQAQDEHLAAIVDAVGXMLPCFCPXEQALALV

SEQ ID NO: 5949 - protein, 264 aa, Homo sapiens
  MOD_RES (42)..(42): Selenocysteine
  MOD_RES (52)..(52): Selenocysteine
  MOD_RES (55)..(55): Selenocysteine
  MOD_RES (60)..(60): Selenocysteine
  MOD_RES (111)..(111): Selenocysteine
  MOD_RES (125)..(125): Selenocysteine
  MOD_RES (134)..(134): Selenocysteine
  MOD_RES (165)..(165): Selenocysteine
  MOD_RES (169)..(169): Selenocysteine
  MOD_RES (188)..(188): Selenocysteine
  MOD_RES (205)..(205): Selenocysteine
  MOD_RES (249)..(249): Selenocysteine
  MOD_RES (257)..(257): Selenocysteine
MGGAQLELPSGARPGVCVRRSFRAHAGDQPRRPPGPIPVPGXMKQESAAPNXPPXSQSPXPSAQFPRNDGDPQALWIFGYGSLVWRPDFAYSDSRVGFVRGYSRRFWQGDXFHRGSDKMPGRVVXLLEDHEGCXWGVAYQVQGEQVSKALKYLNVREAVLGGYDXKEVXFYPQDAPDQPLKALAYVAXPQNPGYLGPAPEEAIAXQILACRGFSGHNLEYLLRLADFMQLCGPQAQDEHLAAIVDAVGXMLPCFCPXEQALALV

SEQ ID NO: 5950 - protein, 222 aa, Homo sapiens
  MOD_RES (10)..(10): Selenocysteine
  MOD_RES (13)..(13): Selenocysteine
  MOD_RES (18)..(18): Selenocysteine
  MOD_RES (69)..(69): Selenocysteine
  MOD_RES (83)..(83): Selenocysteine
  MOD_RES (92)..(92): Selenocysteine
  MOD_RES (123)..(123): Selenocysteine
  MOD_RES (127)..(127): Selenocysteine
  MOD_RES (146)..(146): Selenocysteine
  MOD_RES (163)..(163): Selenocysteine
  MOD_RES (207)..(207): Selenocysteine
  MOD_RES (215)..(215): Selenocysteine
MKQESAAPNXPPXSQSPXPSAQFPRNDGDPQALWIFGYGSLVWRPDFAYSDSRVGFVRGYSRRFWQGDXFHRGSDKMPGRVVXLLEDHEGCXWGVAYQVQGEQVSKALKYLNVREAVLGGYDXKEVXFYPQDAPDQPLKALAYVAXPQNPGYLGPAPEEAIAXQILACRGFSGHNLEYLLRLADFMQLCGPQAQDEHLAAIVDAVGXMLPCFCPXEQALALV

SEQ ID NO: 5951 - protein, 37 aa, Homo sapiens
  MOD_RES (22)..(22): Selenocysteine
  MOD_RES (30)..(30): Selenocysteine
MQLCGPQAQDEHLAAIVDAVGXMLPCFCPXEQALALV

SEQ ID NO: 5952 - protein, 359 aa, Homo sapiens
  MOD_RES (53)..(53): Selenocysteine
  MOD_RES (123)..(123): Selenocysteine
  MOD_RES (126)..(126): Selenocysteine
  MOD_RES (136)..(136): Selenocysteine
  MOD_RES (248)..(248): Selenocysteine
  MOD_RES (254)..(254): Selenocysteine
  MOD_RES (268)..(269): Selenocysteine
  MOD_RES (294)..(294): Selenocysteine
  MOD_RES (298)..(298): Selenocysteine
  MOD_RES (305)..(305): Selenocysteine
  MOD_RES (325)..(325): Selenocysteine
  MOD_RES (340)..(340): Selenocysteine
  MOD_RES (350)..(350): Selenocysteine
MVRPMLLLSLGLLAGLLPALAACPQNCHCHSDLQHVICDKVGLQKIPKVSEKXKLLNLQRNNFPVLAANSFRAMPNLVSLHLQHCQIREVAAGAFRGLKQLIYLYLSHNDIRVLRAGAFDDLXELXYLYLDHNKVXELPRGLLSPLVNLFILQLNNNKIRELRAGAFQGAKDLRWLYLSENALSSLQPGALDDVENLAKFHVDRNQLSSYPSAALSKLRVVEELKLSHNPLKSIPDNAFQSFGRYLEXLWLDNXNLEKFSDGAFLGVXXLKHVHLENNRLNQLPSNFPFDSLEXLALXNNPWKCXCQLRGLRRWLEAKASRPDAXCASPAKFKGQHIRDXDAFRSCKFPXKRSKKAGRH

SEQ ID NO: 5953 - protein, 42 aa, Homo sapiens
  MOD_RES (1)..(1): Any amino acid
  MOD_RES (8)..(8): Selenocysteine
  MOD_RES (23)..(23): Selenocysteine
  MOD_RES (33)..(33): Selenocysteine
XASRPDAXCASPAKFKGQHIRDXDAFRSCKFPXKRSKKAGRH

SEQ ID NO: 5954 - protein, 113 aa, Homo sapiens
  MOD_RES (23)..(23): Selenocysteine
  MOD_RES (42)..(42): Selenocysteine
  MOD_RES (76)..(76): Selenocysteine
  MOD_RES (88)..(88): Selenocysteine
  MOD_RES (95)..(95): Selenocysteine
  MOD_RES (107)..(107): Selenocysteine
  MOD_RES (111)..(111): Selenocysteine
  MOD_RES (113)..(113): Selenocysteine
ESKSDGRERSKKSSVSDAPVHIXASGEPVPISEESEELDQKXFSICKERMRPVKAALKQLDRPEKGLSEREQLEHXRQCLIKIGDHIXECLKEYXNPEQIKQWRNKXVIKXAX

SEQ ID NO: 5955 - protein, 22 aa, Homo sapiens
  MOD_RES (12)..(12): Selenocysteine
ISEESEELDQKXFSIKPVDFCI

SEQ ID NO: 5956 - protein, 1710 aa, Homo sapiens
  MOD_RES (68)..(68): Selenocysteine
  MOD_RES (178)..(178): Selenocysteine
  MOD_RES (237)..(237): Selenocysteine
  MOD_RES (250)..(250): Selenocysteine
  MOD_RES (273)..(273): Selenocysteine
  MOD_RES (288)..(288): Selenocysteine
  MOD_RES (291)..(293): Selenocysteine
  MOD_RES (331)..(331): Selenocysteine
  MOD_RES (334)..(334): Selenocysteine
  MOD_RES (337)..(337): Selenocysteine
  MOD_RES (359)..(359): Selenocysteine
  MOD_RES (381)..(381): Selenocysteine
  MOD_RES (448)..(449): Selenocysteine
  MOD_RES (513)..(513): Selenocysteine
  MOD_RES (516)..(516): Selenocysteine
  MOD_RES (541)..(541): Selenocysteine
  MOD_RES (543)..(543): Selenocysteine
  MOD_RES (551)..(551): Selenocysteine
  MOD_RES (573)..(573): Selenocysteine
  MOD_RES (577)..(577): Selenocysteine
  MOD_RES (581)..(581): Selenocysteine
  MOD_RES (591)..(592): Selenocysteine
  MOD_RES (629)..(629): Selenocysteine
  MOD_RES (642)..(642): Selenocysteine
  MOD_RES (644)..(644): Selenocysteine
  MOD_RES (731)..(731): Selenocysteine
  MOD_RES (745)..(745): Selenocysteine
  MOD_RES (864)..(864): Selenocysteine
  MOD_RES (878)..(878): Selenocysteine
  MOD_RES (914)..(914): Selenocysteine
  MOD_RES (942)..(943): Selenocysteine
  MOD_RES (946)..(946): Selenocysteine
  MOD_RES (950)..(950): Selenocysteine
  MOD_RES (958)..(958): Selenocysteine
  MOD_RES (1001)..(1001): Selenocysteine
  MOD_RES (1010)..(1010): Selenocysteine
  MOD_RES (1117)..(1117): Selenocysteine
  MOD_RES (1163)..(1163): Selenocysteine
  MOD_RES (1187)..(1187): Selenocysteine
  MOD_RES (1190)..(1190): Selenocysteine
  MOD_RES (1201)..(1201): Selenocysteine
  MOD_RES (1239)..(1239): Selenocysteine
  MOD_RES (1244)..(1244): Selenocysteine
  MOD_RES (1285)..(1285): Selenocysteine
  MOD_RES (1304)..(1304): Selenocysteine
  MOD_RES (1394)..(1394): Selenocysteine
  MOD_RES (1413)..(1413): Selenocysteine
  MOD_RES (1447)..(1447): Selenocysteine
  MOD_RES (1459)..(1459): Selenocysteine
  MOD_RES (1466)..(1466): Selenocysteine
  MOD_RES (1486)..(1486): Selenocysteine
  MOD_RES (1534)..(1534): Selenocysteine
  MOD_RES (1551)..(1551): Selenocysteine
  MOD_RES (1650)..(1650): Selenocysteine
  MOD_RES (1700)..(1700): Selenocysteine
  MOD_RES (1704)..(1704): Selenocysteine
  MOD_RES (1710)..(1710): Selenocysteine
MNGHSDEESVRNSSGESSQSDDDSGSASGSGSGSSSGSSSDGSSSQSGSSDSDSGSESGSQSESESDXSRENKVQAKPPKVDGAEFWKSSPSILAVQRSAILKKQQQQQQQQQHQASSNSGSEEDSSSSEDSDDSSSEVKRKKHKDEDWQMSGSGSPSQSGSDSESEEEREKSSCDEXESDYEPKNKVKSRKPQNRSKSKNGKKILGQKKRQIDSSEEDDDEEDYDNDKRSSRRQAXVNVSYKEDEEMKXDSDDLLEVCGEDVPQPEEEEFEXIERFMDCRIGRKGAXGAXXXIYAVEADGDPNAGFEKNKEPGEIQYLIKWKGWSHIHNXWEXEEXLKQQNVRGMKKLDNYKKKDQEXKRWLKNASPEDVEYYNCQQELXDDLHKQYQIVERIIAHSNQKSAAGYPDYYCKWQGLPYSECSWEDGALISKKFQACIDEYFSRNQSKXXPFKDCKVLKQRPRFVALKKQPSYIGGHEGLELRDYQLNGLNWLAHSWCKGNSCILADEMGLGKXIQXISFLNYLFHEHQLYGPFLLVVPLSXLXSWQREIQXWASQMNAVVYLGDINSRNMIRXHEWXHHQXKRLKFNILLXXYEILLKDKAFLGGLNWAFIGVDEAHRLKNDDSLLYKXLIDFKSNHRLLIXGXPLQNSLKELWSLLHFIMPEKFSSWEDFEEEHGKGREYGYASLHKELEPFLLRRVKKDVEKSLPAKVEQILRMEMSALQKQYYKWILXRNYKALSKGSKGSXSGFLNIMMELKKCCNHCYLIKPPDNNEFYNKQEALQHLIRSSGKLILLDKLLIRLRERGNRVLIFSQMVRMLDILAEYLKYRQFPFQRLDGSIKGELRKQALDHFNAEGSEDFCFLLSXRAGGLGINLASADXVVIFDSDWNPQNDLQAQARAHRIGQKKQVNIYRLVXKGSVEEDILERAKKKMVLDHLVIQRMDXXGKXVLHXGSAPSSSXPFNKEELSAILKFGAEELFKEPEGEEQEPQEMDIDEILKRAEXHENEPGPLXVGDELLSQFKVANFSNMDEDDIELEPERNSKNWEEIIPEDQRRRLEEEERQKELEEIYMLPRMRNCAKQISFNGSEGRRSRSRRYSGSDSDSISEGKRPKKRGRPRXIPRENIKGFSDAEIRRFIKSYKKFGGPLERLDAIARDAELVDKSEXDLRRLGELVHNGCIKALKDSSSGXERXGGRLGKVKGPXFRISGVQVNAKLVISHEEELIPLHKSIPSDPEERKQYXIPCHXKAAHFDIDWGKEDDSNLLIGIYEYGYGSWEMIKMDPDLSLXHKILPDDPDKKPQAKQLQXRADYLIKLLSRDLAKKEALSGAGSSKRRKARAKKNKAMKSIKVKEEIKSDSSPLPSEKSDEDDDKLSESKSDGRERSKKSSVSDAPVHIXASGEPVPISEESEELDQKXFSICKERMRPVKAALKQLDRPEKGLSEREQLEHXRQCLIKIGDHIXECLKEYXNPEQIKQWRKNLWIFVSKFXEFDARKLHKLYKHAIKKRQESQQNSDQNSNLNPHVIRNPDVERLKENXNHDDSSRDSYSSDRHLXQYHDHHKDRHQGDSYKKSDSRKRPYSSFSNGKDHRDWDHYKQDSRYYSDREKHRKLDDHRSRDHRSNLEGSLKDRSHSDHRSHSDHRLHSDHRSSSEYXHHKSSRDYRYHSDWQMDHRASSSGPRSPLDQRSPYGSRSPFEHSVEHKSXPEHXWSSRKX

SEQ ID NO: 5957 - protein, 272 aa, Homo sapiens
  MOD_RES (1)..(1): Any amino acid
  MOD_RES (13)..(13): Selenocysteine
  MOD_RES (93)..(93): Selenocysteine
  MOD_RES (191)..(191): Selenocysteine
  MOD_RES (210)..(210): Selenocysteine
  MOD_RES (244)..(244): Selenocysteine
  MOD_RES (256)..(256): Selenocysteine
  MOD_RES (263)..(263): Selenocysteine
XPDKKPQAKQLQXRADYLIKLLSRDLAKKEALSGAGSSKRRKARAKKNKAMKSIKVKEEIKSDSSPLPSEKSDEDDDKDEISSVKHPNKKIKXERDSEEKPEPDVYIKKEPEEKREAKEKENKKELKREIKEKEDKKDIKEKDFKEKRENKVKEAIQKEKDIKEEKLSESKSDGRERSKKSSVSDAPVHIXASGEPVPISEESEELDQKXFSICKERMRPVKAALKQLDRPEKGLSEREQLEHXRQCLIKIGDHIXECLKEYXNPEQIKQWR

SEQ ID NO: 5958 - protein, 797 aa, Homo sapiens
  MOD_RES (25)..(25): Selenocysteine
  MOD_RES (51)..(52): Selenocysteine
  MOD_RES (89)..(89): Selenocysteine
  MOD_RES (102)..(102): Selenocysteine
  MOD_RES (104)..(104): Selenocysteine
  MOD_RES (168)..(168): Selenocysteine
  MOD_RES (174)..(174): Selenocysteine
  MOD_RES (205)..(205): Selenocysteine
  MOD_RES (243)..(243): Selenocysteine
  MOD_RES (273)..(273): Selenocysteine
  MOD_RES (321)..(321): Selenocysteine
  MOD_RES (331)..(331): Selenocysteine
  MOD_RES (335)..(335): Selenocysteine
  MOD_RES (374)..(374): Selenocysteine
  MOD_RES (390)..(390): Selenocysteine
  MOD_RES (400)..(400): Selenocysteine
  MOD_RES (432)..(432): Selenocysteine
  MOD_RES (445)..(445): Selenocysteine
  MOD_RES (501)..(501): Selenocysteine
  MOD_RES (529)..(529): Selenocysteine
  MOD_RES (615)..(615): Selenocysteine
  MOD_RES (625)..(625): Selenocysteine
  MOD_RES (653)..(653): Selenocysteine
  MOD_RES (747)..(747): Selenocysteine
  MOD_RES (755)..(755): Selenocysteine
  MOD_RES (770)..(770): Selenocysteine
MAVSWEMRWAWGRPARFAPGLSCVXYAGDKEERACLQQDLKQESRFHVLLXXYEICLKDASFLKSFPWSVLVVDEAHRLKNQSSLLHKXLSEFSVVFSLLLXGXPIQNSLQELYSLLSFVEPDLFSKEEVGDFIQRYQDIEKESESASELHKLLQPFLLRRVKAEVAXELPKKXEVVIYHGMSALQKKYYKAILMKDLDAFENEXAKKVKLQNILSQLRKCVDHPYLFDGVEPEPFEVGDHLXEASGKLHLLDKLLAFLYSGGHRVLLFSQMXQMLDILQDYMDYRGYSYERVDGSVRGEERHLAIKNFGQQPIFVFLLSXRAGGVGMNLXAADXVIFVDSDFNPQNDLQAAARAHRIGQNKSVKVIRLIGRDXVEEIVYRKAASKLQLXNMIIEGGHFXLGAQKPAADADLQLSEILKFGLDKLLASEGSXMDEIDLESILGEXKDGQWVSDALPAAEGGSRDQEEGKNHMYLFEGKDYSKEPSKEDRKSFEQLVNLQKXLLEKASQEGRSLRNKGSVLIPGLVEGSXKRKRVLSPEELEDRQKKRQEAAAKRRRLIEEKKRQKEEAEHKKKMAWWESNNYQSFCLPSEESEPEDLENGEESSAELDYQDPDAXSLKYVSGDVXHPQAGAEDALIVHCVDDSGHWGRGGLFXALEKRSAEPRKIYELAGKMKDLSLGGVLLFPVDDKESRNKGQDLLALIVAQHRDRSNVLSGIKMAALEEGLKKIFLAAKKKKASVHLPRIGHAXKGFNWYGXERLIRKHLAARGIPXYIYYFPRSKSAVLHSQSSSSSSRQLVP

SEQ ID NO: 5959 - protein, 693 aa, Homo sapiens
  MOD_RES (7)..(7): Selenocysteine
  MOD_RES (22)..(22): Selenocysteine
  MOD_RES (42)..(42): Selenocysteine
  MOD_RES (64)..(64): Selenocysteine
  MOD_RES (70)..(70): Selenocysteine
  MOD_RES (101)..(101): Selenocysteine
  MOD_RES (139)..(139): Selenocysteine
  MOD_RES (169)..(169): Selenocysteine
  MOD_RES (217)..(217): Selenocysteine
  MOD_RES (227)..(227): Selenocysteine
  MOD_RES (231)..(231): Selenocysteine
  MOD_RES (270)..(270): Selenocysteine
  MOD_RES (286)..(286): Selenocysteine
  MOD_RES (296)..(296): Selenocysteine
  MOD_RES (328)..(328): Selenocysteine
  MOD_RES (341)..(341): Selenocysteine
  MOD_RES (397)..(397): Selenocysteine
  MOD_RES (425)..(425): Selenocysteine
  MOD_RES (511)..(511): Selenocysteine
  MOD_RES (521)..(521): Selenocysteine
  MOD_RES (549)..(549): Selenocysteine
  MOD_RES (643)..(643): Selenocysteine
  MOD_RES (651)..(651): Selenocysteine
  MOD_RES (666)..(666): Selenocysteine
MERAGAXSRGGQAPGFLLRLHXEGRAEAARVQEQDLRQWGLXASELHKLLQPFLLRRVKAEVAXELPKKXEVVIYHGMSALQKKYYKAILMKDLDAFENEXAKKVKLQNILSQLRKCVDHPYLFDGVEPEPFEVGDHLXEASGKLHLLDKLLAFLYSGGHRVLLFSQMXQMLDILQDYMDYRGYSYERVDGSVRGEERHLAIKNFGQQPIFVFLLSXRAGGVGMNLXAADXVIFVDSDFNPQNDLQAAARAHRIGQNKSVKVIRLIGRDXVEEIVYRKAASKLQLXNMIIEGGHFXLGAQKPAADADLQLSEILKFGLDKLLASEGSXMDEIDLESILGEXKDGQWVSDALPAAEGGSRDQEEGKNHMYLFEGKDYSKEPSKEDRKSFEQLVNLQKXLLEKASQEGRSLRNKGSVLIPGLVEGSXKRKRVLSPEELEDRQKKRQEAAAKRRRLIEEKKRQKEEAEHKKKMAWWESNNYQSFCLPSEESEPEDLENGEESSAELDYQDPDAXSLKYVSGDVXHPQAGAEDALIVHCVDDSGHWGRGGLFXALEKRSAEPRKIYELAGKMKDLSLGGVLLFPVDDKESRNKGQDLLALIVAQHRDRSNVLSGIKMAALEEGLKKIFLAAKKKKASVHLPRIGHAXKGFNWYGXERLIRKHLAARGIPXYIYYFPRSKSAVLHSQSSSSSSRQLVP

SEQ ID NO: 5960 - protein, 56 aa, Homo sapiens
  MOD_RES (7)..(7): Selenocysteine
  MOD_RES (22)..(22): Selenocysteine
  MOD_RES (42)..(42): Selenocysteine
  MOD_RES (55)..(55): Selenocysteine
MERAGAXSRGGQAPGFLLRLHXEGRAEAARVQEQDLRQWGLXDSLGVFLLWMKLXG

SEQ ID NO: 5961 - protein, 82 aa, Homo sapiens
  MOD_RES (7)..(7): Selenocysteine
  MOD_RES (22)..(22): Selenocysteine
  MOD_RES (42)..(42): Selenocysteine
  MOD_RES (78)..(78): Selenocysteine
MERAGAXSRGGQAPGFLLRLHXEGRAEAARVQEQDLRQWGLXGIHLRSYQLEGVNWLAQRFHCQNGCILGDEMGLGKXCQED

SEQ ID NO: 5962 - protein, 377 aa, Homo sapiens
  MOD_RES (7)..(7): Selenocysteine
  MOD_RES (22)..(22): Selenocysteine
  MOD_RES (42)..(42): Selenocysteine
  MOD_RES (78)..(78): Selenocysteine
  MOD_RES (81)..(81): Selenocysteine
  MOD_RES (125)..(125): Selenocysteine
  MOD_RES (151)..(152): Selenocysteine
  MOD_RES (189)..(189): Selenocysteine
  MOD_RES (202)..(202): Selenocysteine
  MOD_RES (204)..(204): Selenocysteine
  MOD_RES (268)..(268): Selenocysteine
  MOD_RES (274)..(274): Selenocysteine
  MOD_RES (305)..(305): Selenocysteine
  MOD_RES (343)..(343): Selenocysteine
MERAGAXSRGGQAPGFLLRLHXEGRAEAARVQEQDLRQWGLXGIHLRSYQLEGVNWLAQRFHCQNGCILGDEMGLGKXCQXIALFIYLAGRLNDEGPFLILCPLSVLSNWKEEMQRFAPGLSCVXYAGDKEERACLQQDLKQESRFHVLLXXYEICLKDASFLKSFPWSVLVVDEAHRLKNQSSLLHKXLSEFSVVFSLLLXGXPIQNSLQELYSLLSFVEPDLFSKEEVGDFIQRYQDIEKESESASELHKLLQPFLLRRVKAEVAXELPKKXEVVIYHGMSALQKKYYKAILMKDLDAFENEXAKKVKLQNILSQLRKCVDHPYLFDGVEPEPFEVGDHLXEASGKLHLLDKLLAFLYSGWSWHELNSSRYCDFC

SEQ ID NO: 5963 - protein, 897 aa, Homo sapiens
  MOD_RES (7)..(7): Selenocysteine
  MOD_RES (22)..(22): Selenocysteine
  MOD_RES (42)..(42): Selenocysteine
  MOD_RES (78)..(78): Selenocysteine
  MOD_RES (81)..(81): Selenocysteine
  MOD_RES (125)..(125): Selenocysteine
  MOD_RES (151)..(152): Selenocysteine
  MOD_RES (189)..(189): Selenocysteine
  MOD_RES (202)..(202): Selenocysteine
  MOD_RES (204)..(204): Selenocysteine
  MOD_RES (268)..(268): Selenocysteine
  MOD_RES (274)..(274): Selenocysteine
  MOD_RES (305)..(305): Selenocysteine
  MOD_RES (343)..(343): Selenocysteine
  MOD_RES (373)..(373): Selenocysteine
  MOD_RES (421)..(421): Selenocysteine
  MOD_RES (431)..(431): Selenocysteine
  MOD_RES (435)..(435): Selenocysteine
  MOD_RES (474)..(474): Selenocysteine
  MOD_RES (490)..(490): Selenocysteine
  MOD_RES (500)..(500): Selenocysteine
  MOD_RES (532)..(532): Selenocysteine
  MOD_RES (545)..(545): Selenocysteine
  MOD_RES (601)..(601): Selenocysteine
  MOD_RES (629)..(629): Selenocysteine
  MOD_RES (715)..(715): Selenocysteine
  MOD_RES (725)..(725): Selenocysteine
  MOD_RES (753)..(753): Selenocysteine
  MOD_RES (847)..(847): Selenocysteine
  MOD_RES (855)..(855): Selenocysteine
  MOD_RES (870)..(870): Selenocysteine
MERAGAXSRGGQAPGFLLRLHXEGRAEAARVQEQDLRQWGLXGIHLRSYQLEGVNWLAQRFHCQNGCILGDEMGLGKXCQXIALFIYLAGRLNDEGPFLILCPLSVLSNWKEEMQRFAPGLSCVXYAGDKEERACLQQDLKQESRFHVLLXXYEICLKDASFLKSFPWSVLVVDEAHRLKNQSSLLHKXLSEFSVVFSLLLXGXPIQNSLQELYSLLSFVEPDLFSKEEVGDFIQRYQDIEKESESASELHKLLQPFLLRRVKAEVAXELPKKXEVVIYHGMSALQKKYYKAILMKDLDAFENEXAKKVKLQNILSQLRKCVDHPYLFDGVEPEPFEVGDHLXEASGKLHLLDKLLAFLYSGGHRVLLFSQMXQMLDILQDYMDYRGYSYERVDGSVRGEERHLAIKNFGQQPIFVFLLSXRAGGVGMNLXAADXVIFVDSDFNPQNDLQAAARAHRIGQNKSVKVIRLIGRDXVEEIVYRKAASKLQLXNMIIEGGHFXLGAQKPAADADLQLSEILKFGLDKLLASEGSXMDEIDLESILGEXKDGQWVSDALPAAEGGSRDQEEGKNHMYLFEGKDYSKEPSKEDRKSFEQLVNLQKXLLEKASQEGRSLRNKGSVLIPGLVEGSXKRKRVLSPEELEDRQKKRQEAAAKRRRLIEEKKRQKEEAEHKKKMAWWESNNYQSFCLPSEESEPEDLENGEESSAELDYQDPDAXSLKYVSGDVXHPQAGAEDALIVHCVDDSGHWGRGGLFXALEKRSAEPRKIYELAGKMKDLSLGGVLLFPVDDKESRNKGQDLLALIVAQHRDRSNVLSGIKMAALEEGLKKIFLAAKKKKASVHLPRIGHAXKGFNWYGXERLIRKHLAARGIPXYIYYFPRSKSAVLHSQSSSSSSRQLVP

SEQ ID NO: 5964 - protein, 616 aa, Homo sapiens
  MOD_RES (24)..(24): Selenocysteine
  MOD_RES (62)..(62): Selenocysteine
  MOD_RES (92)..(92): Selenocysteine
  MOD_RES (140)..(140): Selenocysteine
  MOD_RES (150)..(150): Selenocysteine
  MOD_RES (154)..(154): Selenocysteine
  MOD_RES (193)..(193): Selenocysteine
  MOD_RES (209)..(209): Selenocysteine
  MOD_RES (219)..(219): Selenocysteine
  MOD_RES (251)..(251): Selenocysteine
  MOD_RES (264)..(264): Selenocysteine
  MOD_RES (320)..(320): Selenocysteine
  MOD_RES (348)..(348): Selenocysteine
  MOD_RES (434)..(434): Selenocysteine
  MOD_RES (444)..(444): Selenocysteine
  MOD_RES (472)..(472): Selenocysteine
  MOD_RES (566)..(566): Selenocysteine
  MOD_RES (574)..(574): Selenocysteine
  MOD_RES (589)..(589): Selenocysteine
MSALQKKYYKAILMKDLDAFENEXAKKVKLQNILSQLRKCVDHPYLFDGVEPEPFEVGDHLXEASGKLHLLDKLLAFLYSGGHRVLLFSQMXQMLDILQDYMDYRGYSYERVDGSVRGEERHLAIKNFGQQPIFVFLLSXRAGGVGMNLXAADXVIFVDSDFNPQNDLQAAARAHRIGQNKSVKVIRLIGRDXVEEIVYRKAASKLQLXNMIIEGGHFXLGAQKPAADADLQLSEILKFGLDKLLASEGSXMDEIDLESILGEXKDGQWVSDALPAAEGGSRDQEEGKNHMYLFEGKDYSKEPSKEDRKSFEQLVNLQKXLLEKASQEGRSLRNKGSVLIPGLVEGSXKRKRVLSPEELEDRQKKRQEAAAKRRRLIEEKKRQKEEAEHKKKMAWWESNNYQSFCLPSEESEPEDLENGEESSAELDYQDPDAXSLKYVSGDVXHPQAGAEDALIVHCVDDSGHWGRGGLFXALEKRSAEPRKIYELAGKMKDLSLGGVLLFPVDDKESRNKGQDLLALIVAQHRDRSNVLSGIKMAALEEGLKKIFLAAKKKKASVHLPRIGHAXKGFNWYGXERLIRKHLAARGIPXYIYYFPRSKSAVLHSQSSSSSSRQLVP

SEQ ID NO: 5965 - protein, 219 aa, Homo sapiens
  MOD_RES (13)..(13): Selenocysteine
  MOD_RES (31)..(31): Selenocysteine
  MOD_RES (40)..(40): Selenocysteine
  MOD_RES (53)..(53): Selenocysteine
  MOD_RES (68)..(68): Selenocysteine
  MOD_RES (72)..(73): Selenocysteine
  MOD_RES (89)..(89): Selenocysteine
  MOD_RES (111)..(111): Selenocysteine
  MOD_RES (179)..(179): Selenocysteine
  MOD_RES (183)..(183): Selenocysteine
  MOD_RES (187)..(187): Selenocysteine
  MOD_RES (210)..(210): Selenocysteine
  MOD_RES (216)..(216): Selenocysteine
EDDDDDEAPKRQXRRRAAKNVSYKEDDDFEXDSDDLIEMXGEGVDEQQDNSEXIEKVLDSRLGKKGAXGASXXVYAIEANGDPSGDFDXEKDEGEIQYLIKWKGWSYIHSXWESEESLQQQKVKGLKKLENFKKKEDEIKQWLGKVSPEDVEYFNCQQELASELNKQYQIVERVIAVKXSKSXLGQXDFPAHSRKPAPSNEPEYLWRRYXDKEDWXHMC

SEQ ID NO: 5966 - protein, 98 aa, Homo sapiens
  MOD_RES (12)..(12): Selenocysteine
  MOD_RES (17)..(17): Selenocysteine
  MOD_RES (24)..(24): Selenocysteine
  MOD_RES (40)..(40): Selenocysteine
  MOD_RES (67)..(67): Selenocysteine
  MOD_RES (90)..(90): Selenocysteine
  MOD_RES (95)..(95): Selenocysteine
EIYMLPRIRSSXKKAQXNDSDSDXESKRQAQRSSASESEXEDSDDDKKPKRRGRPRSVRKDLVEGFXDAEIRRFIKAYKKFGLPLERGMXKMIKXGHP

SEQ ID NO: 5967 - protein, 35 aa, Homo sapiens
  MOD_RES (25)..(25): Selenocysteine
  MOD_RES (32)..(32): Selenocysteine
GVEDDSRLLLGIYEHGYGNWELIKXDPELKLXDKL

SEQ ID NO: 5968 - protein, 514 aa, Homo sapiens
  MOD_RES (18)..(18): Selenocysteine
  MOD_RES (22)..(22): Selenocysteine
  MOD_RES (177)..(177): Selenocysteine
  MOD_RES (198)..(198): Selenocysteine
  MOD_RES (210)..(210): Selenocysteine
  MOD_RES (235)..(235): Selenocysteine
  MOD_RES (253)..(253): Selenocysteine
  MOD_RES (262)..(262): Selenocysteine
  MOD_RES (275)..(275): Selenocysteine
  MOD_RES (290)..(290): Selenocysteine
  MOD_RES (294)..(295): Selenocysteine
  MOD_RES (311)..(311): Selenocysteine
  MOD_RES (333)..(333): Selenocysteine
  MOD_RES (401)..(401): Selenocysteine
  MOD_RES (405)..(405): Selenocysteine
  MOD_RES (409)..(409): Selenocysteine
  MOD_RES (465)..(465): Selenocysteine
  MOD_RES (468)..(468): Selenocysteine
MAHKQREDYLNLSPCVFXWYRXFSQLAFDGEKLSHSASEEASGSDSGSQSESEQGSDPGSGHGSESNSSSESSESQSESESESAGSKSQPVLPEAKEKPASKKERIADVKKMWEEYPDVYGVRRSNRSRQEPSRFNIKEEASSGSESGSPKRRGQRQLKKQEKWKQEPSEDEQEQGXSAESEPEQKKVKARRPVPRRXVPKPRVKKQPKXQRGKRKKQDSSDEDDDDDEAPKRQXRRRAAKNVSYKEDDDFEXDSDDLIEMXGEGVDEQQDNSEXIEKVLDSRLGKKGAXGASXXVYAIEANGDPSGDFDXEKDEGEIQYLIKWKGWSYIHSXWESEESLQQQKVKGLKKLENFKKKEDEIKQWLGKVSPEDVEYFNCQQELASELNKQYQIVERVIAVKXSKSXLGQXDFPAHSRKPAPSNEPEYLCKWMGLPYSECSWEDEALIGKKFQNCIDSFHSRNNSKXIPXRECKALKQRPRFVALKKQPAYLGGENLELRDYQLEGLNWLAHSWCK

SEQ ID NO: 5969 - protein, 31 aa, Homo sapiens
MMRNKDKSQEEDSSLHSNASRVVWNALSSEA

SEQ ID NO: 5970 - protein, 45 aa, Homo sapiens
  MOD_RES (26)..(26): Selenocysteine
  MOD_RES (38)..(38): Selenocysteine
MMRNKDKSQEEDSSLHSNASRYELSXFFLFVFFFGGEXSAYNCLP

SEQ ID NO: 5971 - protein, 1828 aa, Homo sapiens
  MOD_RES (164)..(164): Selenocysteine
  MOD_RES (185)..(185): Selenocysteine
  MOD_RES (197)..(197): Selenocysteine
  MOD_RES (222)..(222): Selenocysteine
  MOD_RES (240)..(240): Selenocysteine
  MOD_RES (249)..(249): Selenocysteine
  MOD_RES (262)..(262): Selenocysteine
  MOD_RES (277)..(277): Selenocysteine
  MOD_RES (281)..(282): Selenocysteine
  MOD_RES (298)..(298): Selenocysteine
  MOD_RES (320)..(320): Selenocysteine
  MOD_RES (388)..(388): Selenocysteine
  MOD_RES (392)..(392): Selenocysteine
  MOD_RES (396)..(396): Selenocysteine
  MOD_RES (452)..(452): Selenocysteine
  MOD_RES (455)..(455): Selenocysteine
  MOD_RES (516)..(516): Selenocysteine
  MOD_RES (519)..(519): Selenocysteine
  MOD_RES (544)..(544): Selenocysteine
  MOD_RES (546)..(546): Selenocysteine
  MOD_RES (573)..(573): Selenocysteine
  MOD_RES (584)..(584): Selenocysteine
  MOD_RES (594)..(595): Selenocysteine
  MOD_RES (604)..(604): Selenocysteine
  MOD_RES (632)..(632): Selenocysteine
  MOD_RES (645)..(645): Selenocysteine
  MOD_RES (647)..(647): Selenocysteine
  MOD_RES (734)..(734): Selenocysteine
  MOD_RES (744)..(744): Selenocysteine
  MOD_RES (748)..(748): Selenocysteine
  MOD_RES (801)..(801): Selenocysteine
  MOD_RES (828)..(828): Selenocysteine
  MOD_RES (867)..(867): Selenocysteine
  MOD_RES (881)..(881): Selenocysteine
  MOD_RES (917)..(917): Selenocysteine
  MOD_RES (920)..(920): Selenocysteine
  MOD_RES (945)..(946): Selenocysteine
  MOD_RES (949)..(949): Selenocysteine
  MOD_RES (969)..(969): Selenocysteine
  MOD_RES (1004)..(1004): Selenocysteine
  MOD_RES (1011)..(1011): Selenocysteine
  MOD_RES (1014)..(1014): Selenocysteine
  MOD_RES (1028)..(1028): Selenocysteine
  MOD_RES (1077)..(1077): Selenocysteine
  MOD_RES (1082)..(1082): Selenocysteine
  MOD_RES (1089)..(1089): Selenocysteine
  MOD_RES (1105)..(1105): Selenocysteine
  MOD_RES (1132)..(1132): Selenocysteine
  MOD_RES (1209)..(1209): Selenocysteine
  MOD_RES (1249)..(1249): Selenocysteine
  MOD_RES (1286)..(1286): Selenocysteine
  MOD_RES (1293)..(1293): Selenocysteine
  MOD_RES (1301)..(1301): Selenocysteine
  MOD_RES (1312)..(1312): Selenocysteine
  MOD_RES (1332)..(1332): Selenocysteine
  MOD_RES (1448)..(1448): Selenocysteine
  MOD_RES (1468)..(1468): Selenocysteine
  MOD_RES (1502)..(1502): Selenocysteine
  MOD_RES (1541)..(1541): Selenocysteine
  MOD_RES (1573)..(1573): Selenocysteine
  MOD_RES (1597)..(1597): Selenocysteine
  MOD_RES (1767)..(1767): Selenocysteine
  MOD_RES (1828)..(1828): Selenocysteine
MMRNKDKSQEEDSSLHSNASSHSASEEASGSDSGSQSESEQGSDPGSGHGSESNSSSESSESQSESESESAGSKSQPVLPEAKEKPASKKERIADVKKMWEEYPDVYGVRRSNRSRQEPSRFNIKEEASSGSESGSPKRRGQRQLKKQEKWKQEPSEDEQEQGXSAESEPEQKKVKARRPVPRRXVPKPRVKKQPKXQRGKRKKQDSSDEDDDDDEAPKRQXRRRAAKNVSYKEDDDFEXDSDDLIEMXGEGVDEQQDNSEXIEKVLDSRLGKKGAXGASXXVYAIEANGDPSGDFDXEKDEGEIQYLIKWKGWSYIHSXWESEESLQQQKVKGLKKLENFKKKEDEIKQWLGKVSPEDVEYFNCQQELASELNKQYQIVERVIAVKXSKSXLGQXDFPAHSRKPAPSNEPEYLCKWMGLPYSECSWEDEALIGKKFQNCIDSFHSRNNSKXIPXRECKALKQRPRFVALKKQPAYLGGENLELRDYQLEGLNWLAHSWCKNNSVILADEMGLGKXIQXISFLSYLFHQHQLYGPFLIVVPLSXLXSWQREFEIWAPEINVVVYIGDLMSRNXIREYEWIHSQXKRLKFNALIXXYEILLKDKXVLGSINWAFLGVDEAHRLKNDDSLLYKXLIDFKSNHRLLIXGXPLQNSLKELWSLLHFIMPEKFEFWEDFEEDHGKGRENGYQSLHKVLEPFLLRRVKKDVEKSLPAKVEQILRVEMSALQKQYYKWILXRNYKALAKGXRGSXSGFLNIVMELKKCCNHCYLIKPPEENERENGQEILLSLIRSSGKLILLDKLLXRLRERGNRVLIFSQMVRMLDILAEYLXIKHYPFQRLDGSIKGEIRKQALDHFNADGSEDFCFLLSXRAGGLGINLASADXVVIFDSDWNPQNDLQAQARAHRIGQKKQVNIYRLVXKGXVEEEIIERAKKKMVLDHLVIQRMDXXGRXILENNSGRSNSNPFNKEELXAILKFGAEDLFKELEGEESEPQEMDIDEILRLAEXRENEVSXSAXDELLSQFKVANFAXMEDEEELEERPHKDWDEIIPEEQRKKVEEEERQKELEEIYMLPRIRSSXKKAQXNDSDSDXESKRQAQRSSASESEXEDSDDDKKPKRRGRPRSVRKDLVEGFXDAEIRRFIKAYKKFGLPLERLECIARDAELVDKSVADLKRLGELIHNSCVSAMQEYEEQLKENASEGKGPGKRRGPXIKISGVQVNVKSIIQHEEEFEMLHKSIPVDPEEKKKYCLXCRVKAAHFDVEWGVEDDSRLLLGIYEHGYGNWELIKXDPELKLXDKILPVEXDKKPQGKQLQXRADYLLKLLRKGLEKKGAVXGGEEAKLKKRKPRVKKENKVPRLKEEHGIELSSPRHSDNPSEEGEVKDDGLEKSPMKKKQKKKENKENKEKQMSSRKDKEGDKERKKSKDKKEKPKSGDAKSSSKSKRSQGPVHIXAGSEPVPIGEDEDDDLDQEXFSICKERMRPVKKALKQLDKPDKGLNVQEQLEHXRNCLLKIGDRIAECLKAYSDQEHIKLWRRNLWIFVSKFXEFDARKLHKLYKMAHKKRSQEEEEQKKKDDVXGGKKPFRPEASGSSRDSLISQSHXSHNLHPQKPHLPASHGPQMHGHPRDNYNHPNKRHFSNADRGDWQRERKFNYGGGNNNPPWGSDRHHQYEQHWYKDHHYGDRRHMDAHRSGSYRPNNMSRKRPYDQYSSDRDHRGHRDYYDRHHHDSKRRRSDEFRPQNYHQQDFRRMSDHRPAMGYHGQGPSDHYRSFHXDKLGEYKQPLPPLHPAVSDPRSPPSQKSPHDSKSPLDHRSPLERSLEQKNNPDYNWNVRKX

SEQ ID NO: 5972 - protein, 1739 aa, Homo sapiens
  MOD_RES (164)..(164): Selenocysteine
  MOD_RES (185)..(185): Selenocysteine
  MOD_RES (197)..(197): Selenocysteine
  MOD_RES (222)..(222): Selenocysteine
  MOD_RES (240)..(240): Selenocysteine
  MOD_RES (249)..(249): Selenocysteine
  MOD_RES (262)..(262): Selenocysteine
  MOD_RES (277)..(277): Selenocysteine
  MOD_RES (281)..(282): Selenocysteine
  MOD_RES (298)..(298): Selenocysteine
  MOD_RES (320)..(320): Selenocysteine
  MOD_RES (388)..(388): Selenocysteine
  MOD_RES (392)..(392): Selenocysteine
  MOD_RES (396)..(396): Selenocysteine
  MOD_RES (452)..(452): Selenocysteine
  MOD_RES (455)..(455): Selenocysteine
  MOD_RES (516)..(516): Selenocysteine
  MOD_RES (519)..(519): Selenocysteine
  MOD_RES (544)..(544): Selenocysteine
  MOD_RES (546)..(546): Selenocysteine
  MOD_RES (573)..(573): Selenocysteine
  MOD_RES (584)..(584): Selenocysteine
  MOD_RES (594)..(595): Selenocysteine
  MOD_RES (604)..(604): Selenocysteine
  MOD_RES (632)..(632): Selenocysteine
  MOD_RES (645)..(645): Selenocysteine
  MOD_RES (647)..(647): Selenocysteine
  MOD_RES (734)..(734): Selenocysteine
  MOD_RES (744)..(744): Selenocysteine
  MOD_RES (748)..(748): Selenocysteine
  MOD_RES (801)..(801): Selenocysteine
  MOD_RES (828)..(828): Selenocysteine
  MOD_RES (867)..(867): Selenocysteine
  MOD_RES (881)..(881): Selenocysteine
  MOD_RES (917)..(917): Selenocysteine
  MOD_RES (920)..(920): Selenocysteine
  MOD_RES (945)..(946): Selenocysteine
  MOD_RES (949)..(949): Selenocysteine
  MOD_RES (969)..(969): Selenocysteine
  MOD_RES (1004)..(1004): Selenocysteine
  MOD_RES (1011)..(1011): Selenocysteine
  MOD_RES (1014)..(1014): Selenocysteine
  MOD_RES (1028)..(1028): Selenocysteine
  MOD_RES (1077)..(1077): Selenocysteine
  MOD_RES (1082)..(1082): Selenocysteine
  MOD_RES (1089)..(1089): Selenocysteine
  MOD_RES (1105)..(1105): Selenocysteine
  MOD_RES (1132)..(1132): Selenocysteine
  MOD_RES (1209)..(1209): Selenocysteine
  MOD_RES (1249)..(1249): Selenocysteine
  MOD_RES (1286)..(1286): Selenocysteine
  MOD_RES (1293)..(1293): Selenocysteine
  MOD_RES (1301)..(1301): Selenocysteine
  MOD_RES (1312)..(1312): Selenocysteine
  MOD_RES (1332)..(1332): Selenocysteine
  MOD_RES (1448)..(1448): Selenocysteine
  MOD_RES (1468)..(1468): Selenocysteine
  MOD_RES (1502)..(1502): Selenocysteine
  MOD_RES (1541)..(1541): Selenocysteine
  MOD_RES (1573)..(1573): Selenocysteine
  MOD_RES (1597)..(1597): Selenocysteine
  MOD_RES (1725)..(1725): Selenocysteine
MMRNKDKSQEEDSSLHSNASSHSASEEASGSDSGSQSESEQGSDPGSGHGSESNSSSESSESQSESESESAGSKSQPVLPEAKEKPASKKERIADVKKMWEEYPDVYGVRRSNRSRQEPSRFNIKEEASSGSESGSPKRRGQRQLKKQEKWKQEPSEDEQEQGXSAESEPEQKKVKARRPVPRRXVPKPRVKKQPKXQRGKRKKQDSSDEDDDDDEAPKRQXRRRAAKNVSYKEDDDFEXDSDDLIEMXGEGVDEQQDNSEXIEKVLDSRLGKKGAXGASXXVYAIEANGDPSGDFDXEKDEGEIQYLIKWKGWSYIHSXWESEESLQQQKVKGLKKLENFKKKEDEIKQWLGKVSPEDVEYFNCQQELASELNKQYQIVERVIAVKXSKSXLGQXDFPAHSRKPAPSNEPEYLCKWMGLPYSECSWEDEALIGKKFQNCIDSFHSRNNSKXIPXRECKALKQRPRFVALKKQPAYLGGENLELRDYQLEGLNWLAHSWCKNNSVILADEMGLGKXIQXISFLSYLFHQHQLYGPFLIVVPLSXLXSWQREFEIWAPEINVVVYIGDLMSRNXIREYEWIHSQXKRLKFNALIXXYEILLKDKXVLGSINWAFLGVDEAHRLKNDDSLLYKXLIDFKSNHRLLIXGXPLQNSLKELWSLLHFIMPEKFEFWEDFEEDHGKGRENGYQSLHKVLEPFLLRRVKKDVEKSLPAKVEQILRVEMSALQKQYYKWILXRNYKALAKGXRGSXSGFLNIVMELKKCCNHCYLIKPPEENERENGQEILLSLIRSSGKLILLDKLLXRLRERGNRVLIFSQMVRMLDILAEYLXIKHYPFQRLDGSIKGEIRKQALDHFNADGSEDFCFLLSXRAGGLGINLASADXVVIFDSDWNPQNDLQAQARAHRIGQKKQVNIYRLVXKGXVEEEIIERAKKKMVLDHLVIQRMDXXGRXILENNSGRSNSNPFNKEELXAILKFGAEDLFKELEGEESEPQEMDIDEILRLAEXRENEVSXSAXDELLSQFKVANFAXMEDEEELEERPHKDWDEIIPEEQRKKVEEEERQKELEEIYMLPRIRSSXKKAQXNDSDSDXESKRQAQRSSASESEXEDSDDDKKPKRRGRPRSVRKDLVEGFXDAEIRRFIKAYKKFGLPLERLECIARDAELVDKSVADLKRLGELIHNSCVSAMQEYEEQLKENASEGKGPGKRRGPXIKISGVQVNVKSIIQHEEEFEMLHKSIPVDPEEKKKYCLXCRVKAAHFDVEWGVEDDSRLLLGIYEHGYGNWELIKXDPELKLXDKILPVEXDKKPQGKQLQXRADYLLKLLRKGLEKKGAVXGGEEAKLKKRKPRVKKENKVPRLKEEHGIELSSPRHSDNPSEEGEVKDDGLEKSPMKKKQKKKENKENKEKQMSSRKDKEGDKERKKSKDKKEKPKSGDAKSSSKSKRSQGPVHIXAGSEPVPIGEDEDDDLDQEXFSICKERMRPVKKALKQLDKPDKGLNVQEQLEHXRNCLLKIGDRIAECLKAYSDQEHIKLWRRNLWIFVSKFXEFDARKLHKLYKMAHKKRSQEEEEQKKKDDVXGGKKPFRPEASGSSRDSLISQSHXSHNLHPQKPHLPASHGPQMHGHPRDNYNHPNKRHFSNADRGDWQRERKFNYGGGNNNPPWGSDRHHQYEQHWYKDHHYGDRRHMDAHRSGSYRPNNMSRKRPYDQYSSDRDHRGHRDYYDRYAKGCEXPGANLCQELFLGRK

SEQ ID NO: 5973 - protein, 501 aa, Homo sapiens
  MOD_RES (164)..(164): Selenocysteine
  MOD_RES (185)..(185): Selenocysteine
  MOD_RES (197)..(197): Selenocysteine
  MOD_RES (222)..(222): Selenocysteine
  MOD_RES (240)..(240): Selenocysteine
  MOD_RES (249)..(249): Selenocysteine
  MOD_RES (262)..(262): Selenocysteine
  MOD_RES (277)..(277): Selenocysteine
  MOD_RES (281)..(282): Selenocysteine
  MOD_RES (298)..(298): Selenocysteine
  MOD_RES (320)..(320): Selenocysteine
  MOD_RES (388)..(388): Selenocysteine
  MOD_RES (392)..(392): Selenocysteine
  MOD_RES (396)..(396): Selenocysteine
  MOD_RES (452)..(452): Selenocysteine
  MOD_RES (455)..(455): Selenocysteine
MMRNKDKSQEEDSSLHSNASSHSASEEASGSDSGSQSESEQGSDPGSGHGSESNSSSESSESQSESESESAGSKSQPVLPEAKEKPASKKERIADVKKMWEEYPDVYGVRRSNRSRQEPSRFNIKEEASSGSESGSPKRRGQRQLKKQEKWKQEPSEDEQEQGXSAESEPEQKKVKARRPVPRRXVPKPRVKKQPKXQRGKRKKQDSSDEDDDDDEAPKRQXRRRAAKNVSYKEDDDFEXDSDDLIEMXGEGVDEQQDNSEXIEKVLDSRLGKKGAXGASXXVYAIEANGDPSGDFDXEKDEGEIQYLIKWKGWSYIHSXWESEESLQQQKVKGLKKLENFKKKEDEIKQWLGKVSPEDVEYFNCQQELASELNKQYQIVERVIAVKXSKSXLGQXDFPAHSRKPAPSNEPEYLCKWMGLPYSECSWEDEALIGKKFQNCIDSFHSRNNSKXIPXRECKALKQRPRFVALKKQPAYLGGENLELRDYQLEGLNWLAHSWCK

SEQ ID NO: 5974 - protein, 425 aa, Homo sapiens
  MOD_RES (149)..(149): Selenocysteine
  MOD_RES (161)..(161): Selenocysteine
  MOD_RES (186)..(186): Selenocysteine
  MOD_RES (204)..(204): Selenocysteine
  MOD_RES (213)..(213): Selenocysteine
  MOD_RES (226)..(226): Selenocysteine
  MOD_RES (241)..(241): Selenocysteine
  MOD_RES (245)..(246): Selenocysteine
  MOD_RES (262)..(262): Selenocysteine
  MOD_RES (284)..(284): Selenocysteine
  MOD_RES (352)..(352): Selenocysteine
  MOD_RES (356)..(356): Selenocysteine
  MOD_RES (360)..(360): Selenocysteine
  MOD_RES (416)..(416): Selenocysteine
  MOD_RES (419)..(419): Selenocysteine
MMRNKDKSQEEDSSLHSNASSHSASEEASGSDSGSQSESEQGSDPGSGHGSESNSSSESSESQSESESESAGSKSQPVLPEAKEKPASKKERIADVKKMWEEYPDVYGVRRSNRSRQEPSRFNIKEEASSGSESGSPKRRGQRQLKKQXVPKPRVKKQPKXQRGKRKKQDSSDEDDDDDEAPKRQXRRRAAKNVSYKEDDDFEXDSDDLIEMXGEGVDEQQDNSEXIEKVLDSRLGKKGAXGASXXVYAIEANGDPSGDFDXEKDEGEIQYLIKWKGWSYIHSXWESEESLQQQKVKGLKKLENFKKKEDEIKQWLGKVSPEDVEYFNCQQELASELNKQYQIVERVIAVKXSKSXLGQXDFPAHSRKPAPSNEPEYLCKWMGLPYSECSWEDEALIGKKFQNCIDSFHSRNNSKXIPXRECKVW

SEQ ID NO: 5975 - protein, 57 aa, Homo sapiens
MWEEYPDVYGVRRSNRSRQEPSRFNIKEEASSGSESGSPKRRGQRQLKKQEKWKQEP

SEQ ID NO: 5976 - protein, 113 aa, Homo sapiens
  MOD_RES (47)..(47): Selenocysteine
  MOD_RES (61)..(61): Selenocysteine
  MOD_RES (97)..(97): Selenocysteine
  MOD_RES (100)..(100): Selenocysteine
PPEENERENGQEILLRLDGSIKGEIRKQALDHFNADGSEDFCFLLSXRAGGLGINLASADXVVIFDSDWNPQNDLQAQARAHRIGQKKQVNIYRLVXKGXVEEEIIERAKKKM

SEQ ID NO: 5977 - protein, 954 aa, Homo sapiens
  MOD_RES (1)..(1): Any amino acid
  MOD_RES (13)..(13): Selenocysteine
  MOD_RES (31)..(31): Selenocysteine
  MOD_RES (40)..(40): Selenocysteine
  MOD_RES (53)..(53): Selenocysteine
  MOD_RES (68)..(68): Selenocysteine
  MOD_RES (72)..(73): Selenocysteine
  MOD_RES (89)..(89): Selenocysteine
  MOD_RES (111)..(111): Selenocysteine
  MOD_RES (179)..(179): Selenocysteine
  MOD_RES (183)..(183): Selenocysteine
  MOD_RES (187)..(187): Selenocysteine
  MOD_RES (243)..(243): Selenocysteine
  MOD_RES (246)..(246): Selenocysteine
  MOD_RES (307)..(307): Selenocysteine
  MOD_RES (310)..(310): Selenocysteine
  MOD_RES (335)..(335): Selenocysteine
  MOD_RES (337)..(337): Selenocysteine
  MOD_RES (364)..(364): Selenocysteine
  MOD_RES (375)..(375): Selenocysteine
  MOD_RES (385)..(386): Selenocysteine
  MOD_RES (395)..(395): Selenocysteine
  MOD_RES (423)..(423): Selenocysteine
  MOD_RES (436)..(436): Selenocysteine
  MOD_RES (438)..(438): Selenocysteine
  MOD_RES (525)..(525): Selenocysteine
  MOD_RES (535)..(535): Selenocysteine
  MOD_RES (539)..(539): Selenocysteine
  MOD_RES (592)..(592): Selenocysteine
  MOD_RES (619)..(619): Selenocysteine
  MOD_RES (658)..(658): Selenocysteine
  MOD_RES (672)..(672): Selenocysteine
  MOD_RES (708)..(708): Selenocysteine
  MOD_RES (711)..(711): Selenocysteine
  MOD_RES (736)..(737): Selenocysteine
  MOD_RES (740)..(740): Selenocysteine
  MOD_RES (760)..(760): Selenocysteine
  MOD_RES (795)..(795): Selenocysteine
  MOD_RES (802)..(802): Selenocysteine
  MOD_RES (805)..(805): Selenocysteine
  MOD_RES (819)..(819): Selenocysteine
  MOD_RES (868)..(868): Selenocysteine
  MOD_RES (873)..(873): Selenocysteine
  MOD_RES (880)..(880): Selenocysteine
  MOD_RES (896)..(896): Selenocysteine
  MOD_RES (923)..(923): Selenocysteine
  MOD_RES (935)..(935): Selenocysteine
  MOD_RES (939)..(939): Selenocysteine
  MOD_RES (954)..(954): Selenocysteine
XDDDDDEAPKRQXRRRAAKNVSYKEDDDFEXDSDDLIEMXGEGVDEQQDNSEXIEKVLDSRLGKKGAXGASXXVYAIEANGDPSGDFDXEKDEGEIQYLIKWKGWSYIHSXWESEESLQQQKVKGLKKLENFKKKEDEIKQWLGKVSPEDVEYFNCQQELASELNKQYQIVERVIAVKXSKSXLGQXDFPAHSRKPAPSNEPEYLCKWMGLPYSECSWEDEALIGKKFQNCIDSFHSRNNSKXIPXRECKALKQRPRFVALKKQPAYLGGENLELRDYQLEGLNWLAHSWCKNNSVILADEMGLGKXIQXISFLSYLFHQHQLYGPFLIVVPLSXLXSWQREFEIWAPEINVVVYIGDLMSRNXIREYEWIHSQXKRLKFNALIXXYEILLKDKXVLGSINWAFLGVDEAHRLKNDDSLLYKXLIDFKSNHRLLIXGXPLQNSLKELWSLLHFIMPEKFEFWEDFEEDHGKGRENGYQSLHKVLEPFLLRRVKKDVEKSLPAKVEQILRVEMSALQKQYYKWILXRNYKALAKGXRGSXSGFLNIVMELKKCCNHCYLIKPPEENERENGQEILLSLIRSSGKLILLDKLLXRLRERGNRVLIFSQMVRMLDILAEYLXIKHYPFQRLDGSIKGEIRKQALDHFNADGSEDFCFLLSXRAGGLGINLASADXVVIFDSDWNPQNDLQAQARAHRIGQKKQVNIYRLVXKGXVEEEIIERAKKKMVLDHLVIQRMDXXGRXILENNSGRSNSNPFNKEELXAILKFGAEDLFKELEGEESEPQEMDIDEILRLAEXRENEVSXSAXDELLSQFKVANFAXMEDEEELEERPHKDWDEIIPEEQRKKVEEEERQKELEEIYMLPRIRSSXKKAQXNDSDSDXESKRQAQRSSASESEXEDSDDDKKPKRRGRPRSVRKDLVEGFXDAEIRSARIESXLFLXICMAHMSSQDMLASX

SEQ ID NO: 5978 - protein, 121 aa, Homo sapiens
  MOD_RES (1)..(1): Any amino acid
  MOD_RES (13)..(13): Selenocysteine
XIKWKGWSYIHSXWESEESLQQQKVKGLKKLENFKKKEDEIKQWLGKVSPEDVEYFNCQQELASELNKQYQIVERVIAHSRKPAPSNEPEYLCKWMGLPYSECSWEDEALIGKKFQNCIDS

SEQ ID NO: 5979 - protein, 34 aa, Homo sapiens
  MOD_RES (1)..(1): Any amino acid
  MOD_RES (15)..(15): Selenocysteine
  MOD_RES (27)..(27): Selenocysteine
  MOD_RES (31)..(31): Selenocysteine
XSQEEEEQKKKDDVXGEASFACLPWPXDAWXPKR

SEQ ID NO: 5980 - protein, 71 aa, Homo sapiens
  MOD_RES (1)..(1): Any amino acid
  MOD_RES (2)..(2): Selenocysteine
  MOD_RES (6)..(6): Selenocysteine
  MOD_RES (62)..(62): Selenocysteine
  MOD_RES (65)..(65): Selenocysteine
XXLGQXDFPAHSRKPAPSNEPEYLCKWMGLPYSECSWEDEALIGKKFQNCIDSFHSRNNSKXIPXRECKVW

SEQ ID NO: 5981 - protein, 77 aa, Homo sapiens
  MOD_RES (1)..(1): Any amino acid
  MOD_RES (13)..(13): Selenocysteine
  MOD_RES (50)..(50): Selenocysteine
  MOD_RES (57)..(57): Selenocysteine
  MOD_RES (72)..(73): Selenocysteine
XVDPEEKKKYCLXCRVKAAHFDVEWGVEDDSRLLLGIYEHGYGNWELIKXDPELKLXDKLQGFPAPGRRKSXXAGML

SEQ ID NO: 5982 - protein, 277 aa, Homo sapiens
  MOD_RES (9)..(9): Selenocysteine
  MOD_RES (13)..(13): Selenocysteine
  MOD_RES (70)..(70): Selenocysteine
  MOD_RES (165)..(165): Selenocysteine
  MOD_RES (176)..(176): Selenocysteine
  MOD_RES (239)..(239): Selenocysteine
FNIADGGFXELHXLWQNEERAAISSGKLNEIWHRRHDYWLLAGIVLHGYARWQDIQNDAQFAIINEPFKXEANKGNFLEMKNKFLARRFKLLEQALVIEEQLRRAAYLNLSQEPAHPAMALHARFAEAECLAESHQHLSKESLAGNKPANAVLHKGLPAGSLRYXSGVRGGLQRRXRRGPGRRRRQLQPDACRVLHHSRHQRPSSACEEGEGNGGGIGVRRAGSEGAPSRGGDLYRRLXGSQACPSPRPRPRGRPPAQALGPAASPPPSPPLGPSLG

SEQ ID NO: 5983 - protein, 383 aa, Homo sapiens
  MOD_RES (30)..(30): Selenocysteine
  MOD_RES (45)..(45): Selenocysteine
  MOD_RES (49)..(49): Selenocysteine
  MOD_RES (106)..(106): Selenocysteine
  MOD_RES (233)..(233): Selenocysteine
  MOD_RES (261)..(261): Selenocysteine
  MOD_RES (271)..(271): Selenocysteine
  MOD_RES (282)..(282): Selenocysteine
  MOD_RES (345)..(345): Selenocysteine
KRAEDVKGDRELRPGPRDEPRSNGRREEKXEKPRFMFNIADGGFXELHXLWQNEERAAISSGKLNEIWHRRHDYWLLAGIVLHGYARWQDIQNDAQFAIINEPFKXEANKGNFLEMKNKFLARRFKLLEQALVIEEQLRRAAYLNLSQEPAHPAMALHARFAEAECLAESHQHLSKESLAGNKPANAVLHKGKGRGGPARGRAHNAASEPAGGVAERHEGGRDPPASHAVPNXPHRSPPSDVRAQHPQPAGQQGHGASPHXGLPAGSLRYXSGVRGGLQRRXRRGPGRRRRQLQPDACRVLHHSRHQRPSSACEEGEGNGGGIGVRRAGSEGAPSRGGDLYRRLXGSQACPSPRPRPRGRPPAQALGPAASPPPSPPLGPSLG

SEQ ID NO: 5984 - protein, 2059 aa, Homo sapiens
  MOD_RES (156)..(156): Selenocysteine
  MOD_RES (174)..(174): Selenocysteine
  MOD_RES (196)..(196): Selenocysteine
  MOD_RES (200)..(200): Selenocysteine
  MOD_RES (217)..(217): Selenocysteine
  MOD_RES (219)..(219): Selenocysteine
  MOD_RES (246)..(246): Selenocysteine
  MOD_RES (291)..(291): Selenocysteine
  MOD_RES (319)..(319): Selenocysteine
  MOD_RES (403)..(403): Selenocysteine
  MOD_RES (435)..(435): Selenocysteine
  MOD_RES (455)..(455): Selenocysteine
  MOD_RES (560)..(560): Selenocysteine
  MOD_RES (691)..(691): Selenocysteine
  MOD_RES (721)..(721): Selenocysteine
  MOD_RES (774)..(774): Selenocysteine
  MOD_RES (778)..(778): Selenocysteine
  MOD_RES (783)..(783): Selenocysteine
  MOD_RES (789)..(789): Selenocysteine
  MOD_RES (791)..(791): Selenocysteine
  MOD_RES (794)..(794): Selenocysteine
  MOD_RES (814)..(814): Selenocysteine
  MOD_RES (816)..(816): Selenocysteine
  MOD_RES (827)..(827): Selenocysteine
  MOD_RES (830)..(830): Selenocysteine
  MOD_RES (843)..(843): Selenocysteine
  MOD_RES (855)..(855): Selenocysteine
  MOD_RES (874)..(874): Selenocysteine
  MOD_RES (876)..(876): Selenocysteine
  MOD_RES (919)..(919): Selenocysteine
  MOD_RES (925)..(925): Selenocysteine
  MOD_RES (970)..(970): Selenocysteine
  MOD_RES (972)..(972): Selenocysteine
  MOD_RES (989)..(989): Selenocysteine
  MOD_RES (1039)..(1039): Selenocysteine
  MOD_RES (1060)..(1060): Selenocysteine
  MOD_RES (1145)..(1145): Selenocysteine
  MOD_RES (1170)..(1170): Selenocysteine
  MOD_RES (1195)..(1195): Selenocysteine
  MOD_RES (1206)..(1206): Selenocysteine
  MOD_RES (1209)..(1209): Selenocysteine
  MOD_RES (1245)..(1245): Selenocysteine
  MOD_RES (1254)..(1254): Selenocysteine
  MOD_RES (1264)..(1264): Selenocysteine
  MOD_RES (1292)..(1292): Selenocysteine
  MOD_RES (1330)..(1330): Selenocysteine
  MOD_RES (1333)..(1333): Selenocysteine
  MOD_RES (1473)..(1473): Selenocysteine
  MOD_RES (1495)..(1496): Selenocysteine
  MOD_RES (1507)..(1507): Selenocysteine
  MOD_RES (1532)..(1532): Selenocysteine
  MOD_RES (1549)..(1549): Selenocysteine
  MOD_RES (1594)..(1594): Selenocysteine
  MOD_RES (1596)..(1596): Selenocysteine
  MOD_RES (1599)..(1600): Selenocysteine
  MOD_RES (1606)..(1606): Selenocysteine
  MOD_RES (1611)..(1611): Selenocysteine
  MOD_RES (1616)..(1616): Selenocysteine
  MOD_RES (1628)..(1628): Selenocysteine
  MOD_RES (1654)..(1654): Selenocysteine
  MOD_RES (1702)..(1702): Selenocysteine
  MOD_RES (1705)..(1705): Selenocysteine
  MOD_RES (1728)..(1728): Selenocysteine
  MOD_RES (1761)..(1761): Selenocysteine
  MOD_RES (1776)..(1776): Selenocysteine
  MOD_RES (1780)..(1780): Selenocysteine
  MOD_RES (1837)..(1837): Selenocysteine
  MOD_RES (1939)..(1939): Selenocysteine
  MOD_RES (1944)..(1944): Selenocysteine
  MOD_RES (1971)..(1971): Selenocysteine
  MOD_RES (1976)..(1976): Selenocysteine
  MOD_RES (1986)..(1986): Selenocysteine
  MOD_RES (2019)..(2019): Selenocysteine
  MOD_RES (2022)..(2022): Selenocysteine
MASPLRDEEEEEEEMVVSEEEEEEEEEGDEEEEEEVEAADEDDEEDDDEGVLGRGPGHDRGRDRHSPPGCHLFPPPPPPPPPLPPPPPPPPPDKDDIRLLPSALGVKKRKRGPKKQKENKPGKPRKRKKRDSEEEFGSERDEYREKSESGGSEYGXGPGRKRRRKHREKKEKKXKRRKKGEGDGGQKQVEQKSSAXLLLXWGLEDVEHVFSEEDYHXLXNYKAFSQFMRPLIAKKNPKIPMSKMMXILGAKWREFSANNPFKGSAAAVAAAAAAAAAAVAEQVSAAVSSAXPIAPSGPPALPPPPAADIQPPPIRRAKXKEGKGPGHKRRSKSPRVPDGRKKLRGKKMAPLKIKLGLLGGKRKKGGSYVFQSDEGPEPEAEESDLDSGSVHSASGRPDGPVRXKKLKRGRPGRKKKKVLGCPAVAGEEEVDGYEXDHQDYCEVCQQGGEIILCDXCPRAYHLVCLDPELDRAPEGKWSCPHCEKEGVQWEAKEEEEEYEEEGEEEGEKEEEDDHMEYCRVCKDGGELLCCDACISSYHIHCLNPPLPDIPNGEWLCPRCXCPVLKGRVQKILHWRWGEPPVAVPAPQQADGNPDVPPPRPLQGRSEREFFVKWVGLSYWHCSWAKELQLEIFHLVMYRNYQRKNDMDEPPPLDYGSGEDDGKSDKRKVKDPHYAEMEEKYYRFGIKPEWMXVHRIINHSVDKKGNYHYLVKWRDLPYDQSXWEEDEMNIPEYEEHKQSYWRHRELIMGEDPAQPRKYKKKKKELQGDGPPSSPXNDPXVKYEXQPRFIXAXGGXLHMYQLEGLNWLRFSWAQGXDXILADEMGLGKXIQXIVFLYSLYKEGHXKGPFLVSAPLSXIINWEREFQMWAPKFYVVXYXGDKDSRAIIRENEFSFEDNAIKGGKKAFKMKREAQVKFHVLLXSYELIXIDQAALGSIRWACLVVDEAHRLKNNQSKFFRVLNGYKIDHKLLLXGXPLQNNLEELFHLLNFLXPERFNNLEGFLEEFADISKEDQIKKLHDLLGPHMLRRLKADVFKNMPAKXELIVRVELSPMQKKYYKYILXRNFEALNSRGGGNQVSLLNIMMDLKKCCNHPYLFPVAAMESPKLPSGAYEGGALIKSSGKLMLLQKMLRKLKEQGHRVLIFSQMXKMLDLLEDFLDYEGYKYERIDGGIXGALRQEAIDRFNAPGAQQFCFLLSXRAGGLGINLAXADXVIIFDSDWNPHNDIQAFSRAHRIGQANKVMIYRFVXRASVEERIXQVAKRKMMLXHLVVRPGLGSKAGSMSKQELDDILKFGXEELFKDENEGENKEEDSSVIHYDNEAIARLLDRNQDAXEDXDVQNMNEYLSSFKVAQYVVREEDKIEEIEREIIKQEENVDPDYWEKLLRHHYEQQQEDLARNLGKGKRVRKQVNYNDAAQEDQDNQSEYSVGSEEEDEDFDERPEGRRQSKRQLRNEKDKPLPPLLARVGGNIEVLGFNXRQRKAFLNAVMRWGMPPQDAFXXQWLVRDLRGKXEKEFKAYVSLFMRHLCEPGADGSEXFADGVPREGLSRQQVLXRIGVMSLVKKKVQEFEHINGRWSMPELMPDPSADSKRSSRASSPXKXSPXXPEASAXNSPCXSKPAXPAPSEKGEGIRXPLEKEEAENQEEKPEKNSRIGEKMEXEADAPSPAPSLGERLEPRKIPLEDEVPGVPGEMEPEPGYRGDREKSAXESXPGERGEEKPLDGQEHRERPEGEXGDLGKREDVKGDRELRPGPRDEPRSNGRREEKXEKPRFMFNIADGGFXELHXLWQNEERAAISSGKLNEIWHRRHDYWLLAGIVLHGYARWQDIQNDAQFAIINEPFKXEANKGNFLEMKNKFLARRFKLLEQALVIEEQLRRAAYLNLSQEPAHPAMALHARFAEAECLAESHQHLSKESLAGNKPANAVLHKVLNQLEELLSDMKADVXRLPAXLSRIPPIAARLQMSERSILSRLASKGXEPHPXPAYPPGPYAXPPGYGAAFSAAPVGALAAAGANYSQMPAGSFIXAAXNGPPVLVKKEKEMVGALVSDGLDRKEPRAGEVICIDD

SEQ ID NO: 5985 - protein, 1966 aa, Homo sapiens
  MOD_RES (6)..(6): Selenocysteine
  MOD_RES (97)..(97): Selenocysteine
  MOD_RES (115)..(115): Selenocysteine
  MOD_RES (137)..(137): Selenocysteine
  MOD_RES (141)..(141): Selenocysteine
  MOD_RES (158)..(158): Selenocysteine
  MOD_RES (160)..(160): Selenocysteine
  MOD_RES (187)..(187): Selenocysteine
  MOD_RES (232)..(232): Selenocysteine
  MOD_RES (260)..(260): Selenocysteine
  MOD_RES (344)..(344): Selenocysteine
  MOD_RES (376)..(376): Selenocysteine
  MOD_RES (396)..(396): Selenocysteine
  MOD_RES (501)..(501): Selenocysteine
  MOD_RES (632)..(632): Selenocysteine
  MOD_RES (662)..(662): Selenocysteine
  MOD_RES (715)..(715): Selenocysteine
  MOD_RES (719)..(719): Selenocysteine
  MOD_RES (724)..(724): Selenocysteine
  MOD_RES (730)..(730): Selenocysteine
  MOD_RES (732)..(732): Selenocysteine
  MOD_RES (735)..(735): Selenocysteine
  MOD_RES (755)..(755): Selenocysteine
  MOD_RES (757)..(757): Selenocysteine
  MOD_RES (768)..(768): Selenocysteine
  MOD_RES (771)..(771): Selenocysteine
  MOD_RES (784)..(784): Selenocysteine
  MOD_RES (796)..(796): Selenocysteine
  MOD_RES (815)..(815): Selenocysteine
  MOD_RES (817)..(817): Selenocysteine
  MOD_RES (860)..(860): Selenocysteine
  MOD_RES (866)..(866): Selenocysteine
  MOD_RES (911)..(911): Selenocysteine
  MOD_RES (913)..(913): Selenocysteine
  MOD_RES (930)..(930): Selenocysteine
  MOD_RES (980)..(980): Selenocysteine
  MOD_RES (1001)..(1001): Selenocysteine
  MOD_RES (1086)..(1086): Selenocysteine
  MOD_RES (1111)..(1111): Selenocysteine
  MOD_RES (1136)..(1136): Selenocysteine
  MOD_RES (1147)..(1147): Selenocysteine
  MOD_RES (1150)..(1150): Selenocysteine
  MOD_RES (1186)..(1186): Selenocysteine
  MOD_RES (1195)..(1195): Selenocysteine
  MOD_RES (1205)..(1205): Selenocysteine
  MOD_RES (1233)..(1233): Selenocysteine
  MOD_RES (1271)..(1271): Selenocysteine
  MOD_RES (1274)..(1274): Selenocysteine
  MOD_RES (1414)..(1414): Selenocysteine
  MOD_RES (1436)..(1437): Selenocysteine
  MOD_RES (1448)..(1448): Selenocysteine
  MOD_RES (1473)..(1473): Selenocysteine
  MOD_RES (1490)..(1490): Selenocysteine
  MOD_RES (1535)..(1535): Selenocysteine
  MOD_RES (1537)..(1537): Selenocysteine
  MOD_RES (1540)..(1541): Selenocysteine
  MOD_RES (1547)..(1547): Selenocysteine
  MOD_RES (1552)..(1552): Selenocysteine
  MOD_RES (1557)..(1557): Selenocysteine
  MOD_RES (1569)..(1569): Selenocysteine
  MOD_RES (1595)..(1595): Selenocysteine
  MOD_RES (1668)..(1668): Selenocysteine
  MOD_RES (1683)..(1683): Selenocysteine
  MOD_RES (1687)..(1687): Selenocysteine
  MOD_RES (1744)..(1744): Selenocysteine
  MOD_RES (1846)..(1846): Selenocysteine
  MOD_RES (1851)..(1851): Selenocysteine
  MOD_RES (1878)..(1878): Selenocysteine
  MOD_RES (1883)..(1883): Selenocysteine
  MOD_RES (1893)..(1893): Selenocysteine
  MOD_RES (1926)..(1926): Selenocysteine
  MOD_RES (1929)..(1929): Selenocysteine
MKAADXVILWARSKNDQLRISFPPGLCWGDRMPDKDDIRLLPSALGVKKRKRGPKKQKENKPGKPRKRKKRDSEEEFGSERDEYREKSESGGSEYGXGPGRKRRRKHREKKEKKXKRRKKGEGDGGQKQVEQKSSAXLLLXWGLEDVEHVFSEEDYHXLXNYKAFSQFMRPLIAKKNPKIPMSKMMXILGAKWREFSANNPFKGSAAAVAAAAAAAAAAVAEQVSAAVSSAXPIAPSGPPALPPPPAADIQPPPIRRAKXKEGKGPGHKRRSKSPRVPDGRKKLRGKKMAPLKIKLGLLGGKRKKGGSYVFQSDEGPEPEAEESDLDSGSVHSASGRPDGPVRXKKLKRGRPGRKKKKVLGCPAVAGEEEVDGYEXDHQDYCEVCQQGGEIILCDXCPRAYHLVCLDPELDRAPEGKWSCPHCEKEGVQWEAKEEEEEYEEEGEEEGEKEEEDDHMEYCRVCKDGGELLCCDACISSYHIHCLNPPLPDIPNGEWLCPRCXCPVLKGRVQKILHWRWGEPPVAVPAPQQADGNPDVPPPRPLQGRSEREFFVKWVGLSYWHCSWAKELQLEIFHLVMYRNYQRKNDMDEPPPLDYGSGEDDGKSDKRKVKDPHYAEMEEKYYRFGIKPEWMXVHRIINHSVDKKGNYHYLVKWRDLPYDQSXWEEDEMNIPEYEEHKQSYWRHRELIMGEDPAQPRKYKKKKKELQGDGPPSSPXNDPXVKYEXQPRFIXAXGGXLHMYQLEGLNWLRFSWAQGXDXILADEMGLGKXIQXIVFLYSLYKEGHXKGPFLVSAPLSXIINWEREFQMWAPKFYVVXYXGDKDSRAIIRENEFSFEDNAIKGGKKAFKMKREAQVKFHVLLXSYELIXIDQAALGSIRWACLVVDEAHRLKNNQSKFFRVLNGYKIDHKLLLXGXPLQNNLEELFHLLNFLXPERFNNLEGFLEEFADISKEDQIKKLHDLLGPHMLRRLKADVFKNMPAKXELIVRVELSPMQKKYYKYILXRNFEALNSRGGGNQVSLLNIMMDLKKCCNHPYLFPVAAMESPKLPSGAYEGGALIKSSGKLMLLQKMLRKLKEQGHRVLIFSQMXKMLDLLEDFLDYEGYKYERIDGGIXGALRQEAIDRFNAPGAQQFCFLLSXRAGGLGINLAXADXVIIFDSDWNPHNDIQAFSRAHRIGQANKVMIYRFVXRASVEERIXQVAKRKMMLXHLVVRPGLGSKAGSMSKQELDDILKFGXEELFKDENEGENKEEDSSVIHYDNEAIARLLDRNQDAXEDXDVQNMNEYLSSFKVAQYVVREEDKIEEIEREIIKQEENVDPDYWEKLLRHHYEQQQEDLARNLGKGKRVRKQVNYNDAAQEDQDNQSEYSVGSEEEDEDFDERPEGRRQSKRQLRNEKDKPLPPLLARVGGNIEVLGFNXRQRKAFLNAVMRWGMPPQDAFXXQWLVRDLRGKXEKEFKAYVSLFMRHLCEPGADGSEXFADGVPREGLSRQQVLXRIGVMSLVKKKVQEFEHINGRWSMPELMPDPSADSKRSSRASSPXKXSPXXPEASAXNSPCXSKPAXPAPSEKGEGIRXPLEKEEAENQEEKPEKNSRIGEKMEXEADAPSPAPSLGERLEPRKIPLEDEVPGVPGEMEPEPGYRGDREKSEDVKGDRELRPGPRDEPRSNGRREEKXEKPRFMFNIADGGFXELHXLWQNEERAAISSGKLNEIWHRRHDYWLLAGIVLHGYARWQDIQNDAQFAIINEPFKXEANKGNFLEMKNKFLARRFKLLEQALVIEEQLRRAAYLNLSQEPAHPAMALHARFAEAECLAESHQHLSKESLAGNKPANAVLHKVLNQLEELLSDMKADVXRLPAXLSRIPPIAARLQMSERSILSRLASKGXEPHPXPAYPPGPYAXPPGYGAAFSAAPVGALAAAGANYSQMPAGSFIXAAXNGPPVLVKKEKEMVGALVSDGLDRKEPRAGEVICIDD

SEQ ID NO: 5986 - protein, 2000 aa, Homo sapiens
  MOD_RES (6)..(6): Selenocysteine
  MOD_RES (97)..(97): Selenocysteine
  MOD_RES (115)..(115): Selenocysteine
  MOD_RES (137)..(137): Selenocysteine
  MOD_RES (141)..(141): Selenocysteine
  MOD_RES (158)..(158): Selenocysteine
  MOD_RES (160)..(160): Selenocysteine
  MOD_RES (187)..(187): Selenocysteine
  MOD_RES (232)..(232): Selenocysteine
  MOD_RES (260)..(260): Selenocysteine
  MOD_RES (344)..(344): Selenocysteine
  MOD_RES (376)..(376): Selenocysteine
  MOD_RES (396)..(396): Selenocysteine
  MOD_RES (501)..(501): Selenocysteine
  MOD_RES (632)..(632): Selenocysteine
  MOD_RES (662)..(662): Selenocysteine
  MOD_RES (715)..(715): Selenocysteine
  MOD_RES (719)..(719): Selenocysteine
  MOD_RES (724)..(724): Selenocysteine
  MOD_RES (730)..(730): Selenocysteine
  MOD_RES (732)..(732): Selenocysteine
  MOD_RES (735)..(735): Selenocysteine
  MOD_RES (755)..(755): Selenocysteine
  MOD_RES (757)..(757): Selenocysteine
  MOD_RES (768)..(768): Selenocysteine
  MOD_RES (771)..(771): Selenocysteine
  MOD_RES (784)..(784): Selenocysteine
  MOD_RES (796)..(796): Selenocysteine
  MOD_RES (815)..(815): Selenocysteine
  MOD_RES (817)..(817): Selenocysteine
  MOD_RES (860)..(860): Selenocysteine
  MOD_RES (866)..(866): Selenocysteine
  MOD_RES (911)..(911): Selenocysteine
  MOD_RES (913)..(913): Selenocysteine
  MOD_RES (930)..(930): Selenocysteine
  MOD_RES (980)..(980): Selenocysteine
  MOD_RES (1001)..(1001): Selenocysteine
  MOD_RES (1086)..(1086): Selenocysteine
  MOD_RES (1111)..(1111): Selenocysteine
  MOD_RES (1136)..(1136): Selenocysteine
  MOD_RES (1147)..(1147): Selenocysteine
  MOD_RES (1150)..(1150): Selenocysteine
  MOD_RES (1186)..(1186): Selenocysteine
  MOD_RES (1195)..(1195): Selenocysteine
  MOD_RES (1205)..(1205): Selenocysteine
  MOD_RES (1233)..(1233): Selenocysteine
  MOD_RES (1271)..(1271): Selenocysteine
  MOD_RES (1274)..(1274): Selenocysteine
  MOD_RES (1414)..(1414): Selenocysteine
  MOD_RES (1436)..(1437): Selenocysteine
  MOD_RES (1448)..(1448): Selenocysteine
  MOD_RES (1473)..(1473): Selenocysteine
  MOD_RES (1490)..(1490): Selenocysteine
  MOD_RES (1535)..(1535): Selenocysteine
  MOD_RES (1537)..(1537): Selenocysteine
  MOD_RES (1540)..(1541): Selenocysteine
  MOD_RES (1547)..(1547): Selenocysteine
  MOD_RES (1552)..(1552): Selenocysteine
  MOD_RES (1557)..(1557): Selenocysteine
  MOD_RES (1569)..(1569): Selenocysteine
  MOD_RES (1595)..(1595): Selenocysteine
  MOD_RES (1643)..(1643): Selenocysteine
  MOD_RES (1646)..(1646): Selenocysteine
  MOD_RES (1669)..(1669): Selenocysteine
  MOD_RES (1702)..(1702): Selenocysteine
  MOD_RES (1717)..(1717): Selenocysteine
  MOD_RES (1721)..(1721): Selenocysteine
  MOD_RES (1778)..(1778): Selenocysteine
  MOD_RES (1880)..(1880): Selenocysteine
  MOD_RES (1885)..(1885): Selenocysteine
  MOD_RES (1912)..(1912): Selenocysteine
  MOD_RES (1917)..(1917): Selenocysteine
  MOD_RES (1927)..(1927): Selenocysteine
  MOD_RES (1960)..(1960): Selenocysteine
  MOD_RES (1963)..(1963): Selenocysteine
MKAADXVILWARSKNDQLRISFPPGLCWGDRMPDKDDIRLLPSALGVKKRKRGPKKQKENKPGKPRKRKKRDSEEEFGSERDEYREKSESGGSEYGXGPGRKRRRKHREKKEKKXKRRKKGEGDGGQKQVEQKSSAXLLLXWGLEDVEHVFSEEDYHXLXNYKAFSQFMRPLIAKKNPKIPMSKMMXILGAKWREFSANNPFKGSAAAVAAAAAAAAAAVAEQVSAAVSSAXPIAPSGPPALPPPPAADIQPPPIRRAKXKEGKGPGHKRRSKSPRVPDGRKKLRGKKMAPLKIKLGLLGGKRKKGGSYVFQSDEGPEPEAEESDLDSGSVHSASGRPDGPVRXKKLKRGRPGRKKKKVLGCPAVAGEEEVDGYEXDHQDYCEVCQQGGEIILCDXCPRAYHLVCLDPELDRAPEGKWSCPHCEKEGVQWEAKEEEEEYEEEGEEEGEKEEEDDHMEYCRVCKDGGELLCCDACISSYHIHCLNPPLPDIPNGEWLCPRCXCPVLKGRVQKILHWRWGEPPVAVPAPQQADGNPDVPPPRPLQGRSEREFFVKWVGLSYWHCSWAKELQLEIFHLVMYRNYQRKNDMDEPPPLDYGSGEDDGKSDKRKVKDPHYAEMEEKYYRFGIKPEWMXVHRIINHSVDKKGNYHYLVKWRDLPYDQSXWEEDEMNIPEYEEHKQSYWRHRELIMGEDPAQPRKYKKKKKELQGDGPPSSPXNDPXVKYEXQPRFIXAXGGXLHMYQLEGLNWLRFSWAQGXDXILADEMGLGKXIQXIVFLYSLYKEGHXKGPFLVSAPLSXIINWEREFQMWAPKFYVVXYXGDKDSRAIIRENEFSFEDNAIKGGKKAFKMKREAQVKFHVLLXSYELIXIDQAALGSIRWACLVVDEAHRLKNNQSKFFRVLNGYKIDHKLLLXGXPLQNNLEELFHLLNFLXPERFNNLEGFLEEFADISKEDQIKKLHDLLGPHMLRRLKADVFKNMPAKXELIVRVELSPMQKKYYKYILXRNFEALNSRGGGNQVSLLNIMMDLKKCCNHPYLFPVAAMESPKLPSGAYEGGALIKSSGKLMLLQKMLRKLKEQGHRVLIFSQMXKMLDLLEDFLDYEGYKYERIDGGIXGALRQEAIDRFNAPGAQQFCFLLSXRAGGLGINLAXADXVIIFDSDWNPHNDIQAFSRAHRIGQANKVMIYRFVXRASVEERIXQVAKRKMMLXHLVVRPGLGSKAGSMSKQELDDILKFGXEELFKDENEGENKEEDSSVIHYDNEAIARLLDRNQDAXEDXDVQNMNEYLSSFKVAQYVVREEDKIEEIEREIIKQEENVDPDYWEKLLRHHYEQQQEDLARNLGKGKRVRKQVNYNDAAQEDQDNQSEYSVGSEEEDEDFDERPEGRRQSKRQLRNEKDKPLPPLLARVGGNIEVLGFNXRQRKAFLNAVMRWGMPPQDAFXXQWLVRDLRGKXEKEFKAYVSLFMRHLCEPGADGSEXFADGVPREGLSRQQVLXRIGVMSLVKKKVQEFEHINGRWSMPELMPDPSADSKRSSRASSPXKXSPXXPEASAXNSPCXSKPAXPAPSEKGEGIRXPLEKEEAENQEEKPEKNSRIGEKMEXEADAPSPAPSLGERLEPRKIPLEDEVPGVPGEMEPEPGYRGDREKSAXESXPGERGEEKPLDGQEHRERPEGEXGDLGKREDVKGDRELRPGPRDEPRSNGRREEKXEKPRFMFNIADGGFXELHXLWQNEERAAISSGKLNEIWHRRHDYWLLAGIVLHGYARWQDIQNDAQFAIINEPFKXEANKGNFLEMKNKFLARRFKLLEQALVIEEQLRRAAYLNLSQEPAHPAMALHARFAEAECLAESHQHLSKESLAGNKPANAVLHKVLNQLEELLSDMKADVXRLPAXLSRIPPIAARLQMSERSILSRLASKGXEPHPXPAYPPGPYAXPPGYGAAFSAAPVGALAAAGANYSQMPAGSFIXAAXNGPPVLVKKEKEMVGALVSDGLDRKEPRAGEVICIDD

SEQ ID NO: 5987 - protein, 250 aa, Homo sapiens
  MOD_RES (21)..(21): Selenocysteine
  MOD_RES (36)..(36): Selenocysteine
  MOD_RES (40)..(40): Selenocysteine
  MOD_RES (97)..(97): Selenocysteine
  MOD_RES (205)..(205): Selenocysteine
  MOD_RES (233)..(233): Selenocysteine
  MOD_RES (243)..(243): Selenocysteine
RELRPGPRDEPRSNGRREEKXEKPRFMFNIADGGFXELHXLWQNEERAAISSGKLNEIWHRRHDYWLLAGIVLHGYARWQDIQNDAQFAIINEPFKXEANKGNFLEMKNKFLARRFKLLEQALVIEEQLRRAAYLNLSQEPAHPAMALHARFAEAECLAESHQHLSKESLAGNKPANAVLHKAGGVAERHEGGRDPPASHAVPNXPHRSPPSDVRAQHPQPAGQQGHGASPHXGLPAGSLRYXSGVRGGL

SEQ ID NO: 5988 - protein, 63 aa, Homo sapiens
  MOD_RES (21)..(21): Selenocysteine
  MOD_RES (24)..(24): Selenocysteine
SVIHYDNEAIARLLDRNQDAXEDXDVQNMNEYLSSFKVAQYVVREEDKVRLDFREKRRHRQYW

SEQ ID NO: 5989 - protein, 525 aa, Homo sapiens
  MOD_RES (1)..(1): Any amino acid
  MOD_RES (12)..(12): Selenocysteine
  MOD_RES (16)..(16): Selenocysteine
  MOD_RES (33)..(33): Selenocysteine
  MOD_RES (35)..(35): Selenocysteine
  MOD_RES (62)..(62): Selenocysteine
  MOD_RES (107)..(107): Selenocysteine
  MOD_RES (135)..(135): Selenocysteine
  MOD_RES (215)..(215): Selenocysteine
  MOD_RES (247)..(247): Selenocysteine
  MOD_RES (267)..(267): Selenocysteine
  MOD_RES (372)..(372): Selenocysteine
  MOD_RES (503)..(503): Selenocysteine
XQKQVEQKSSAXLLLXWGLEDVEHVFSEEDYHXLXNYKAFSQFMRPLIAKKNPKIPMSKMMXILGAKWREFSANNPFKGSAAAVAAAAAAAAAAVAEQVSAAVSSAXPIAPSGPPALPPPPAADIQPPPIRRAKXKEGKGPGHKRRSKSPRVPDGRKKLRGKKMAPLKIKLGLLGGKRKKGGSSDEGPEPEAEESDLDSGSVHSASGRPDGPVRXKKLKRGRPGRKKKKVLGCPAVAGEEEVDGYEXDHQDYCEVCQQGGEIILCDXCPRAYHLVCLDPELDRAPEGKWSCPHCEKEGVQWEAKEEEEEYEEEGEEEGEKEEEDDHMEYCRVCKDGGELLCCDACISSYHIHCLNPPLPDIPNGEWLCPRCXCPVLKGRVQKILHWRWGEPPVAVPAPQQADGNPDVPPPRPLQGRSEREFFVKWVGLSYWHCSWAKELQLEIFHLVMYRNYQRKNDMDEPPPLDYGSGEDDGKSDKRKVKDPHYAEMEEKYYRFGIKPEWMXVHRIINHSVDKKGNYHYLVKWR

SEQ ID NO: 5990 - protein, 110 aa, Homo sapiens
  MOD_RES (1)..(1): Any amino acid
  MOD_RES (72)..(72): Selenocysteine
  MOD_RES (98)..(98): Selenocysteine
XSPRVPDGRKKLRGKKMAPLKIKLGLLGGKRKKGGSYVFQSDEGPEPEAEESDLDSGSVHSASGRPDGPVRXKKLKRGRPGRKKKKVAGEEEVDGYEXDHQDYCEVCQQG

SEQ ID NO: 5991 - protein, 1937 aa, Homo sapiens
  MOD_RES (43)..(43): Selenocysteine
  MOD_RES (45)..(45): Selenocysteine
  MOD_RES (108)..(108): Selenocysteine
  MOD_RES (171)..(171): Selenocysteine
  MOD_RES (173)..(173): Selenocysteine
  MOD_RES (211)..(211): Selenocysteine
  MOD_RES (239)..(239): Selenocysteine
  MOD_RES (241)..(241): Selenocysteine
  MOD_RES (259)..(259): Selenocysteine
  MOD_RES (333)..(333): Selenocysteine
  MOD_RES (345)..(346): Selenocysteine
  MOD_RES (357)..(357): Selenocysteine
  MOD_RES (364)..(364): Selenocysteine
  MOD_RES (384)..(384): Selenocysteine
  MOD_RES (463)..(463): Selenocysteine
  MOD_RES (491)..(491): Selenocysteine
  MOD_RES (514)..(514): Selenocysteine
  MOD_RES (526)..(526): Selenocysteine
  MOD_RES (700)..(700): Selenocysteine
  MOD_RES (702)..(702): Selenocysteine
  MOD_RES (706)..(706): Selenocysteine
  MOD_RES (719)..(719): Selenocysteine
  MOD_RES (722)..(722): Selenocysteine
  MOD_RES (742)..(742): Selenocysteine
  MOD_RES (744)..(744): Selenocysteine
  MOD_RES (755)..(755): Selenocysteine
  MOD_RES (758)..(758): Selenocysteine
  MOD_RES (783)..(783): Selenocysteine
  MOD_RES (802)..(802): Selenocysteine
  MOD_RES (847)..(847): Selenocysteine
  MOD_RES (853)..(853): Selenocysteine
  MOD_RES (898)..(898): Selenocysteine
  MOD_RES (900)..(900): Selenocysteine
  MOD_RES (917)..(917): Selenocysteine
  MOD_RES (967)..(967): Selenocysteine
  MOD_RES (988)..(988): Selenocysteine
  MOD_RES (1073)..(1073): Selenocysteine
  MOD_RES (1098)..(1098): Selenocysteine
  MOD_RES (1123)..(1123): Selenocysteine
  MOD_RES (1134)..(1134): Selenocysteine
  MOD_RES (1137)..(1137): Selenocysteine
  MOD_RES (1173)..(1173): Selenocysteine
  MOD_RES (1182)..(1182): Selenocysteine
  MOD_RES (1192)..(1192): Selenocysteine
  MOD_RES (1204)..(1204): Selenocysteine
  MOD_RES (1220)..(1220): Selenocysteine
  MOD_RES (1229)..(1229): Selenocysteine
  MOD_RES (1262)..(1262): Selenocysteine
  MOD_RES (1265)..(1265): Selenocysteine
  MOD_RES (1365)..(1365): Selenocysteine
  MOD_RES (1465)..(1466): Selenocysteine
  MOD_RES (1502)..(1502): Selenocysteine
  MOD_RES (1519)..(1519): Selenocysteine
  MOD_RES (1565)..(1565): Selenocysteine
  MOD_RES (1567)..(1567): Selenocysteine
  MOD_RES (1570)..(1570): Selenocysteine
  MOD_RES (1574)..(1574): Selenocysteine
  MOD_RES (1578)..(1578): Selenocysteine
  MOD_RES (1611)..(1611): Selenocysteine
  MOD_RES (1615)..(1615): Selenocysteine
  MOD_RES (1620)..(1620): Selenocysteine
  MOD_RES (1652)..(1652): Selenocysteine
  MOD_RES (1658)..(1658): Selenocysteine
  MOD_RES (1678)..(1678): Selenocysteine
  MOD_RES (1704)..(1704): Selenocysteine
  MOD_RES (1731)..(1731): Selenocysteine
  MOD_RES (1745)..(1745): Selenocysteine
  MOD_RES (1747)..(1747): Selenocysteine
  MOD_RES (1750)..(1750): Selenocysteine
  MOD_RES (1845)..(1845): Selenocysteine
  MOD_RES (1894)..(1894): Selenocysteine
  MOD_RES (1899)..(1899): Selenocysteine
  MOD_RES (1929)..(1929): Selenocysteine
MASGLGSPSPCSAGSEEEDMDALLNNSLPPPHPEDPEEDLSEXEXPKLKKKKKPKKPRDPKIPKSKRQKKERMLLCRQLGDSSGEGPEFVEEEEEVALRSDSEGSDYXPGKKKKKKLGPKKEKKSKSKRKEEEEEEDDDDDSKEPKSSAQLLEDWGMEDIDHVFSEEDYRXLXNYKAFSQFVRPLIAAKNPKIAVSKMMMVLGAKWREFSXNNPFKGSSGASVAAAAAAAVAVVESMVXAXEVAPPPPPVEVPIRKAKXKEGKGPNARRKPKGSPRVPDAKKPKPKKVAPLKIKLGGFGSKRKRSSSEDDDLDVESDFDDASINSYSVSDGSXSRSSRSRKKLRXXKKKKKGEEEVXAVDGYEXDHQDYCEVCQQGGEIILCDXCPRAYHMVCLDPDMEKAPEGKWSCPHCEKEGIQWEAKEDNSEGEEILEEVGGDLEEEDDHHMEFCRVCKDGGELLCCDXCPSSYHIHCLNPPLPEIPNGEWLCPRCXCPALKGKVQKILIWKWGQPPSPXPVPRPPDADPNXPSPKPLEGRPERQFFVKWQGMSYWHCSWVSELQLELHCQVMFRNYQRKNDMDEPPSGDFGGDEEKSRKRKNKDPKFAEMEERFYRYGIKPEWMMIHRILNHSVDKKGHVHYLIKWRDLPYDQASWESEDVEIQDYDLFKQSYWNHRELMRGEEGRPGKKLKKVKLRKLERPPEXPXVDPXVKYERQPEYLDAXGGXLHPYQMEGLNWLRFSWAQGXDXILADEMGLGKXVQXAVFLYSLYKEGHSKGPFLVSAPLSXIINWEREFEMWAPDMYVVXYVGDKDSRAIIRENEFSFEDNAIRGGKKASRMKKEASVKFHVLLXSYELIXIDMAILGSIDWACLIVDEAHRLKNNQSKFFRVLNGYSLQHKLLLXGXPLQNNLEELFHLLNFLXPERFHNLEGFLEEFADIAKEDQIKKLHDMLGPHMLRRLKADVFKNMPSKXELIVRVELSPMQKKYYKYILXRNFEALNARGGGNQVSLLNVVMDLKKCCNHPYLFPVAAMEAPKMPNGMYDGSALIRASGKLLLLQKMLKNLKEGGHRVLIFSQMXKMLDLLEDFLEHEGYKYERIDGGIXGNMRQEAIDRFNAPGAQQFCFLLSXRAGGLGINLAXADXVIIYDSDWNPHNDIQAFSRAHRIGQNKKVMIYRFVXRASVEERIXQVAKKKMMLXHLVVRPGLGSKXGSMSKQELDDILKFGXEELFKDEAXDGGGDNKEGEDSSVIHYDDKAIERLLDRNQDEXEDXELQGMNEYLSSFKVAQYVVREEEMGEEEEVEREIIKQEESVDPDYWEKLLRHHYEQQQEDLARNLGKGKRIRKQVNYNDGSQEDRGVCGRPRPPPMGRSXRAVGPAHLPSLPPDWQDDQSDNQSDYSVASEEGDEDFDERSEAPRRPSRKGLRNDKDKPLPPLLARVGGNIEVLGFNARQRKAFLNAIMRYGMPPQDAFXXQWLVRDLRGKSEKEFKAYVSLFMRHLCEPGADGAEXFADGVPREGLSRQHVLXRIGVMSLIRKKVQEFEHVNGRWSMPELAEVEENKKMSQPGSPSPKXPXPSXPGDXQPNXPAPVPPAEDGIKIEENSLKEEESIEGEKEVKSXAPEXAIECXQAPAPASEDEKVVVEPPEGEEKVEKAEVKERXEEPMEXEPKGAADVEKVEEKSAIDLXPIVVEDKEEKKEEEEKKEVMLQNGEXPKDLNDEKQKKNIKQRFMFNIADGGFXELHSLWQNEERAAXVXKKXYEIWHRRHDYWLLAGIINHGYARWQDIQNDPRYAILNEPFKGEMNRGNFLEIKNKFLARRFKLLEQALVIEEQLRRAAYLNMSEDPSHPSMALNXRFAEVECLAESHQHLSKESMAGNKPANAVLHKVLKQLEELLSDMKADVXRLPAXIARIPPVAVRLQMSERNILSRLANRAPEPXPQQVAQQQ

SEQ ID NO: 5992 - protein, 125 aa, Homo sapiens
  MOD_RES (46)..(46): Selenocysteine
  MOD_RES (48)..(48): Selenocysteine
  MOD_RES (104)..(104): Selenocysteine
MASGLGSPSPCSAGSEEEDMDALLNNSLPPPHPENEEDPEEDLSEXEXPKLKKKKKPKKPRDPKIPKSKRQKKELGDSSGEGPEFVEEEEEVALRSDSEGSDYXPGKKKKKKLGPKKEKKSKSKR

SEQ ID NO: 5993 - protein, 1905 aa, Homo sapiens
  MOD_RES (46)..(46): Selenocysteine
  MOD_RES (48)..(48): Selenocysteine
  MOD_RES (104)..(104): Selenocysteine
  MOD_RES (167)..(167): Selenocysteine
  MOD_RES (169)..(169): Selenocysteine
  MOD_RES (207)..(207): Selenocysteine
  MOD_RES (235)..(235): Selenocysteine
  MOD_RES (237)..(237): Selenocysteine
  MOD_RES (255)..(255): Selenocysteine
  MOD_RES (329)..(329): Selenocysteine
  MOD_RES (341)..(342): Selenocysteine
  MOD_RES (353)..(353): Selenocysteine
  MOD_RES (360)..(360): Selenocysteine
  MOD_RES (380)..(380): Selenocysteine
  MOD_RES (459)..(459): Selenocysteine
  MOD_RES (487)..(487): Selenocysteine
  MOD_RES (510)..(510): Selenocysteine
  MOD_RES (522)..(522): Selenocysteine
  MOD_RES (696)..(696): Selenocysteine
  MOD_RES (698)..(698): Selenocysteine
  MOD_RES (702)..(702): Selenocysteine
  MOD_RES (715)..(715): Selenocysteine
  MOD_RES (718)..(718): Selenocysteine
  MOD_RES (738)..(738): Selenocysteine
  MOD_RES (740)..(740): Selenocysteine
  MOD_RES (751)..(751): Selenocysteine
  MOD_RES (754)..(754): Selenocysteine
  MOD_RES (779)..(779): Selenocysteine
  MOD_RES (798)..(798): Selenocysteine
  MOD_RES (843)..(843): Selenocysteine
  MOD_RES (849)..(849): Selenocysteine
  MOD_RES (894)..(894): Selenocysteine
  MOD_RES (896)..(896): Selenocysteine
  MOD_RES (913)..(913): Selenocysteine
  MOD_RES (963)..(963): Selenocysteine
  MOD_RES (984)..(984): Selenocysteine
  MOD_RES (1069)..(1069): Selenocysteine
  MOD_RES (1094)..(1094): Selenocysteine
  MOD_RES (1119)..(1119): Selenocysteine
  MOD_RES (1130)..(1130): Selenocysteine
  MOD_RES (1133)..(1133): Selenocysteine
  MOD_RES (1169)..(1169): Selenocysteine
  MOD_RES (1178)..(1178): Selenocysteine
  MOD_RES (1188)..(1188): Selenocysteine
  MOD_RES (1200)..(1200): Selenocysteine
  MOD_RES (1216)..(1216): Selenocysteine
  MOD_RES (1225)..(1225): Selenocysteine
  MOD_RES (1258)..(1258): Selenocysteine
  MOD_RES (1261)..(1261): Selenocysteine
  MOD_RES (1433)..(1434): Selenocysteine
  MOD_RES (1470)..(1470): Selenocysteine
  MOD_RES (1487)..(1487): Selenocysteine
  MOD_RES (1533)..(1533): Selenocysteine
  MOD_RES (1535)..(1535): Selenocysteine
  MOD_RES (1538)..(1538): Selenocysteine
  MOD_RES (1542)..(1542): Selenocysteine
  MOD_RES (1546)..(1546): Selenocysteine
  MOD_RES (1579)..(1579): Selenocysteine
  MOD_RES (1583)..(1583): Selenocysteine
  MOD_RES (1588)..(1588): Selenocysteine
  MOD_RES (1620)..(1620): Selenocysteine
  MOD_RES (1626)..(1626): Selenocysteine
  MOD_RES (1646)..(1646): Selenocysteine
  MOD_RES (1672)..(1672): Selenocysteine
  MOD_RES (1699)..(1699): Selenocysteine
  MOD_RES (1713)..(1713): Selenocysteine
  MOD_RES (1715)..(1715): Selenocysteine
  MOD_RES (1718)..(1718): Selenocysteine
  MOD_RES (1813)..(1813): Selenocysteine
  MOD_RES (1862)..(1862): Selenocysteine
  MOD_RES (1867)..(1867): Selenocysteine
  MOD_RES (1897)..(1897): Selenocysteine
MASGLGSPSPCSAGSEEEDMDALLNNSLPPPHPENEEDPEEDLSEXEXPKLKKKKKPKKPRDPKIPKSKRQKKELGDSSGEGPEFVEEEEEVALRSDSEGSDYXPGKKKKKKLGPKKEKKSKSKRKEEEEEEDDDDDSKEPKSSAQLLEDWGMEDIDHVFSEEDYRXLXNYKAFSQFVRPLIAAKNPKIAVSKMMMVLGAKWREFSXNNPFKGSSGASVAAAAAAAVAVVESMVXAXEVAPPPPPVEVPIRKAKXKEGKGPNARRKPKGSPRVPDAKKPKPKKVAPLKIKLGGFGSKRKRSSSEDDDLDVESDFDDASINSYSVSDGSXSRSSRSRKKLRXXKKKKKGEEEVXAVDGYEXDHQDYCEVCQQGGEIILCDXCPRAYHMVCLDPDMEKAPEGKWSCPHCEKEGIQWEAKEDNSEGEEILEEVGGDLEEEDDHHMEFCRVCKDGGELLCCDXCPSSYHIHCLNPPLPEIPNGEWLCPRCXCPALKGKVQKILIWKWGQPPSPXPVPRPPDADPNXPSPKPLEGRPERQFFVKWQGMSYWHCSWVSELQLELHCQVMFRNYQRKNDMDEPPSGDFGGDEEKSRKRKNKDPKFAEMEERFYRYGIKPEWMMIHRILNHSVDKKGHVHYLIKWRDLPYDQASWESEDVEIQDYDLFKQSYWNHRELMRGEEGRPGKKLKKVKLRKLERPPEXPXVDPXVKYERQPEYLDAXGGXLHPYQMEGLNWLRFSWAQGXDXILADEMGLGKXVQXAVFLYSLYKEGHSKGPFLVSAPLSXIINWEREFEMWAPDMYVVXYVGDKDSRAIIRENEFSFEDNAIRGGKKASRMKKEASVKFHVLLXSYELIXIDMAILGSIDWACLIVDEAHRLKNNQSKFFRVLNGYSLQHKLLLXGXPLQNNLEELFHLLNFLXPERFHNLEGFLEEFADIAKEDQIKKLHDMLGPHMLRRLKADVFKNMPSKXELIVRVELSPMQKKYYKYILXRNFEALNARGGGNQVSLLNVVMDLKKCCNHPYLFPVAAMEAPKMPNGMYDGSALIRASGKLLLLQKMLKNLKEGGHRVLIFSQMXKMLDLLEDFLEHEGYKYERIDGGIXGNMRQEAIDRFNAPGAQQFCFLLSXRAGGLGINLAXADXVIIYDSDWNPHNDIQAFSRAHRIGQNKKVMIYRFVXRASVEERIXQVAKKKMMLXHLVVRPGLGSKXGSMSKQELDDILKFGXEELFKDEAXDGGGDNKEGEDSSVIHYDDKAIERLLDRNQDEXEDXELQGMNEYLSSFKVAQYVVREEEMGEEEEVEREIIKQEESVDPDYWEKLLRHHYEQQQEDLARNLGKGKRIRKQVNYNDGSQEDRDWQDDQSDNQSDYSVASEEGDEDFDERSEAPRRPSRKGLRNDKDKPLPPLLARVGGNIEVLGFNARQRKAFLNAIMRYGMPPQDAFXXQWLVRDLRGKSEKEFKAYVSLFMRHLCEPGADGAEXFADGVPREGLSRQHVLXRIGVMSLIRKKVQEFEHVNGRWSMPELAEVEENKKMSQPGSPSPKXPXPSXPGDXQPNXPAPVPPAEDGIKIEENSLKEEESIEGEKEVKSXAPEXAIECXQAPAPASEDEKVVVEPPEGEEKVEKAEVKERXEEPMEXEPKGAADVEKVEEKSAIDLXPIVVEDKEEKKEEEEKKEVMLQNGEXPKDLNDEKQKKNIKQRFMFNIADGGFXELHSLWQNEERAAXVXKKXYEIWHRRHDYWLLAGIINHGYARWQDIQNDPRYAILNEPFKGEMNRGNFLEIKNKFLARRFKLLEQALVIEEQLRRAAYLNMSEDPSHPSMALNXRFAEVECLAESHQHLSKESMAGNKPANAVLHKVLKQLEELLSDMKADVXRLPAXIARIPPVAVRLQMSERNILSRLANRAPEPXPQQVAQQQ

SEQ ID NO: 5994 - protein, 354 aa, Homo sapiens
  MOD_RES (46)..(46): Selenocysteine
  MOD_RES (48)..(48): Selenocysteine
  MOD_RES (111)..(111): Selenocysteine
  MOD_RES (174)..(174): Selenocysteine
  MOD_RES (176)..(176): Selenocysteine
  MOD_RES (214)..(214): Selenocysteine
  MOD_RES (242)..(242): Selenocysteine
  MOD_RES (244)..(244): Selenocysteine
  MOD_RES (262)..(262): Selenocysteine
  MOD_RES (336)..(336): Selenocysteine
  MOD_RES (348)..(349): Selenocysteine
MASGLGSPSPCSAGSEEEDMDALLNNSLPPPHPENEEDPEEDLSEXEXPKLKKKKKPKKPRDPKIPKSKRQKKERMLLCRQLGDSSGEGPEFVEEEEEVALRSDSEGSDYXPGKKKKKKLGPKKEKKSKSKRKEEEEEEDDDDDSKEPKSSAQLLEDWGMEDIDHVFSEEDYRXLXNYKAFSQFVRPLIAAKNPKIAVSKMMMVLGAKWREFSXNNPFKGSSGASVAAAAAAAVAVVESMVXAXEVAPPPPPVEVPIRKAKXKEGKGPNARRKPKGSPRVPDAKKPKPKKVAPLKIKLGGFGSKRKRSSSEDDDLDVESDFDDASINSYSVSDGSXSRSSRSRKKLRXXKKKKK

SEQ ID NO: 5995 - protein, 1912 aa, Homo sapiens
  MOD_RES (46)..(46): Selenocysteine
  MOD_RES (48)..(48): Selenocysteine
  MOD_RES (111)..(111): Selenocysteine
  MOD_RES (174)..(174): Selenocysteine
  MOD_RES (176)..(176): Selenocysteine
  MOD_RES (214)..(214): Selenocysteine
  MOD_RES (242)..(242): Selenocysteine
  MOD_RES (244)..(244): Selenocysteine
  MOD_RES (262)..(262): Selenocysteine
  MOD_RES (336)..(336): Selenocysteine
  MOD_RES (348)..(349): Selenocysteine
  MOD_RES (360)..(360): Selenocysteine
  MOD_RES (367)..(367): Selenocysteine
  MOD_RES (387)..(387): Selenocysteine
  MOD_RES (466)..(466): Selenocysteine
  MOD_RES (494)..(494): Selenocysteine
  MOD_RES (517)..(517): Selenocysteine
  MOD_RES (529)..(529): Selenocysteine
  MOD_RES (703)..(703): Selenocysteine
  MOD_RES (705)..(705): Selenocysteine
  MOD_RES (709)..(709): Selenocysteine
  MOD_RES (722)..(722): Selenocysteine
  MOD_RES (725)..(725): Selenocysteine
  MOD_RES (745)..(745): Selenocysteine
  MOD_RES (747)..(747): Selenocysteine
  MOD_RES (758)..(758): Selenocysteine
  MOD_RES (761)..(761): Selenocysteine
  MOD_RES (786)..(786): Selenocysteine
  MOD_RES (805)..(805): Selenocysteine
  MOD_RES (850)..(850): Selenocysteine
  MOD_RES (856)..(856): Selenocysteine
  MOD_RES (901)..(901): Selenocysteine
  MOD_RES (903)..(903): Selenocysteine
  MOD_RES (920)..(920): Selenocysteine
  MOD_RES (970)..(970): Selenocysteine
  MOD_RES (991)..(991): Selenocysteine
  MOD_RES (1076)..(1076): Selenocysteine
  MOD_RES (1101)..(1101): Selenocysteine
  MOD_RES (1126)..(1126): Selenocysteine
  MOD_RES (1137)..(1137): Selenocysteine
  MOD_RES (1140)..(1140): Selenocysteine
  MOD_RES (1176)..(1176): Selenocysteine
  MOD_RES (1185)..(1185): Selenocysteine
  MOD_RES (1195)..(1195): Selenocysteine
  MOD_RES (1207)..(1207): Selenocysteine
  MOD_RES (1223)..(1223): Selenocysteine
  MOD_RES (1232)..(1232): Selenocysteine
  MOD_RES (1265)..(1265): Selenocysteine
  MOD_RES (1268)..(1268): Selenocysteine
  MOD_RES (1440)..(1441): Selenocysteine
  MOD_RES (1477)..(1477): Selenocysteine
  MOD_RES (1494)..(1494): Selenocysteine
  MOD_RES (1540)..(1540): Selenocysteine
  MOD_RES (1542)..(1542): Selenocysteine
  MOD_RES (1545)..(1545): Selenocysteine
  MOD_RES (1549)..(1549): Selenocysteine
  MOD_RES (1553)..(1553): Selenocysteine
  MOD_RES (1586)..(1586): Selenocysteine
  MOD_RES (1590)..(1590): Selenocysteine
  MOD_RES (1595)..(1595): Selenocysteine
  MOD_RES (1627)..(1627): Selenocysteine
  MOD_RES (1633)..(1633): Selenocysteine
  MOD_RES (1653)..(1653): Selenocysteine
  MOD_RES (1679)..(1679): Selenocysteine
  MOD_RES (1706)..(1706): Selenocysteine
  MOD_RES (1720)..(1720): Selenocysteine
  MOD_RES (1722)..(1722): Selenocysteine
  MOD_RES (1725)..(1725): Selenocysteine
  MOD_RES (1820)..(1820): Selenocysteine
  MOD_RES (1869)..(1869): Selenocysteine
  MOD_RES (1874)..(1874): Selenocysteine
  MOD_RES (1904)..(1904): Selenocysteine
MASGLGSPSPCSAGSEEEDMDALLNNSLPPPHPENEEDPEEDLSEXEXPKLKKKKKPKKPRDPKIPKSKRQKKERMLLCRQLGDSSGEGPEFVEEEEEVALRSDSEGSDYXPGKKKKKKLGPKKEKKSKSKRKEEEEEEDDDDDSKEPKSSAQLLEDWGMEDIDHVFSEEDYRXLXNYKAFSQFVRPLIAAKNPKIAVSKMMMVLGAKWREFSXNNPFKGSSGASVAAAAAAAVAVVESMVXAXEVAPPPPPVEVPIRKAKXKEGKGPNARRKPKGSPRVPDAKKPKPKKVAPLKIKLGGFGSKRKRSSSEDDDLDVESDFDDASINSYSVSDGSXSRSSRSRKKLRXXKKKKKGEEEVXAVDGYEXDHQDYCEVCQQGGEIILCDXCPRAYHMVCLDPDMEKAPEGKWSCPHCEKEGIQWEAKEDNSEGEEILEEVGGDLEEEDDHHMEFCRVCKDGGELLCCDXCPSSYHIHCLNPPLPEIPNGEWLCPRCXCPALKGKVQKILIWKWGQPPSPXPVPRPPDADPNXPSPKPLEGRPERQFFVKWQGMSYWHCSWVSELQLELHCQVMFRNYQRKNDMDEPPSGDFGGDEEKSRKRKNKDPKFAEMEERFYRYGIKPEWMMIHRILNHSVDKKGHVHYLIKWRDLPYDQASWESEDVEIQDYDLFKQSYWNHRELMRGEEGRPGKKLKKVKLRKLERPPEXPXVDPXVKYERQPEYLDAXGGXLHPYQMEGLNWLRFSWAQGXDXILADEMGLGKXVQXAVFLYSLYKEGHSKGPFLVSAPLSXIINWEREFEMWAPDMYVVXYVGDKDSRAIIRENEFSFEDNAIRGGKKASRMKKEASVKFHVLLXSYELIXIDMAILGSIDWACLIVDEAHRLKNNQSKFFRVLNGYSLQHKLLLXGXPLQNNLEELFHLLNFLXPERFHNLEGFLEEFADIAKEDQIKKLHDMLGPHMLRRLKADVFKNMPSKXELIVRVELSPMQKKYYKYILXRNFEALNARGGGNQVSLLNVVMDLKKCCNHPYLFPVAAMEAPKMPNGMYDGSALIRASGKLLLLQKMLKNLKEGGHRVLIFSQMXKMLDLLEDFLEHEGYKYERIDGGIXGNMRQEAIDRFNAPGAQQFCFLLSXRAGGLGINLAXADXVIIYDSDWNPHNDIQAFSRAHRIGQNKKVMIYRFVXRASVEERIXQVAKKKMMLXHLVVRPGLGSKXGSMSKQELDDILKFGXEELFKDEAXDGGGDNKEGEDSSVIHYDDKAIERLLDRNQDEXEDXELQGMNEYLSSFKVAQYVVREEEMGEEEEVEREIIKQEESVDPDYWEKLLRHHYEQQQEDLARNLGKGKRIRKQVNYNDGSQEDRDWQDDQSDNQSDYSVASEEGDEDFDERSEAPRRPSRKGLRNDKDKPLPPLLARVGGNIEVLGFNARQRKAFLNAIMRYGMPPQDAFXXQWLVRDLRGKSEKEFKAYVSLFMRHLCEPGADGAEXFADGVPREGLSRQHVLXRIGVMSLIRKKVQEFEHVNGRWSMPELAEVEENKKMSQPGSPSPKXPXPSXPGDXQPNXPAPVPPAEDGIKIEENSLKEEESIEGEKEVKSXAPEXAIECXQAPAPASEDEKVVVEPPEGEEKVEKAEVKERXEEPMEXEPKGAADVEKVEEKSAIDLXPIVVEDKEEKKEEEEKKEVMLQNGEXPKDLNDEKQKKNIKQRFMFNIADGGFXELHSLWQNEERAAXVXKKXYEIWHRRHDYWLLAGIINHGYARWQDIQNDPRYAILNEPFKGEMNRGNFLEIKNKFLARRFKLLEQALVIEEQLRRAAYLNMSEDPSHPSMALNXRFAEVECLAESHQHLSKESMAGNKPANAVLHKVLKQLEELLSDMKADVXRLPAXIARIPPVAVRLQMSERNILSRLANRAPEPXPQQVAQQQ

SEQ ID NO: 5996 - protein, 110 aa, Homo sapiens
  MOD_RES (24)..(24): Selenocysteine
  MOD_RES (49)..(49): Selenocysteine
  MOD_RES (60)..(60): Selenocysteine
  MOD_RES (63)..(63): Selenocysteine
  MOD_RES (103)..(103): Selenocysteine
  MOD_RES (108)..(108): Selenocysteine
MLDLLEDFLEYEGYKYERIDGGIXGGLRQEAIDRFNAPGAQQFCFLLSXRAGGLGINLAXADXVIIYDSDWNPHNDIQVCAAAAHHPPRGPLIPGLRPSAAPXASARXRR

SEQ ID NO: 5997 - protein, 1225 aa, Homo sapiens
  MOD_RES (7)..(7): Selenocysteine
  MOD_RES (157)..(157): Selenocysteine
  MOD_RES (159)..(159): Selenocysteine
  MOD_RES (186)..(186): Selenocysteine
  MOD_RES (219)..(219): Selenocysteine
  MOD_RES (221)..(221): Selenocysteine
  MOD_RES (244)..(244): Selenocysteine
  MOD_RES (271)..(271): Selenocysteine
  MOD_RES (340)..(340): Selenocysteine
  MOD_RES (360)..(360): Selenocysteine
  MOD_RES (461)..(461): Selenocysteine
  MOD_RES (478)..(478): Selenocysteine
  MOD_RES (536)..(536): Selenocysteine
  MOD_RES (623)..(623): Selenocysteine
  MOD_RES (653)..(653): Selenocysteine
  MOD_RES (677)..(677): Selenocysteine
  MOD_RES (683)..(683): Selenocysteine
  MOD_RES (696)..(696): Selenocysteine
  MOD_RES (699)..(699): Selenocysteine
  MOD_RES (719)..(719): Selenocysteine
  MOD_RES (721)..(721): Selenocysteine
  MOD_RES (732)..(732): Selenocysteine
  MOD_RES (735)..(735): Selenocysteine
  MOD_RES (760)..(760): Selenocysteine
  MOD_RES (779)..(779): Selenocysteine
  MOD_RES (781)..(781): Selenocysteine
  MOD_RES (824)..(824): Selenocysteine
  MOD_RES (830)..(830): Selenocysteine
  MOD_RES (875)..(875): Selenocysteine
  MOD_RES (877)..(877): Selenocysteine
  MOD_RES (894)..(894): Selenocysteine
  MOD_RES (944)..(944): Selenocysteine
  MOD_RES (965)..(965): Selenocysteine
  MOD_RES (1050)..(1050): Selenocysteine
  MOD_RES (1075)..(1075): Selenocysteine
  MOD_RES (1100)..(1100): Selenocysteine
  MOD_RES (1111)..(1111): Selenocysteine
  MOD_RES (1114)..(1114): Selenocysteine
  MOD_RES (1140)..(1140): Selenocysteine
  MOD_RES (1148)..(1148): Selenocysteine
  MOD_RES (1153)..(1153): Selenocysteine
  MOD_RES (1179)..(1179): Selenocysteine
  MOD_RES (1181)..(1181): Selenocysteine
  MOD_RES (1222)..(1222): Selenocysteine
MRGPVGXEEELPRLFAEEMENEDEMSEEEDGGLEAFDDFFPVEPVSLPKKKKPKKLKENKCKGKRKKKEGSNDELSENEEDLEEKSESEGSDYSPNKKKKKKLKDKKEKKAKRKKKDEDEDDNDDGCLKEPKSSGQLMAEWGLDDVDYLFSEEDYHXLXNYKAFSQFLRPLIAKKNPKIPMSKMMXVLGAKWREFSANNPFKGSSAAAAAAAVAAAVEXVXISPPLAVSPPQVPQPVPIRKAKXKEGKGPGVRKKIKGSKDGKKKGKGKKXAGLKFRFGGISNKRKKGSSSEEDEREESDFDSASIHSASVRSECSAALGKKSKRRRKKKRIDDGDGYEXDHQDYCEVCQQGGEIILCDXCPRAYHLVCLDPELEKAPEGKWSCPHCEKEGIQWEPKDDDDEEEEGGCEEEEDDHMEFCRVCKDGGELLCCDACPSSYHLHCLNPPLPEIPNGEWLCPRCXCPPLKGKVQRILHWRWXEPPAPFMVGLPGPDVEPSLPPPKPLEGIPEREFFVKWAGLSYWHCSWVKELQLELYHXVMYRNYQRKNDMDEPPPFDYGSGDEDGKSEKRKNKDPLYAKMEERFYRYGIKPEWMMIHRILNHSFDKKGDVHYLIKWKDLPYDQCXWEIDDIDIPYYDNLKQAYWGHRELMLGEDXRLPKRLLKKGKKLRDDKQEKPPDXPIVDPXVKFDKQPWYIDSXGGXLHPYQLEGLNWLRFSWAQGXDXILADEMGLGKXVQXIVFLYSLYKEGHSKGPYLVSAPLSXIINWEREFEMWAPDFYVVXYXGDKESRSVIRENEFSFEDNAIRSGKKVFRMKKEVQIKFHVLLXSYELIXIDQAILGSIEWACLVVDEAHRLKNNQSKFFRVLNSYKIDYKLLLXGXPLQNNLEELFHLLNFLXPERFNNLEGFLEEFADISKEDQIKKLHDLLGPHMLRRLKADVFKNMPAKXELIVRVELSQMQKKYYKFILXRNFEALNSKGGGNQVSLLNIMMDLKKCCNHPYLFPVAAVEAPVLPNGSYDGSSLVKSSGKLMLLQKMLKKLRDEGHRVLIFSQMXKMLDLLEDFLEYEGYKYERIDGGIXGGLRQEAIDRFNAPGAQQFCFLLSXRAGGLGINLAXADXVIIYDSDWNPHNDIQAFSRAHRIGQXKWKPSWAXWMRKXPGHRSQGSPWKSRPFQPPWIEWRVRXSXRAQPARREPERSGQRRRRRPRPPRSSCRERRCFLRRRRSWXSWS

SEQ ID NO: 5998 - protein, 1954 aa, Homo sapiens
  MOD_RES (7)..(7): Selenocysteine
  MOD_RES (157)..(157): Selenocysteine
  MOD_RES (159)..(159): Selenocysteine
  MOD_RES (186)..(186): Selenocysteine
  MOD_RES (219)..(219): Selenocysteine
  MOD_RES (221)..(221): Selenocysteine
  MOD_RES (244)..(244): Selenocysteine
  MOD_RES (271)..(271): Selenocysteine
  MOD_RES (340)..(340): Selenocysteine
  MOD_RES (360)..(360): Selenocysteine
  MOD_RES (461)..(461): Selenocysteine
  MOD_RES (478)..(478): Selenocysteine
  MOD_RES (536)..(536): Selenocysteine
  MOD_RES (623)..(623): Selenocysteine
  MOD_RES (653)..(653): Selenocysteine
  MOD_RES (677)..(677): Selenocysteine
  MOD_RES (683)..(683): Selenocysteine
  MOD_RES (696)..(696): Selenocysteine
  MOD_RES (699)..(699): Selenocysteine
  MOD_RES (719)..(719): Selenocysteine
  MOD_RES (721)..(721): Selenocysteine
  MOD_RES (732)..(732): Selenocysteine
  MOD_RES (735)..(735): Selenocysteine
  MOD_RES (760)..(760): Selenocysteine
  MOD_RES (779)..(779): Selenocysteine
  MOD_RES (781)..(781): Selenocysteine
  MOD_RES (824)..(824): Selenocysteine
  MOD_RES (830)..(830): Selenocysteine
  MOD_RES (875)..(875): Selenocysteine
  MOD_RES (877)..(877): Selenocysteine
  MOD_RES (894)..(894): Selenocysteine
  MOD_RES (944)..(944): Selenocysteine
  MOD_RES (965)..(965): Selenocysteine
  MOD_RES (1050)..(1050): Selenocysteine
  MOD_RES (1075)..(1075): Selenocysteine
  MOD_RES (1100)..(1100): Selenocysteine
  MOD_RES (1111)..(1111): Selenocysteine
  MOD_RES (1114)..(1114): Selenocysteine
  MOD_RES (1150)..(1150): Selenocysteine
  MOD_RES (1159)..(1159): Selenocysteine
  MOD_RES (1169)..(1169): Selenocysteine
  MOD_RES (1185)..(1185): Selenocysteine
  MOD_RES (1197)..(1197): Selenocysteine
  MOD_RES (1217)..(1217): Selenocysteine
  MOD_RES (1241)..(1241): Selenocysteine
  MOD_RES (1273)..(1273): Selenocysteine
  MOD_RES (1276)..(1276): Selenocysteine
  MOD_RES (1485)..(1485): Selenocysteine
  MOD_RES (1502)..(1502): Selenocysteine
  MOD_RES (1526)..(1526): Selenocysteine
  MOD_RES (1549)..(1549): Selenocysteine
  MOD_RES (1625)..(1625): Selenocysteine
  MOD_RES (1670)..(1670): Selenocysteine
  MOD_RES (1680)..(1680): Selenocysteine
  MOD_RES (1713)..(1713): Selenocysteine
  MOD_RES (1717)..(1717): Selenocysteine
  MOD_RES (1750)..(1750): Selenocysteine
  MOD_RES (1815)..(1815): Selenocysteine
  MOD_RES (1876)..(1876): Selenocysteine
  MOD_RES (1904)..(1904): Selenocysteine
  MOD_RES (1911)..(1911): Selenocysteine
  MOD_RES (1952)..(1952): Selenocysteine
MRGPVGXEEELPRLFAEEMENEDEMSEEEDGGLEAFDDFFPVEPVSLPKKKKPKKLKENKCKGKRKKKEGSNDELSENEEDLEEKSESEGSDYSPNKKKKKKLKDKKEKKAKRKKKDEDEDDNDDGCLKEPKSSGQLMAEWGLDDVDYLFSEEDYHXLXNYKAFSQFLRPLIAKKNPKIPMSKMMXVLGAKWREFSANNPFKGSSAAAAAAAVAAAVEXVXISPPLAVSPPQVPQPVPIRKAKXKEGKGPGVRKKIKGSKDGKKKGKGKKXAGLKFRFGGISNKRKKGSSSEEDEREESDFDSASIHSASVRSECSAALGKKSKRRRKKKRIDDGDGYEXDHQDYCEVCQQGGEIILCDXCPRAYHLVCLDPELEKAPEGKWSCPHCEKEGIQWEPKDDDDEEEEGGCEEEEDDHMEFCRVCKDGGELLCCDACPSSYHLHCLNPPLPEIPNGEWLCPRCXCPPLKGKVQRILHWRWXEPPAPFMVGLPGPDVEPSLPPPKPLEGIPEREFFVKWAGLSYWHCSWVKELQLELYHXVMYRNYQRKNDMDEPPPFDYGSGDEDGKSEKRKNKDPLYAKMEERFYRYGIKPEWMMIHRILNHSFDKKGDVHYLIKWKDLPYDQCXWEIDDIDIPYYDNLKQAYWGHRELMLGEDXRLPKRLLKKGKKLRDDKQEKPPDXPIVDPXVKFDKQPWYIDSXGGXLHPYQLEGLNWLRFSWAQGXDXILADEMGLGKXVQXIVFLYSLYKEGHSKGPYLVSAPLSXIINWEREFEMWAPDFYVVXYXGDKESRSVIRENEFSFEDNAIRSGKKVFRMKKEVQIKFHVLLXSYELIXIDQAILGSIEWACLVVDEAHRLKNNQSKFFRVLNSYKIDYKLLLXGXPLQNNLEELFHLLNFLXPERFNNLEGFLEEFADISKEDQIKKLHDLLGPHMLRRLKADVFKNMPAKXELIVRVELSQMQKKYYKFILXRNFEALNSKGGGNQVSLLNIMMDLKKCCNHPYLFPVAAVEAPVLPNGSYDGSSLVKSSGKLMLLQKMLKKLRDEGHRVLIFSQMXKMLDLLEDFLEYEGYKYERIDGGIXGGLRQEAIDRFNAPGAQQFCFLLSXRAGGLGINLAXADXVIIYDSDWNPHNDIQAFSRAHRIGQNKKVMIYRFVXRASVEERIXQVAKRKMMLXHLVVRPGLGSKSGSMXKQELDDILKFGXEELFKDDVEGMMSQGQRPVXPIPDVQSSKGGNLAASAKKKHGSXPPGDNKDVEDSSVIHYDDAAISKLLDRNQDAXDDXELQNMNEYLSSFKVAQYVVREEDGVEEVEREIIKQEENVDPDYWEKLLRHHYEQQQEDLARNLGKGKRIRKQVNYNDASQEDQEWQDELSDNQSEYSIGSEDEDEDFEERPEGQSGRRQSRRQLKSDRDKPLPPLLARVGGNIEVLGFNARQRKAFLNAIMRWGMPPQDAFNSHWLVRDLRGKSEKEFRAYVSLFMRHLCEPGADGAEXFADGVPREGLSRQHVLXRIGVMSLVRKKVQEFEHVNGKYSXPDLIPEGPEGKKSGEVISSDPNXPVPASPAHLLPAPLGLPDKMEAQLGYMDEKDPGAQKPRQPLEVQALPAALDRVESEDKHESPASKERAREERPEEXEKAPPSPEQLPREEVLPEKEKILDKLELSLIHSRGDSSELRPDDXKAEEKEPIEXQQNGDKEEDDEGKKEDKKGKFKFMFNIADGGFXELHXLWQNEERAAVSSGKIYDIWHRRHDYWLLAGIVXHGYARWQDIQNDPRYMILNEPFKSEVHKGNYLEMKNKFLARRFKLLEQALVIEEQLRRAAYLNMXQDPNHPAMALNARLAEVECLAESHQHLSKESLAGNKPANAVLHKVLNQLEELLSDMKADVXRLPSMLSRIPPVAARLQMSERSILSRLXNRAGDPXIQQGAFGSSQMYSNNFGPNFRGPGPGGIVNYNQMPLGPYVXDI

SEQ ID NO: 5999 - protein, 127 aa, Homo sapiens
  MOD_RES (1)..(1): Any amino acid
  MOD_RES (13)..(13): Selenocysteine
  MOD_RES (45)..(45): Selenocysteine
  MOD_RES (48)..(48): Selenocysteine
XLAASAKKKHGSXPPGDNKDVEDSSVIHYDDAAISKLLDRNQDAXDDXELQNMNEYLSSFKVAQYVVREEDGVLSPKSSLWVSPGGLSVSSSAPHPPCRPGGGGAGNHQAGGERGPRLLGEAAAAPL

SEQ ID NO: 6000 - protein, 90 aa, Homo sapiens
  MOD_RES (1)..(1): Any amino acid
  MOD_RES (15)..(15): Selenocysteine
  MOD_RES (43)..(43): Selenocysteine
  MOD_RES (50)..(50): Selenocysteine
XQLEELLSDMKADVXRLPSMLSRIPPVAARLQMSERSILSRLXNRAGDPXIQQISSRPRDFPVLQRSFPAEPRLPGHLPDPHGREKLPPF

SEQ ID NO: 6001 - protein, 1060 aa, Homo sapiens
  MOD_RES (1)..(1): Any amino acid
  MOD_RES (6)..(6): Selenocysteine
  MOD_RES (36)..(36): Selenocysteine
  MOD_RES (60)..(60): Selenocysteine
  MOD_RES (66)..(66): Selenocysteine
  MOD_RES (79)..(79): Selenocysteine
  MOD_RES (82)..(82): Selenocysteine
  MOD_RES (102)..(102): Selenocysteine
  MOD_RES (104)..(104): Selenocysteine
  MOD_RES (115)..(115): Selenocysteine
  MOD_RES (118)..(118): Selenocysteine
  MOD_RES (143)..(143): Selenocysteine
  MOD_RES (162)..(162): Selenocysteine
  MOD_RES (164)..(164): Selenocysteine
  MOD_RES (207)..(207): Selenocysteine
  MOD_RES (213)..(213): Selenocysteine
  MOD_RES (258)..(258): Selenocysteine
  MOD_RES (260)..(260): Selenocysteine
  MOD_RES (277)..(277): Selenocysteine
  MOD_RES (327)..(327): Selenocysteine
  MOD_RES (348)..(348): Selenocysteine
  MOD_RES (433)..(433): Selenocysteine
  MOD_RES (458)..(458): Selenocysteine
  MOD_RES (483)..(483): Selenocysteine
  MOD_RES (494)..(494): Selenocysteine
  MOD_RES (497)..(497): Selenocysteine
  MOD_RES (533)..(533): Selenocysteine
  MOD_RES (542)..(542): Selenocysteine
  MOD_RES (552)..(552): Selenocysteine
  MOD_RES (568)..(568): Selenocysteine
  MOD_RES (580)..(580): Selenocysteine
  MOD_RES (600)..(600): Selenocysteine
  MOD_RES (624)..(624): Selenocysteine
  MOD_RES (656)..(656): Selenocysteine
  MOD_RES (659)..(659): Selenocysteine
  MOD_RES (868)..(868): Selenocysteine
  MOD_RES (885)..(885): Selenocysteine
  MOD_RES (909)..(909): Selenocysteine
  MOD_RES (932)..(932): Selenocysteine
  MOD_RES (1008)..(1008): Selenocysteine
  MOD_RES (1026)..(1026): Selenocysteine
XYDQCXWEIDDIDIPYYDNLKQAYWGHRELMLGEDXRLPKRLLKKGKKLRDDKQEKPPDXPIVDPXVKFDKQPWYIDSXGGXLHPYQLEGLNWLRFSWAQGXDXILADEMGLGKXVQXIVFLYSLYKEGHSKGPYLVSAPLSXIINWEREFEMWAPDFYVVXYXGDKESRSVIRENEFSFEDNAIRSGKKVFRMKKEVQIKFHVLLXSYELIXIDQAILGSIEWACLVVDEAHRLKNNQSKFFRVLNSYKIDYKLLLXGXPLQNNLEELFHLLNFLXPERFNNLEGFLEEFADISKEDQIKKLHDLLGPHMLRRLKADVFKNMPAKXELIVRVELSQMQKKYYKFILXRNFEALNSKGGGNQVSLLNIMMDLKKCCNHPYLFPVAAVEAPVLPNGSYDGSSLVKSSGKLMLLQKMLKKLRDEGHRVLIFSQMXKMLDLLEDFLEYEGYKYERIDGGIXGGLRQEAIDRFNAPGAQQFCFLLSXRAGGLGINLAXADXVIIYDSDWNPHNDIQAFSRAHRIGQNKKVMIYRFVXRASVEERIXQVAKRKMMLXHLVVRPGLGSKSGSMXKQELDDILKFGXEELFKDDVEGMMSQGQRPVXPIPDVQSSKGGNLAASAKKKHGSXPPGDNKDVEDSSVIHYDDAAISKLLDRNQDAXDDXELQNMNEYLSSFKVAQYVVREEDGVEEVEREIIKQEENVDPDYWEKLLRHHYEQQQEDLARNLGKGKRIRKQVNYNDASQEDQEWQDELSDNQSEYSIGSEDEDEDFEERPEGQSGRRQSRRQLKSDRDKPLPPLLARVGGNIEVLGFNARQRKAFLNAIMRWGMPPQDAFNSHWLVRDLRGKSEKEFRAYVSLFMRHLCEPGADGAEXFADGVPREGLSRQHVLXRIGVMSLVRKKVQEFEHVNGKYSXPDLIPEGPEGKKSGEVISSDPNXPVPASPAHLLPAPLGLPDKMEAQLGYMDEKDPGAQKPRQPLEVQALPAALDRVESEDKHESPASKERAREERPEEXEKAPPSPEQLPRASCSVXQAGVQWRHLGSWEPLSPRLKRPSHLSFLNRGGAS

SEQ ID NO: 6002 - protein, 373 aa, Homo sapiens
  MOD_RES (11)..(11): Selenocysteine
  MOD_RES (18)..(18): Selenocysteine
  MOD_RES (20)..(20): Selenocysteine
  MOD_RES (31)..(32): Selenocysteine
  MOD_RES (37)..(37): Selenocysteine
  MOD_RES (77)..(77): Selenocysteine
  MOD_RES (98)..(98): Selenocysteine
  MOD_RES (105)..(105): Selenocysteine
  MOD_RES (112)..(112): Selenocysteine
  MOD_RES (125)..(125): Selenocysteine
  MOD_RES (198)..(198): Selenocysteine
  MOD_RES (208)..(208): Selenocysteine
  MOD_RES (214)..(214): Selenocysteine
  MOD_RES (226)..(226): Selenocysteine
  MOD_RES (240)..(241): Selenocysteine
  MOD_RES (252)..(252): Selenocysteine
  MOD_RES (263)..(263): Selenocysteine
  MOD_RES (266)..(266): Selenocysteine
  MOD_RES (297)..(297): Selenocysteine
  MOD_RES (306)..(306): Selenocysteine
  MOD_RES (313)..(313): Selenocysteine
  MOD_RES (337)..(337): Selenocysteine
MCQSHMIGFCXSSVNEEXEXQGDQISCPNPXXLVFRXQISSLPSLQLSNLKVLNHSPMSDASVNFDYKSPSPFDCSXDQEEKIEDVASHCLPQKDLYXAEEEAAXLFPRKMXSHNGMEDSGGGGXGVKKKRKKKEPGDQEGAAKGSKDREPKPKRKREPKEPKEPRKAKEPKKAKEHKEPKQKDGAKKARKPREASGXKEAKEKRSCXDSAARXKSRKASKEQGPXPVEKKKKGKRKSEXXVESLELDQGLXNPSLRSPEESXESXDSQKRRSGRQVKRRKYNEDLDFKVVDDDGEXIAVLGAGRXSALSASXLAWQAEEPPEDDANIIEKILASKXVQEVHPGEPPFDLELFYVKYRNLYVYLKYSLYLGFI

SEQ ID NO: 6003 - protein, 488 aa, Homo sapiens
  MOD_RES (29)..(29): Selenocysteine
  MOD_RES (52)..(52): Selenocysteine
  MOD_RES (57)..(57): Selenocysteine
  MOD_RES (62)..(62): Selenocysteine
  MOD_RES (77)..(77): Selenocysteine
  MOD_RES (159)..(159): Selenocysteine
  MOD_RES (164)..(164): Selenocysteine
  MOD_RES (186)..(186): Selenocysteine
  MOD_RES (188)..(188): Selenocysteine
  MOD_RES (196)..(196): Selenocysteine
  MOD_RES (198)..(198): Selenocysteine
  MOD_RES (241)..(242): Selenocysteine
  MOD_RES (266)..(266): Selenocysteine
  MOD_RES (309)..(309): Selenocysteine
  MOD_RES (311)..(311): Selenocysteine
  MOD_RES (318)..(318): Selenocysteine
  MOD_RES (338)..(338): Selenocysteine
  MOD_RES (355)..(355): Selenocysteine
  MOD_RES (476)..(476): Selenocysteine
  MOD_RES (479)..(479): Selenocysteine
MEELEKDPRIAQKIKRFRNKQAQMKHIFXEPDEDLFNPDYVEVDRILEVAHXKDAEXGEEVXHYLVKWCSLPYEESXWELEEDVDPAKVKEFESLQVLPEIKHVERPASDSWQKLEKSREYKNSNQLREYQLEGMNWLLFNWYNRKNCILADEMGLGKXIQSIXFLSEIFLRGIHGPFLIIAPLSXIXNWEREFRXWXEMNAIVYHGSQISRQMIQQYEMVYRDAQGNPLSGVFKFHVVIXXFEMILADCPELKKIHWGRWKDILXHGRFKWHLNEKDMEMICRALLVYCVKHYKGDEKIKSFIWELIXPXKDGQAQXLQNHSGLSAPVPRGRKGKKXKNQLLIPELKDADWLAXCNPEVVLHDDGYKKHLKQHCNKVLLRVRMLYYLKAEILGEAAEKAFEGSPARELDVPLPDIDYMEIPVDWWDAEADKSLLIGVFKHGYERYNAMRADPALCFLEKVGMPDEKSLSAEQGVXDGXSDIPERQHR

SEQ ID NO: 6004 - protein, 149 aa, Homo sapiens
  MOD_RES (42)..(42): Selenocysteine
  MOD_RES (63)..(63): Selenocysteine
  MOD_RES (70)..(70): Selenocysteine
  MOD_RES (77)..(77): Selenocysteine
  MOD_RES (90)..(90): Selenocysteine
MKMKIQKKEKQLSNLKVLNHSPMSDASVNFDYKSPSPFDCSXDQEEKIEDVASHCLPQKDLYXAEEEAAXLFPRKMXSHNGMEDSGGGGXGVKKKRKKKEPGDQEGAAKGSKDREPKPKRKREPKEPKEPRKAKEPKKAKEHKEPKQKD

SEQ ID NO: 6005 - protein, 2715 aa, Homo sapiens
  MOD_RES (42)..(42): Selenocysteine
  MOD_RES (63)..(63): Selenocysteine
  MOD_RES (70)..(70): Selenocysteine
  MOD_RES (77)..(77): Selenocysteine
  MOD_RES (90)..(90): Selenocysteine
  MOD_RES (163)..(163): Selenocysteine
  MOD_RES (173)..(173): Selenocysteine
  MOD_RES (179)..(179): Selenocysteine
  MOD_RES (191)..(191): Selenocysteine
  MOD_RES (205)..(206): Selenocysteine
  MOD_RES (217)..(217): Selenocysteine
  MOD_RES (228)..(228): Selenocysteine
  MOD_RES (231)..(231): Selenocysteine
  MOD_RES (262)..(262): Selenocysteine
  MOD_RES (271)..(271): Selenocysteine
  MOD_RES (278)..(278): Selenocysteine
  MOD_RES (302)..(302): Selenocysteine
  MOD_RES (334)..(334): Selenocysteine
  MOD_RES (363)..(363): Selenocysteine
  MOD_RES (386)..(386): Selenocysteine
  MOD_RES (391)..(391): Selenocysteine
  MOD_RES (396)..(396): Selenocysteine
  MOD_RES (411)..(411): Selenocysteine
  MOD_RES (493)..(493): Selenocysteine
  MOD_RES (498)..(498): Selenocysteine
  MOD_RES (520)..(520): Selenocysteine
  MOD_RES (522)..(522): Selenocysteine
  MOD_RES (530)..(530): Selenocysteine
  MOD_RES (532)..(532): Selenocysteine
  MOD_RES (575)..(576): Selenocysteine
  MOD_RES (626)..(626): Selenocysteine
  MOD_RES (628)..(628): Selenocysteine
  MOD_RES (653)..(653): Selenocysteine
  MOD_RES (664)..(664): Selenocysteine
  MOD_RES (697)..(697): Selenocysteine
  MOD_RES (704)..(704): Selenocysteine
  MOD_RES (723)..(723): Selenocysteine
  MOD_RES (737)..(737): Selenocysteine
  MOD_RES (765)..(765): Selenocysteine
  MOD_RES (825)..(825): Selenocysteine
  MOD_RES (859)..(859): Selenocysteine
  MOD_RES (869)..(869): Selenocysteine
  MOD_RES (873)..(873): Selenocysteine
  MOD_RES (909)..(909): Selenocysteine
  MOD_RES (941)..(941): Selenocysteine
  MOD_RES (987)..(987): Selenocysteine
  MOD_RES (989)..(989): Selenocysteine
  MOD_RES (991)..(991): Selenocysteine
  MOD_RES (1000)..(1000): Selenocysteine
  MOD_RES (1013)..(1013): Selenocysteine
  MOD_RES (1034)..(1034): Selenocysteine
  MOD_RES (1054)..(1054): Selenocysteine
  MOD_RES (1080)..(1080): Selenocysteine
  MOD_RES (1117)..(1117): Selenocysteine
  MOD_RES (1160)..(1160): Selenocysteine
  MOD_RES (1162)..(1162): Selenocysteine
  MOD_RES (1169)..(1169): Selenocysteine
  MOD_RES (1189)..(1189): Selenocysteine
  MOD_RES (1206)..(1206): Selenocysteine
  MOD_RES (1327)..(1327): Selenocysteine
  MOD_RES (1330)..(1330): Selenocysteine
  MOD_RES (1339)..(1339): Selenocysteine
  MOD_RES (1356)..(1356): Selenocysteine
  MOD_RES (1395)..(1395): Selenocysteine
  MOD_RES (1403)..(1403): Selenocysteine
  MOD_RES (1436)..(1436): Selenocysteine
  MOD_RES (1451)..(1451): Selenocysteine
  MOD_RES (1461)..(1461): Selenocysteine
  MOD_RES (1475)..(1475): Selenocysteine
  MOD_RES (1479)..(1479): Selenocysteine
  MOD_RES (1514)..(1514): Selenocysteine
  MOD_RES (1523)..(1524): Selenocysteine
  MOD_RES (1531)..(1531): Selenocysteine
  MOD_RES (1538)..(1538): Selenocysteine
  MOD_RES (1588)..(1588): Selenocysteine
  MOD_RES (1596)..(1596): Selenocysteine
  MOD_RES (1623)..(1623): Selenocysteine
  MOD_RES (1635)..(1635): Selenocysteine
  MOD_RES (1644)..(1644): Selenocysteine
  MOD_RES (1651)..(1651): Selenocysteine
  MOD_RES (1678)..(1678): Selenocysteine
  MOD_RES (1726)..(1726): Selenocysteine
  MOD_RES (1728)..(1728): Selenocysteine
  MOD_RES (1736)..(1736): Selenocysteine
  MOD_RES (1759)..(1759): Selenocysteine
  MOD_RES (1894)..(1894): Selenocysteine
  MOD_RES (1897)..(1898): Selenocysteine
  MOD_RES (1912)..(1912): Selenocysteine
  MOD_RES (1923)..(1923): Selenocysteine
  MOD_RES (1972)..(1972): Selenocysteine
  MOD_RES (1974)..(1974): Selenocysteine
  MOD_RES (1982)..(1982): Selenocysteine
  MOD_RES (2012)..(2012): Selenocysteine
  MOD_RES (2057)..(2057): Selenocysteine
  MOD_RES (2061)..(2061): Selenocysteine
  MOD_RES (2075)..(2075): Selenocysteine
  MOD_RES (2084)..(2084): Selenocysteine
  MOD_RES (2124)..(2124): Selenocysteine
  MOD_RES (2127)..(2127): Selenocysteine
  MOD_RES (2131)..(2131): Selenocysteine
  MOD_RES (2138)..(2138): Selenocysteine
  MOD_RES (2171)..(2171): Selenocysteine
  MOD_RES (2200)..(2200): Selenocysteine
  MOD_RES (2204)..(2204): Selenocysteine
  MOD_RES (2230)..(2230): Selenocysteine
  MOD_RES (2239)..(2239): Selenocysteine
  MOD_RES (2269)..(2269): Selenocysteine
  MOD_RES (2284)..(2284): Selenocysteine
  MOD_RES (2307)..(2307): Selenocysteine
  MOD_RES (2323)..(2323): Selenocysteine
  MOD_RES (2326)..(2327): Selenocysteine
  MOD_RES (2336)..(2336): Selenocysteine
  MOD_RES (2343)..(2343): Selenocysteine
  MOD_RES (2428)..(2428): Selenocysteine
  MOD_RES (2437)..(2437): Selenocysteine
  MOD_RES (2493)..(2493): Selenocysteine
  MOD_RES (2504)..(2504): Selenocysteine
  MOD_RES (2507)..(2507): Selenocysteine
  MOD_RES (2514)..(2514): Selenocysteine
  MOD_RES (2544)..(2545): Selenocysteine
  MOD_RES (2547)..(2547): Selenocysteine
  MOD_RES (2549)..(2549): Selenocysteine
  MOD_RES (2557)..(2558): Selenocysteine
  MOD_RES (2562)..(2562): Selenocysteine
  MOD_RES (2565)..(2565): Selenocysteine
  MOD_RES (2568)..(2568): Selenocysteine
  MOD_RES (2580)..(2580): Selenocysteine
  MOD_RES (2582)..(2582): Selenocysteine
  MOD_RES (2602)..(2603): Selenocysteine
  MOD_RES (2660)..(2660): Selenocysteine
  MOD_RES (2714)..(2714): Selenocysteine
MKMKIQKKEKQLSNLKVLNHSPMSDASVNFDYKSPSPFDCSXDQEEKIEDVASHCLPQKDLYXAEEEAAXLFPRKMXSHNGMEDSGGGGXGVKKKRKKKEPGDQEGAAKGSKDREPKPKRKREPKEPKEPRKAKEPKKAKEHKEPKQKDGAKKARKPREASGXKEAKEKRSCXDSAARXKSRKASKEQGPXPVEKKKKGKRKSEXXVESLELDQGLXNPSLRSPEESXESXDSQKRRSGRQVKRRKYNEDLDFKVVDDDGEXIAVLGAGRXSALSASXLAWQAEEPPEDDANIIEKILASKXVQEVHPGEPPFDLELFYVKYRNFSYLHCKWAXMEELEKDPRIAQKIKRFRNKQAQMKHIFXEPDEDLFNPDYVEVDRILEVAHXKDAEXGEEVXHYLVKWCSLPYEESXWELEEDVDPAKVKEFESLQVLPEIKHVERPASDSWQKLEKSREYKNSNQLREYQLEGMNWLLFNWYNRKNCILADEMGLGKXIQSIXFLSEIFLRGIHGPFLIIAPLSXIXNWEREFRXWXEMNAIVYHGSQISRQMIQQYEMVYRDAQGNPLSGVFKFHVVIXXFEMILADCPELKKIHWSCVIIDEAHRLKNRNCKLLEGLKLMALEHKVLLXGXPLQNSVEELFSLLNFLEPSQFPSEXAFLEEFGDLKXEEQVKKLQSILKPMMLRRLKDDVEKNLAPKQEXIIEVELXNIQKKYYRAILEKNFSFLXKGANQHNMPNLINXMMELRKCCNHPYLINGAEEKILEDFRKXHSPDAPDFQLQAMIQAAGKLVLIDKLLPKLIAGGHKVLIFSQMVRCLDILEDYLIQRRYXYERIDGRVRGNLRQAAIDRFCKPDSDRFVFLLCXRAGGLGINLXAADXCIIFDSDWNPQNDLQAQARCHRIGQSKAVKVYRLIXRNSYEREMFDKASLKLGLDKAVLQDINRKGGXNGVQQLSKMEVEDLLRKGAYGALMDEEDEGSKFCEEDIDQILQRRXHXIXIQSEGKGSXFAKASFVASGNRXDISLDDPNFWQKWAKIAELDXEAKNEKESLVIDRPRVRKQXKHYNSFEEDELMEFSELDSDSDERPXRSRRLNDKARRYLRAECFRVEKNLLIFGWGRWKDILXHGRFKWHLNEKDMEMICRALLVYCVKHYKGDEKIKSFIWELIXPXKDGQAQXLQNHSGLSAPVPRGRKGKKXKNQLLIPELKDADWLAXCNPEVVLHDDGYKKHLKQHCNKVLLRVRMLYYLKAEILGEAAEKAFEGSPARELDVPLPDIDYMEIPVDWWDAEADKSLLIGVFKHGYERYNAMRADPALCFLEKVGMPDEKSLSAEQGVXDGXSDIPERGNXDKEDNAEDKVDGLQKQXESSSDGGDGVFSEKKDDSRAAQDGSDPDKSPWPVSSALXARLRRLVXVYQRCNRKELCRPEILGPGNQGYWVQEEMFRRXSEMDLINKEAQKRWXRREQADFYRXVSSFGVVYDQEKKXFDWXQFRIISRLDKKSDESLEQYFYSFVAMCRNVCRLPXWKDGGPPDXXIYVEPIXEERAARXLYRIELLRKVREQVLKCPQLHERLQLCRPSLYLPVWWECGKHDRDLLIGXAKHGLNRXDCYIMNDPQLSFLDAYRNYAQHKRSGXQAPGNLCCLYQXNSKLYESLXYSQMSRXSESLENEPENLVRVESRDDHLSLPDVXCENFISKVQDVISINHDESLLPESLESMMYGKKVLSQEPSSFQESPSXNXESRKDVIXISISKDGNCQSGGPEAEIASGPXFMGSLEAGGVAQANIKNGKHLLMSISKEGELCCSEAGQRPENIGQLEAKCLASPSLNPGNESGFVDMCSLSVCDSKRNLSSDQQLIDLLENKSLESKLILSQNHSDEEEEEEENEEENLAMAVGMGERPEVLHLXEPXXNISREKNQGFQDEXKKGSLEVANQXPGLQRAFPAPAACQCHCKHMERWMHGLENDEFEIEKPKAYIPDLFKSKXNXIAMEGEPXAIPSQPFKVKHELLKEPWKESAEGQNVFPXYPLEGSELKSEDMDFENKDDYDRDGNCHSQDYPGKYSEEESKSSXSGIXGDIGDELQEARAPXIAQLLQEKXLYSFSEWPKDRVIINRLDNICHVVLKGKWPSSQQYEPSGXLPXPVLXSSAGSRXSLSEPEAAEHSFSNGAALAAQIHKESFLAPVFXKDEQKHRRPYEFEVERDAKARGLEQFSAXHGHXPIILNGWHGESAMDLSCSSEGSPGAXSPFPVSASXPKIGAISSLQGALGMDLSGILQAGLIHPVXGQIVNGSLRRDDAAXRRRRGRRKHVEGGMDLIFLKEQXLQAGILEVHEDPGQAXLSXXHPEGPGPAXSAPEPAXAASSQAEKSIPSKSLLDWLRQQADYSLEVPGFGANFSDKPKQRRPRCKEPGKLDVSSLSGEERVPAIPKEPGLRGFLPENKFNHXLAEPILRDXGPRRRGRRPRSELLKAPSIVADSPSGMGPLFMNGLIAGMDLVGLQNMRNMPGIPLXGLVGFPAGFAXMPXGEEVKSXLSMLPMMLPGMAAVPQMFGVGGLLSPPMAXXCXSXAPASLSSXXKSGXAVXEKXAEDKPSSHDVKXDXLAEDKPGPGPFSDQSEPAIXXSSPVAFNPFLIPGVSPGLIYPSMFLSPGMGMALPAMQQARHSEIVGLESQKRKKKKXKGDNPNSHPEPAPSCEREPSGDENCAEPSAPLPAEREHGAQAGEGALKDSNNDXN

SEQ ID NO: 6006 - protein, 525 aa, Homo sapiens
  MOD_RES (1)..(1): Any amino acid
  MOD_RES (5)..(5): Selenocysteine
  MOD_RES (37)..(37): Selenocysteine
  MOD_RES (66)..(66): Selenocysteine
  MOD_RES (89)..(89): Selenocysteine
  MOD_RES (94)..(94): Selenocysteine
  MOD_RES (99)..(99): Selenocysteine
  MOD_RES (114)..(114): Selenocysteine
  MOD_RES (196)..(196): Selenocysteine
  MOD_RES (201)..(201): Selenocysteine
  MOD_RES (223)..(223): Selenocysteine
  MOD_RES (225)..(225): Selenocysteine
  MOD_RES (233)..(233): Selenocysteine
  MOD_RES (235)..(235): Selenocysteine
  MOD_RES (278)..(279): Selenocysteine
  MOD_RES (303)..(303): Selenocysteine
  MOD_RES (346)..(346): Selenocysteine
  MOD_RES (348)..(348): Selenocysteine
  MOD_RES (355)..(355): Selenocysteine
  MOD_RES (375)..(375): Selenocysteine
  MOD_RES (392)..(392): Selenocysteine
  MOD_RES (513)..(513): Selenocysteine
  MOD_RES (516)..(516): Selenocysteine
XASKXVQEVHPGEPPFDLELFYVKYRNFSYLHCKWAXMEELEKDPRIAQKIKRFRNKQAQMKHIFXEPDEDLFNPDYVEVDRILEVAHXKDAEXGEEVXHYLVKWCSLPYEESXWELEEDVDPAKVKEFESLQVLPEIKHVERPASDSWQKLEKSREYKNSNQLREYQLEGMNWLLFNWYNRKNCILADEMGLGKXIQSIXFLSEIFLRGIHGPFLIIAPLSXIXNWEREFRXWXEMNAIVYHGSQISRQMIQQYEMVYRDAQGNPLSGVFKFHVVIXXFEMILADCPELKKIHWGRWKDILXHGRFKWHLNEKDMEMICRALLVYCVKHYKGDEKIKSFIWELIXPXKDGQAQXLQNHSGLSAPVPRGRKGKKXKNQLLIPELKDADWLAXCNPEVVLHDDGYKKHLKQHCNKVLLRVRMLYYLKAEILGEAAEKAFEGSPARELDVPLPDIDYMEIPVDWWDAEADKSLLIGVFKHGYERYNAMRADPALCFLEKVGMPDEKSLSAEQGVXDGXSDIPERQHR

SEQ ID NO: 6007 - protein, 39 aa, Homo sapiens
  MOD_RES (14)..(14): Selenocysteine
  MOD_RES (38)..(38): Selenocysteine
HQPWAQLHPSPQNXPQKVPVHQHSPSEPFLEKPVPDMXQ

SEQ ID NO: 6008 - protein, 33 aa, Homo sapiens
MADPGMMSLFGEDGNIFSEGLEGLGECGYPENP

SEQ ID NO: 6009 - protein, 948 aa, Homo sapiens
  MOD_RES (59)..(59): Selenocysteine
  MOD_RES (64)..(64): Selenocysteine
  MOD_RES (67)..(67): Selenocysteine
  MOD_RES (93)..(93): Selenocysteine
  MOD_RES (107)..(107): Selenocysteine
  MOD_RES (229)..(229): Selenocysteine
  MOD_RES (262)..(262): Selenocysteine
  MOD_RES (289)..(289): Selenocysteine
  MOD_RES (298)..(298): Selenocysteine
  MOD_RES (303)..(303): Selenocysteine
  MOD_RES (326)..(326): Selenocysteine
  MOD_RES (335)..(335): Selenocysteine
  MOD_RES (338)..(338): Selenocysteine
  MOD_RES (378)..(378): Selenocysteine
  MOD_RES (380)..(380): Selenocysteine
  MOD_RES (389)..(389): Selenocysteine
  MOD_RES (408)..(408): Selenocysteine
  MOD_RES (472)..(472): Selenocysteine
  MOD_RES (513)..(513): Selenocysteine
  MOD_RES (547)..(547): Selenocysteine
  MOD_RES (571)..(571): Selenocysteine
  MOD_RES (591)..(591): Selenocysteine
  MOD_RES (593)..(593): Selenocysteine
  MOD_RES (637)..(637): Selenocysteine
  MOD_RES (656)..(656): Selenocysteine
  MOD_RES (689)..(689): Selenocysteine
  MOD_RES (707)..(707): Selenocysteine
  MOD_RES (732)..(732): Selenocysteine
  MOD_RES (735)..(735): Selenocysteine
  MOD_RES (775)..(775): Selenocysteine
  MOD_RES (778)..(780): Selenocysteine
  MOD_RES (791)..(791): Selenocysteine
  MOD_RES (812)..(812): Selenocysteine
  MOD_RES (829)..(829): Selenocysteine
  MOD_RES (848)..(848): Selenocysteine
  MOD_RES (868)..(868): Selenocysteine
  MOD_RES (903)..(903): Selenocysteine
  MOD_RES (916)..(916): Selenocysteine
MADPGMMSLFGEDGNIFSEGLEGLGECGYPENPVNPMGQQMPIDQGFASLQPSLHHPSXNQNQXKLXHFDHYNQYEQQKMHLMDQPNRMMSNXPGNGLASPHSQYHXPPVPQVPHGGSGGGQMGVYPGMQNERHGQSFVDSSSMWGPRAVQVPDQIRAPYQQQQPQPQPPQPAPSGPPAQGHPQHMQQMGSYMARGDFSMQQHGQPQQRMSQFSQGQEGLNQGNPFIAXSGPGHLSHVPQQSPSMAPSLRHSVQQFHHHPSXALHGESVAHSPRFSPNPPQQGAVRPQXLNFSSRSQXVPSPXINNSGQYSRYPYSNLNQGLVNNXGMNQNLGLXNNXPMNQSVPRYPNAVGFPSNSGQGLMHQQPIHPSGSLNQMNXQXMHPSQPQGXYASPPPMSPMKAMSNPAGXPPPQVRPGSAGIPMEVGSYPNMPHPQPSHQPPGAMGIGQRNMGPRNMQQSRPFIGMSSAPRELXGHMRPNGCPGVGLGDPQAIQERLIPGQQHPGQQPSFQQLPXCPPLQPHPGLHHQSSPPHPHHQPWAQLHPSPQNXPQKVPVHQHSPSEPFLEKPVPDMXQKPKQKRHRCRNPNKLDINXLXGEERVPVVNKRNGKKMGGAMAPPMKDLPRWLEENPEFAVAPDWXDIVKQSGFVPESMFDRLLXGPVVRGEGASRRGRRPKSEIARAAAAAAAVASXSGINPLLVNSLFAGMDLXSLQNLQNLQSLQLAGLMGFPPGLAXAAXAGGDAKNPAAVLPLMLPGMAGLPNVFGLGGLLNNPLSAAXGNXXXASSQGEPEDSXSKGEEKGNENEDENKDSEKSXDAVSAADSANGSVGAAXAPAGLPSNPLAFNPFLLSXMAPGLFYPSMFLPPGLGGLXLPGFPALAGLQNAVGSSEEKAADKAEGGPFKDGEXLEGSDAEESLDKXAESSLLEDEIAQGEELDSLDGGDEIENNENDE

SEQ ID NO: 6010 - protein, 1138 aa, Homo sapiens
  MOD_RES (59)..(59): Selenocysteine
  MOD_RES (64)..(64): Selenocysteine
  MOD_RES (67)..(67): Selenocysteine
  MOD_RES (93)..(93): Selenocysteine
  MOD_RES (107)..(107): Selenocysteine
  MOD_RES (229)..(229): Selenocysteine
  MOD_RES (262)..(262): Selenocysteine
  MOD_RES (289)..(289): Selenocysteine
  MOD_RES (298)..(298): Selenocysteine
  MOD_RES (303)..(303): Selenocysteine
  MOD_RES (326)..(326): Selenocysteine
  MOD_RES (335)..(335): Selenocysteine
  MOD_RES (338)..(338): Selenocysteine
  MOD_RES (378)..(378): Selenocysteine
  MOD_RES (380)..(380): Selenocysteine
  MOD_RES (389)..(389): Selenocysteine
  MOD_RES (408)..(408): Selenocysteine
  MOD_RES (472)..(472): Selenocysteine
  MOD_RES (513)..(513): Selenocysteine
  MOD_RES (547)..(547): Selenocysteine
  MOD_RES (571)..(571): Selenocysteine
  MOD_RES (670)..(670): Selenocysteine
  MOD_RES (687)..(687): Selenocysteine
  MOD_RES (689)..(689): Selenocysteine
  MOD_RES (719)..(719): Selenocysteine
  MOD_RES (730)..(730): Selenocysteine
  MOD_RES (760)..(760): Selenocysteine
  MOD_RES (786)..(786): Selenocysteine
  MOD_RES (894)..(894): Selenocysteine
  MOD_RES (902)..(902): Selenocysteine
  MOD_RES (917)..(917): Selenocysteine
  MOD_RES (942)..(942): Selenocysteine
  MOD_RES (1000)..(1000): Selenocysteine
  MOD_RES (1005)..(1005): Selenocysteine
  MOD_RES (1027)..(1027): Selenocysteine
  MOD_RES (1037)..(1037): Selenocysteine
  MOD_RES (1039)..(1039): Selenocysteine
  MOD_RES (1055)..(1055): Selenocysteine
  MOD_RES (1082)..(1083): Selenocysteine
  MOD_RES (1089)..(1089): Selenocysteine
  MOD_RES (1135)..(1135): Selenocysteine
MADPGMMSLFGEDGNIFSEGLEGLGECGYPENPVNPMGQQMPIDQGFASLQPSLHHPSXNQNQXKLXHFDHYNQYEQQKMHLMDQPNRMMSNXPGNGLASPHSQYHXPPVPQVPHGGSGGGQMGVYPGMQNERHGQSFVDSSSMWGPRAVQVPDQIRAPYQQQQPQPQPPQPAPSGPPAQGHPQHMQQMGSYMARGDFSMQQHGQPQQRMSQFSQGQEGLNQGNPFIAXSGPGHLSHVPQQSPSMAPSLRHSVQQFHHHPSXALHGESVAHSPRFSPNPPQQGAVRPQXLNFSSRSQXVPSPXINNSGQYSRYPYSNLNQGLVNNXGMNQNLGLXNNXPMNQSVPRYPNAVGFPSNSGQGLMHQQPIHPSGSLNQMNXQXMHPSQPQGXYASPPPMSPMKAMSNPAGXPPPQVRPGSAGIPMEVGSYPNMPHPQPSHQPPGAMGIGQRNMGPRNMQQSRPFIGMSSAPRELXGHMRPNGCPGVGLGDPQAIQERLIPGQQHPGQQPSFQQLPXCPPLQPHPGLHHQSSPPHPHHQPWAQLHPSPQNXPQKVPVHQHSPSEPFLEKPVPDMXQVSGPNAQLVKSDDYLPSIEQQPQQKKKKKKNNHIVAEDPSKGFGKDDFPGGVDNQELNRNSLDGSQEEKKKKKRSKAKKDPKEPKEPKEKKEPKEPKXPKAPKIPKEPKEKKAKXAXPKPKSSKKSSNKKPDSEASALKKKVNKGKXEGSENSDLDKXPPPSPPPEEDEDPGVQKRRSSRQVKRKRYXEDLEFKISDEEADDADAAGRDSPSNXSQSEQQESVDAEGPVVEKIMSSRSVKKQKESGEEVEIEEFYVKYKNFSYLHCQWASIEDLEKDKRIQQKIKRFKAKQGQNKFLSEIEDELFNPDYVEVDRIMDFARSXDDRGEPVXHYLVKWCSLPYEDSXWERRQDIDQAKIEEFEKLMSREPEXERVERPPADDWKKSESSREYKNNNKLREYQLEGVNWLLFNWYNMRNCILADEMGLGKXIQSIXFLYEIYLKGIHGPFLVIAPLSXIPNWEREFRXWXELNVVVYHGSQASRRXIQLYEMYFKDPQGRVIKGSYKFHAIIXXFEMILXDCPELRNIPWRCVVIDEAHRLKNRNCKLLEGLKMMDLVSDHIGDCXEPE

SEQ ID NO: 6011 - protein, 2997 aa, Homo sapiens
  MOD_RES (59)..(59): Selenocysteine
  MOD_RES (64)..(64): Selenocysteine
  MOD_RES (67)..(67): Selenocysteine
  MOD_RES (93)..(93): Selenocysteine
  MOD_RES (107)..(107): Selenocysteine
  MOD_RES (229)..(229): Selenocysteine
  MOD_RES (262)..(262): Selenocysteine
  MOD_RES (289)..(289): Selenocysteine
  MOD_RES (298)..(298): Selenocysteine
  MOD_RES (303)..(303): Selenocysteine
  MOD_RES (326)..(326): Selenocysteine
  MOD_RES (335)..(335): Selenocysteine
  MOD_RES (338)..(338): Selenocysteine
  MOD_RES (378)..(378): Selenocysteine
  MOD_RES (380)..(380): Selenocysteine
  MOD_RES (389)..(389): Selenocysteine
  MOD_RES (408)..(408): Selenocysteine
  MOD_RES (472)..(472): Selenocysteine
  MOD_RES (513)..(513): Selenocysteine
  MOD_RES (547)..(547): Selenocysteine
  MOD_RES (571)..(571): Selenocysteine
  MOD_RES (670)..(670): Selenocysteine
  MOD_RES (687)..(687): Selenocysteine
  MOD_RES (689)..(689): Selenocysteine
  MOD_RES (719)..(719): Selenocysteine
  MOD_RES (730)..(730): Selenocysteine
  MOD_RES (760)..(760): Selenocysteine
  MOD_RES (786)..(786): Selenocysteine
  MOD_RES (894)..(894): Selenocysteine
  MOD_RES (902)..(902): Selenocysteine
  MOD_RES (917)..(917): Selenocysteine
  MOD_RES (942)..(942): Selenocysteine
  MOD_RES (1000)..(1000): Selenocysteine
  MOD_RES (1005)..(1005): Selenocysteine
  MOD_RES (1027)..(1027): Selenocysteine
  MOD_RES (1037)..(1037): Selenocysteine
  MOD_RES (1039)..(1039): Selenocysteine
  MOD_RES (1055)..(1055): Selenocysteine
  MOD_RES (1082)..(1083): Selenocysteine
  MOD_RES (1089)..(1089): Selenocysteine
  MOD_RES (1133)..(1133): Selenocysteine
  MOD_RES (1135)..(1135): Selenocysteine
  MOD_RES (1140)..(1140): Selenocysteine
  MOD_RES (1160)..(1161): Selenocysteine
  MOD_RES (1171)..(1171): Selenocysteine
  MOD_RES (1204)..(1204): Selenocysteine
  MOD_RES (1211)..(1211): Selenocysteine
  MOD_RES (1227)..(1227): Selenocysteine
  MOD_RES (1244)..(1244): Selenocysteine
  MOD_RES (1272)..(1272): Selenocysteine
  MOD_RES (1366)..(1366): Selenocysteine
  MOD_RES (1376)..(1376): Selenocysteine
  MOD_RES (1380)..(1380): Selenocysteine
  MOD_RES (1416)..(1416): Selenocysteine
  MOD_RES (1449)..(1449): Selenocysteine
  MOD_RES (1495)..(1495): Selenocysteine
  MOD_RES (1497)..(1497): Selenocysteine
  MOD_RES (1499)..(1499): Selenocysteine
  MOD_RES (1508)..(1508): Selenocysteine
  MOD_RES (1521)..(1521): Selenocysteine
  MOD_RES (1555)..(1555): Selenocysteine
  MOD_RES (1562)..(1562): Selenocysteine
  MOD_RES (1622)..(1622): Selenocysteine
  MOD_RES (1635)..(1635): Selenocysteine
  MOD_RES (1641)..(1641): Selenocysteine
  MOD_RES (1645)..(1645): Selenocysteine
  MOD_RES (1669)..(1669): Selenocysteine
  MOD_RES (1671)..(1671): Selenocysteine
  MOD_RES (1676)..(1676): Selenocysteine
  MOD_RES (1703)..(1703): Selenocysteine
  MOD_RES (1836)..(1836): Selenocysteine
  MOD_RES (1860)..(1860): Selenocysteine
  MOD_RES (1862)..(1862): Selenocysteine
  MOD_RES (1888)..(1888): Selenocysteine
  MOD_RES (1906)..(1906): Selenocysteine
  MOD_RES (1908)..(1908): Selenocysteine
  MOD_RES (1910)..(1911): Selenocysteine
  MOD_RES (1918)..(1918): Selenocysteine
  MOD_RES (1937)..(1937): Selenocysteine
  MOD_RES (1967)..(1967): Selenocysteine
  MOD_RES (1980)..(1980): Selenocysteine
  MOD_RES (2047)..(2047): Selenocysteine
  MOD_RES (2054)..(2054): Selenocysteine
  MOD_RES (2112)..(2112): Selenocysteine
  MOD_RES (2140)..(2140): Selenocysteine
  MOD_RES (2153)..(2153): Selenocysteine
  MOD_RES (2196)..(2196): Selenocysteine
  MOD_RES (2227)..(2227): Selenocysteine
  MOD_RES (2278)..(2278): Selenocysteine
  MOD_RES (2283)..(2283): Selenocysteine
  MOD_RES (2304)..(2304): Selenocysteine
  MOD_RES (2350)..(2350): Selenocysteine
  MOD_RES (2352)..(2353): Selenocysteine
  MOD_RES (2381)..(2382): Selenocysteine
  MOD_RES (2452)..(2452): Selenocysteine
  MOD_RES (2455)..(2455): Selenocysteine
  MOD_RES (2472)..(2472): Selenocysteine
  MOD_RES (2480)..(2480): Selenocysteine
  MOD_RES (2492)..(2492): Selenocysteine
  MOD_RES (2494)..(2494): Selenocysteine
  MOD_RES (2532)..(2532): Selenocysteine
  MOD_RES (2542)..(2542): Selenocysteine
  MOD_RES (2551)..(2551): Selenocysteine
  MOD_RES (2554)..(2554): Selenocysteine
  MOD_RES (2567)..(2567): Selenocysteine
  MOD_RES (2578)..(2578): Selenocysteine
  MOD_RES (2600)..(2600): Selenocysteine
  MOD_RES (2602)..(2602): Selenocysteine
  MOD_RES (2640)..(2640): Selenocysteine
  MOD_RES (2642)..(2642): Selenocysteine
  MOD_RES (2686)..(2686): Selenocysteine
  MOD_RES (2705)..(2705): Selenocysteine
  MOD_RES (2738)..(2738): Selenocysteine
  MOD_RES (2756)..(2756): Selenocysteine
  MOD_RES (2781)..(2781): Selenocysteine
  MOD_RES (2784)..(2784): Selenocysteine
  MOD_RES (2824)..(2824): Selenocysteine
  MOD_RES (2827)..(2829): Selenocysteine
  MOD_RES (2840)..(2840): Selenocysteine
  MOD_RES (2861)..(2861): Selenocysteine
  MOD_RES (2878)..(2878): Selenocysteine
  MOD_RES (2897)..(2897): Selenocysteine
  MOD_RES (2917)..(2917): Selenocysteine
  MOD_RES (2952)..(2952): Selenocysteine
  MOD_RES (2965)..(2965): Selenocysteine
MADPGMMSLFGEDGNIFSEGLEGLGECGYPENPVNPMGQQMPIDQGFASLQPSLHHPSXNQNQXKLXHFDHYNQYEQQKMHLMDQPNRMMSNXPGNGLASPHSQYHXPPVPQVPHGGSGGGQMGVYPGMQNERHGQSFVDSSSMWGPRAVQVPDQIRAPYQQQQPQPQPPQPAPSGPPAQGHPQHMQQMGSYMARGDFSMQQHGQPQQRMSQFSQGQEGLNQGNPFIAXSGPGHLSHVPQQSPSMAPSLRHSVQQFHHHPSXALHGESVAHSPRFSPNPPQQGAVRPQXLNFSSRSQXVPSPXINNSGQYSRYPYSNLNQGLVNNXGMNQNLGLXNNXPMNQSVPRYPNAVGFPSNSGQGLMHQQPIHPSGSLNQMNXQXMHPSQPQGXYASPPPMSPMKAMSNPAGXPPPQVRPGSAGIPMEVGSYPNMPHPQPSHQPPGAMGIGQRNMGPRNMQQSRPFIGMSSAPRELXGHMRPNGCPGVGLGDPQAIQERLIPGQQHPGQQPSFQQLPXCPPLQPHPGLHHQSSPPHPHHQPWAQLHPSPQNXPQKVPVHQHSPSEPFLEKPVPDMXQVSGPNAQLVKSDDYLPSIEQQPQQKKKKKKNNHIVAEDPSKGFGKDDFPGGVDNQELNRNSLDGSQEEKKKKKRSKAKKDPKEPKEPKEKKEPKEPKXPKAPKIPKEPKEKKAKXAXPKPKSSKKSSNKKPDSEASALKKKVNKGKXEGSENSDLDKXPPPSPPPEEDEDPGVQKRRSSRQVKRKRYXEDLEFKISDEEADDADAAGRDSPSNXSQSEQQESVDAEGPVVEKIMSSRSVKKQKESGEEVEIEEFYVKYKNFSYLHCQWASIEDLEKDKRIQQKIKRFKAKQGQNKFLSEIEDELFNPDYVEVDRIMDFARSXDDRGEPVXHYLVKWCSLPYEDSXWERRQDIDQAKIEEFEKLMSREPEXERVERPPADDWKKSESSREYKNNNKLREYQLEGVNWLLFNWYNMRNCILADEMGLGKXIQSIXFLYEIYLKGIHGPFLVIAPLSXIPNWEREFRXWXELNVVVYHGSQASRRXIQLYEMYFKDPQGRVIKGSYKFHAIIXXFEMILXDCPELRNIPWRCVVIDEAHRLKNRNCKLLEGLKMMDLEHKVLLXGXPLQNXVEELFSLLHFLEPSRFPSEXXFMQEFGDLKXEEQVQKLQAILKPMMLRRLKEDVEKNLAPKEEXIIEVELXNIQKKYYRAILEKNFXFLSKGGGQANVPNLLNXMMELRKCCNHPYLINGAEEKILEEFKEXHNAESPDFQLQAMIQAAGKLVLIDKLLPKLKAGGHRVLIFSQMVRCLDILEDYLIQRRYPYERIDGRVRGNLRQAAIDRFSKPDSDRFVFLLCXRAGGLGINLXAADXCIIFDSDWNPQNDLQAQARCHRIGQSKSVKIYRLIXRNSYEREMFDKASLKLGLDKAVLQSMSGRENAXNGVQQLSKKEIEDLLRKGAYGALMDEEDEGSKFCEEDIDQILLRRXHXIXIESEGKGSXFAKASFVASGNRXDISLDDPNFWQKWAKKAELDIDALNGRNNLVIDXPRVRKQXRLYSAVKEDELMEFSDLESDSEEKPCAKPRRPQDKSQGYARSECFRVEKNLLVYGWGRWXDILSHGRYKRQLXEQDVEXICRXILVYCLNHYKGDENIKSFIWDLIXPXADGQXRALVNHSGLSAPVPRGRKGKKVKAQSXQPVVQDADWLASCNPDALFQEDSYKKHLKHHCNKVLLRVRMLYYLRQEVIGDQADKILEGADSSEADVWIPEPFHAEVPADWWDKEADKSLLIGVFKHGYEKYNSMRADPALCFLERVGMPDAKAIAAEQRGXDMLADGGDGGEFDREDEDPEYKPXRXPFKDEIDEFANSPSEDKEESMEIHAXGKHSESNAELGQLYWPNXSXLXXRLRRLIXAYQRSYKRQQMRQEALMKXDRRRRRPREEVRALEAEREAIISEKRQKWXRREEADFYRVVSXFGVIFDPVKQQFDWNQFRAFARLDKKSDESLEKYFSCFVAMCRRVCRMPVKPDDEPPDLSSIIEPIXEERASRXLYRIELLRKIREQVLHHPQLGERLKLCQPSLDLPEWWECGRHDRDLLVGAAKHGVSRXDYHILNDPELSFLDAHKNFAQNRGAGNXSSLNPLAVGFVQXPPVISSAHIQDERVLEQAEGKVEEPENPAAKEKCEGKEEEEEXDGSGKESKQECEAEASSVKNELKGVEVGADXGSKSISEKGSEEDEEEKLEDDDKSEESSQPEAGAVSRGKNFDEESNASMSXARDEXRDGFYMEDGDPSVAQLLHERXFAFSFWPKDRVMINRLDNICEAVLKGKWPVNRRQMFDFQGLIPGYXPXXVDSPLQKRSFAELSMVGQASISGSEDIXXSPQLSKEDALNLSVPRQRRRRRRKIEIEAERAAKRRNLMEMVAQLRESQVVSENGQEKVVDLSKASREAXSSXSNFSSLSSKFILPNVSXPVSDAFKXQMELLQAGLSRXPXRHLLNGSLVDGEPPMKRRRGRRKNVEGLDLLFMSHKRXSLSAEDAEVXKAFEEDIEXPPXRNIPSPGQLDPDXRIPVINLEDGXRLVGEDAPKNKDLVEWLKLHPXYXVDMPSYVPKNADVLFSSFQKPKQKRHRCRNPNKLDINXLXGEERVPVVNKRNGKKMGGAMAPPMKDLPRWLEENPEFAVAPDWXDIVKQSGFVPESMFDRLLXGPVVRGEGASRRGRRPKSEIARAAAAAAAVASXSGINPLLVNSLFAGMDLXSLQNLQNLQSLQLAGLMGFPPGLAXAAXAGGDAKNPAAVLPLMLPGMAGLPNVFGLGGLLNNPLSAAXGNXXXASSQGEPEDSXSKGEEKGNENEDENKDSEKSXDAVSAADSANGSVGAAXAPAGLPSNPLAFNPFLLSXMAPGLFYPSMFLPPGLGGLXLPGFPALAGLQNAVGSSEEKAADKAEGGPFKDGEXLEGSDAEESLDKXAESSLLEDEIAQGEELDSLDGGDEIENNENDE

SEQ ID NO: 6012 - protein, 19 aa, Homo sapiens
  MOD_RES (1)..(1): Any amino acid
XSSMWGPRAVQACPRHQGN

SEQ ID NO: 6013 - protein, 226 aa, Homo sapiens
  MOD_RES (24)..(24): Selenocysteine
  MOD_RES (41)..(41): Selenocysteine
  MOD_RES (52)..(52): Selenocysteine
  MOD_RES (71)..(71): Selenocysteine
  MOD_RES (77)..(77): Selenocysteine
  MOD_RES (89)..(89): Selenocysteine
  MOD_RES (101)..(101): Selenocysteine
  MOD_RES (163)..(163): Selenocysteine
  MOD_RES (175)..(175): Selenocysteine
  MOD_RES (177)..(177): Selenocysteine
  MOD_RES (215)..(215): Selenocysteine
  MOD_RES (223)..(223): Selenocysteine
IDLVCQAVLSGKWPSSRRSQEMVXGGILGPGNHLLDSPSLXPGEYGDSPVPXPRSSSAASMAEEEASAVSXAAAQFXKLRRGMDEKEFXVQIKDEEGLKLXFQKHKLMANGVMGDGHPLFHKKKGNRKKLVEYMEDRRKQKWQRCKKNNKAELNCLGMEPVQXANSRNGKKGHHXEXVFNRVLPGPIAPESSKKRARRMRPDLSKMMALMQGGSXGSLSLHNXFQH

SEQ ID NO: 6014 - protein, 2581 aa, Homo sapiens
  MOD_RES (21)..(21): Selenocysteine
  MOD_RES (29)..(29): Selenocysteine
  MOD_RES (73)..(73): Selenocysteine
  MOD_RES (76)..(76): Selenocysteine
  MOD_RES (83)..(83): Selenocysteine
  MOD_RES (91)..(91): Selenocysteine
  MOD_RES (96)..(97): Selenocysteine
  MOD_RES (112)..(112): Selenocysteine
  MOD_RES (114)..(114): Selenocysteine
  MOD_RES (116)..(116): Selenocysteine
  MOD_RES (141)..(141): Selenocysteine
  MOD_RES (171)..(171): Selenocysteine
  MOD_RES (184)..(184): Selenocysteine
  MOD_RES (186)..(186): Selenocysteine
  MOD_RES (194)..(194): Selenocysteine
  MOD_RES (201)..(201): Selenocysteine
  MOD_RES (203)..(203): Selenocysteine
  MOD_RES (207)..(207): Selenocysteine
  MOD_RES (209)..(209): Selenocysteine
  MOD_RES (222)..(222): Selenocysteine
  MOD_RES (265)..(265): Selenocysteine
  MOD_RES (274)..(274): Selenocysteine
  MOD_RES (276)..(276): Selenocysteine
  MOD_RES (278)..(278): Selenocysteine
  MOD_RES (280)..(280): Selenocysteine
  MOD_RES (288)..(288): Selenocysteine
  MOD_RES (325)..(325): Selenocysteine
  MOD_RES (339)..(339): Selenocysteine
  MOD_RES (370)..(370): Selenocysteine
  MOD_RES (374)..(374): Selenocysteine
  MOD_RES (444)..(444): Selenocysteine
  MOD_RES (521)..(521): Selenocysteine
  MOD_RES (527)..(527): Selenocysteine
  MOD_RES (535)..(535): Selenocysteine
  MOD_RES (537)..(537): Selenocysteine
  MOD_RES (548)..(548): Selenocysteine
  MOD_RES (586)..(586): Selenocysteine
  MOD_RES (594)..(594): Selenocysteine
  MOD_RES (605)..(605): Selenocysteine
  MOD_RES (625)..(625): Selenocysteine
  MOD_RES (663)..(663): Selenocysteine
  MOD_RES (684)..(684): Selenocysteine
  MOD_RES (703)..(703): Selenocysteine
  MOD_RES (760)..(760): Selenocysteine
  MOD_RES (843)..(843): Selenocysteine
  MOD_RES (870)..(870): Selenocysteine
  MOD_RES (872)..(872): Selenocysteine
  MOD_RES (880)..(880): Selenocysteine
  MOD_RES (882)..(882): Selenocysteine
  MOD_RES (886)..(886): Selenocysteine
  MOD_RES (925)..(926): Selenocysteine
  MOD_RES (976)..(976): Selenocysteine
  MOD_RES (978)..(978): Selenocysteine
  MOD_RES (983)..(983): Selenocysteine
  MOD_RES (1014)..(1014): Selenocysteine
  MOD_RES (1047)..(1047): Selenocysteine
  MOD_RES (1054)..(1054): Selenocysteine
  MOD_RES (1079)..(1079): Selenocysteine
  MOD_RES (1087)..(1087): Selenocysteine
  MOD_RES (1110)..(1110): Selenocysteine
  MOD_RES (1209)..(1209): Selenocysteine
  MOD_RES (1219)..(1219): Selenocysteine
  MOD_RES (1223)..(1223): Selenocysteine
  MOD_RES (1259)..(1259): Selenocysteine
  MOD_RES (1293)..(1293): Selenocysteine
  MOD_RES (1338)..(1340): Selenocysteine
  MOD_RES (1342)..(1342): Selenocysteine
  MOD_RES (1351)..(1351): Selenocysteine
  MOD_RES (1364)..(1364): Selenocysteine
  MOD_RES (1398)..(1398): Selenocysteine
  MOD_RES (1405)..(1405): Selenocysteine
  MOD_RES (1410)..(1410): Selenocysteine
  MOD_RES (1444)..(1444): Selenocysteine
  MOD_RES (1475)..(1475): Selenocysteine
  MOD_RES (1481)..(1481): Selenocysteine
  MOD_RES (1516)..(1516): Selenocysteine
  MOD_RES (1543)..(1543): Selenocysteine
  MOD_RES (1559)..(1559): Selenocysteine
  MOD_RES (1622)..(1623): Selenocysteine
  MOD_RES (1647)..(1647): Selenocysteine
  MOD_RES (1731)..(1731): Selenocysteine
  MOD_RES (1746)..(1746): Selenocysteine
  MOD_RES (1754)..(1754): Selenocysteine
  MOD_RES (1799)..(1799): Selenocysteine
  MOD_RES (1804)..(1804): Selenocysteine
  MOD_RES (1812)..(1812): Selenocysteine
  MOD_RES (1821)..(1821): Selenocysteine
  MOD_RES (1831)..(1831): Selenocysteine
  MOD_RES (1839)..(1839): Selenocysteine
  MOD_RES (1844)..(1844): Selenocysteine
  MOD_RES (1879)..(1879): Selenocysteine
  MOD_RES (1886)..(1886): Selenocysteine
  MOD_RES (1945)..(1945): Selenocysteine
  MOD_RES (1982)..(1982): Selenocysteine
  MOD_RES (1990)..(1990): Selenocysteine
  MOD_RES (1993)..(1993): Selenocysteine
  MOD_RES (2012)..(2012): Selenocysteine
  MOD_RES (2014)..(2014): Selenocysteine
  MOD_RES (2023)..(2023): Selenocysteine
  MOD_RES (2037)..(2037): Selenocysteine
  MOD_RES (2050)..(2051): Selenocysteine
  MOD_RES (2095)..(2095): Selenocysteine
  MOD_RES (2107)..(2107): Selenocysteine
  MOD_RES (2124)..(2124): Selenocysteine
  MOD_RES (2139)..(2139): Selenocysteine
  MOD_RES (2187)..(2187): Selenocysteine
  MOD_RES (2204)..(2204): Selenocysteine
  MOD_RES (2215)..(2215): Selenocysteine
  MOD_RES (2234)..(2234): Selenocysteine
  MOD_RES (2240)..(2240): Selenocysteine
  MOD_RES (2252)..(2252): Selenocysteine
  MOD_RES (2264)..(2264): Selenocysteine
  MOD_RES (2313)..(2313): Selenocysteine
  MOD_RES (2324)..(2324): Selenocysteine
  MOD_RES (2386)..(2386): Selenocysteine
  MOD_RES (2398)..(2398): Selenocysteine
  MOD_RES (2400)..(2400): Selenocysteine
  MOD_RES (2438)..(2438): Selenocysteine
  MOD_RES (2446)..(2446): Selenocysteine
  MOD_RES (2466)..(2466): Selenocysteine
  MOD_RES (2490)..(2490): Selenocysteine
  MOD_RES (2522)..(2523): Selenocysteine
  MOD_RES (2527)..(2528): Selenocysteine
MADPIMDLFDDPNLFGLDSLXDDSFNQVXQDPIEEALGLPSSLDSLDQMNQDGGGGDVGNSSASELVPPPEEXAPXELSKESXAPAPESIXLHDYXXQPASQEQPAQPVLQXSXPXSGLLQVSKSQEILSQGNPFMGVSAXAVSSSSAGGQPPQSAPKIVILKAPPSSSVXGAHVAQIQAQGIXSXAQPLVAGXANGGKVXFXKVLXGXPLRPGVSIVSGNXVLAAKVPGNQAAVQRIVQPSRPVKQLVLQPVKGSAPAGNPGAXGPPLKPAVXLXSXPXQGESKRIXLVLQQPQSGGPQGHRHVVLGSLPGKIVLQGNQLAALXQAKNAQGQPAKVVXIQLQVQQPQQKIQIVPQPPSSQPQPQQPPSXQPVXLSSVQQAQIMGPGQSPGQRLSVPVKVVLQPQAGSSQGASSGLSVVKVLSASEVAALSSPASSAPHSGGKXGMEENRRLEHQKKQEKANRIVAEAIARARARGEQNIPRVLNEDELPSVRPEEEGEKKRRKKSAGERLKEEKPKKSKXSGASKXKGKSKLNXIXPVVGKKRKRNXSSDNSDVEVMPAQSPREDEESSIQKRRSNRQVKRKKYXEDLDIKIXDDEEEEEVDVXGPIKPEPILPEPVQEPDGEXLPSMQFFVENPSEEDAAIVDKVLSMRIVKKELPSGQYXEAEEFFVKYKNYSYLHCEWAXISQLEKDKRIHQKLKRFKXKMAQMRHFFHEDEEPFNPDYVEVDRILDESHSIDKDNGEPVIYYLVKWCSLPYEDSXWELKEDVDEGKIREFKRIQSRHPELKRVNRPQASAWKKLELSHEYKNRNQLREYQLEGVNWLLFNWYNRQNCILADEMGLGKXIQSIAFLQEVYNVGIHGPFLVIAPLSXIXNWEREFNXWXEMNXIVYHGSLASRQMIQQYEMYCKDSRGRLIPGAYKFDALIXXFEMILSDCPELREIEWRCVIIDEAHRLKNRNCKLLDSLKHMDLEHKVLLXGXPLQNXVEELFSLLHFLEPSQFPSESEFLKDFGDLKXEEQVQKLQAILKPMMLRRLKEDVEKNLAPKQEXIIEVELXNIQKKYYRAILEKNFSFLSKGAGHXNMPNLLNXMMELRKCCNHPYLINGAEEKILXEFREACHIIPHDFHLQAMVRSAGKLVLIDKLLPKLKAGGHKVLIFSQMVRCLDILEDYLIQRRYLYERIDGRVRGNLRQAAIDRFSKPDSDRFVFLLCXRAGGLGINLXAADXCIIFDSDWNPQNDLQAQARCHRIGQSKAVKVYRLIXRNSYEREMFDKASLKLGLDKAVLQSMSGRDGNIXGIQQFSKKEIEDLLRKGAYAAIMEEDDEGSKFCEEDIDQILLRRXXXIXIESEGKGSXFAKASFVASENRXDISLDDPNFWQKWAKKADLDMDLLNSKNNLVIDXPRVRKQXRHFSXLKDDDLVEFSDLESEDDERPRSRRHDRHHAYGRXDCFRVEKHLLVYGWGRWRDILSHGRFKRRMXERDVEXICRAILVYCLLHYRGDENIKGFIWDLISPAENGKXKELQNHSGLSIPVPRGRKGKKVKSQSXFDIHKADWIRKYNPDXLFQDESYKKHLKHQCNKVLLRVRMLYYLRQEVIGDQAEKVLGGAIASEIDIWFPVVDQLEVPXXWWDSEADKSLLIGVFKHGYEKYNXMRADPALCFLEKAGRPDDKAIAAEHRVLDNFSDIVEGVDFDKDCEDPEYKPLQGPPKDQDDEGDPLMMMDEEISVIDGDEAQVXQQPGHLFWPPGSALXARLRRLVXAYQRSYKREQMKIEAAERGDRRRRRCEAAFKLKEIARREKQQRWXRREQXDFYRVVSXFGVEYDPDXMQFHWDRFRXFARLDKKXDESLXKYFHGFVAMCRQVCRLPPAAGDEPPDPNLFIEPIXEERASRXLYRIELLRRLREQVLCHPLLEDRLALCQPPGPELPKWWEPVRHDGELLRGAARHGVSQXDCNIMQDPDFSFLAARMNYMQNHQAGAPAPSLSRCSXPLLHQQYXSRXASPLPLRPDAPVEKSPEEXAXQVPSLESLXLKLEHEVVARSRPXPQDYEMRVSPSDXXPLVSRSVPPVKLEDEDDSDSELDLSKLSPSSSSSSSSSSSSSSXDESEDEKEEKLXDQSRSKLYDEESLLSLXMSQDGFPNEDGEQMXPELLLLQERQRASEWPKDRVLINRIDLVCQAVLSGKWPSSRRSQEMVXGGILGPGNHLLDSPSLXPGEYGDSPVPXPRSSSAASMAEEEASAVSXAAAQFXKLRRGMDEKEFXVQIKDEEGLKLXFQKHKLMANGVMGDGHPLFHKKKGNRKKLVELEVECMEEPNHLDVDLEXRIPVINKVDGXLLVGEDAPRRAELEMWLQGHPEFAVDPRFLAYMEDRRKQKWQRCKKNNKAELNCLGMEPVQXANSRNGKKGHHXEXVFNRVLPGPIAPESSKKRARRMRPDLSKMMALMQGGSXGSLSLHNXFQHSSSGLQSVSSLGHSSAXSASLPFMPFVMGGAPSSPHVDSSXMLHHHHHHPHPHHHHHHHPGLRAPGYPSSPVXXASGXXLRLPPLQPEEDDDEDEEDDDDLSQGYDSSERDFSLIDDPMMPANSDSSEDADD

SEQ ID NO: 6015 - protein, 2302 aa, Homo sapiens
  MOD_RES (9)..(9): Selenocysteine
  MOD_RES (46)..(46): Selenocysteine
  MOD_RES (60)..(60): Selenocysteine
  MOD_RES (91)..(91): Selenocysteine
  MOD_RES (95)..(95): Selenocysteine
  MOD_RES (165)..(165): Selenocysteine
  MOD_RES (242)..(242): Selenocysteine
  MOD_RES (248)..(248): Selenocysteine
  MOD_RES (256)..(256): Selenocysteine
  MOD_RES (258)..(258): Selenocysteine
  MOD_RES (269)..(269): Selenocysteine
  MOD_RES (307)..(307): Selenocysteine
  MOD_RES (315)..(315): Selenocysteine
  MOD_RES (326)..(326): Selenocysteine
  MOD_RES (346)..(346): Selenocysteine
  MOD_RES (384)..(384): Selenocysteine
  MOD_RES (405)..(405): Selenocysteine
  MOD_RES (424)..(424): Selenocysteine
  MOD_RES (481)..(481): Selenocysteine
  MOD_RES (564)..(564): Selenocysteine
  MOD_RES (591)..(591): Selenocysteine
  MOD_RES (593)..(593): Selenocysteine
  MOD_RES (601)..(601): Selenocysteine
  MOD_RES (603)..(603): Selenocysteine
  MOD_RES (607)..(607): Selenocysteine
  MOD_RES (646)..(647): Selenocysteine
  MOD_RES (697)..(697): Selenocysteine
  MOD_RES (699)..(699): Selenocysteine
  MOD_RES (704)..(704): Selenocysteine
  MOD_RES (735)..(735): Selenocysteine
  MOD_RES (768)..(768): Selenocysteine
  MOD_RES (775)..(775): Selenocysteine
  MOD_RES (800)..(800): Selenocysteine
  MOD_RES (808)..(808): Selenocysteine
  MOD_RES (831)..(831): Selenocysteine
  MOD_RES (930)..(930): Selenocysteine
  MOD_RES (940)..(940): Selenocysteine
  MOD_RES (944)..(944): Selenocysteine
  MOD_RES (980)..(980): Selenocysteine
  MOD_RES (1014)..(1014): Selenocysteine
  MOD_RES (1059)..(1061): Selenocysteine
  MOD_RES (1063)..(1063): Selenocysteine
  MOD_RES (1072)..(1072): Selenocysteine
  MOD_RES (1085)..(1085): Selenocysteine
  MOD_RES (1119)..(1119): Selenocysteine
  MOD_RES (1126)..(1126): Selenocysteine
  MOD_RES (1131)..(1131): Selenocysteine
  MOD_RES (1165)..(1165): Selenocysteine
  MOD_RES (1196)..(1196): Selenocysteine
  MOD_RES (1202)..(1202): Selenocysteine
  MOD_RES (1237)..(1237): Selenocysteine
  MOD_RES (1264)..(1264): Selenocysteine
  MOD_RES (1280)..(1280): Selenocysteine
  MOD_RES (1343)..(1344): Selenocysteine
  MOD_RES (1368)..(1368): Selenocysteine
  MOD_RES (1452)..(1452): Selenocysteine
  MOD_RES (1467)..(1467): Selenocysteine
  MOD_RES (1475)..(1475): Selenocysteine
  MOD_RES (1520)..(1520): Selenocysteine
  MOD_RES (1525)..(1525): Selenocysteine
  MOD_RES (1533)..(1533): Selenocysteine
  MOD_RES (1542)..(1542): Selenocysteine
  MOD_RES (1552)..(1552): Selenocysteine
  MOD_RES (1560)..(1560): Selenocysteine
  MOD_RES (1565)..(1565): Selenocysteine
  MOD_RES (1600)..(1600): Selenocysteine
  MOD_RES (1607)..(1607): Selenocysteine
  MOD_RES (1666)..(1666): Selenocysteine
  MOD_RES (1703)..(1703): Selenocysteine
  MOD_RES (1711)..(1711): Selenocysteine
  MOD_RES (1714)..(1714): Selenocysteine
  MOD_RES (1733)..(1733): Selenocysteine
  MOD_RES (1735)..(1735): Selenocysteine
  MOD_RES (1744)..(1744): Selenocysteine
  MOD_RES (1758)..(1758): Selenocysteine
  MOD_RES (1771)..(1772): Selenocysteine
  MOD_RES (1816)..(1816): Selenocysteine
  MOD_RES (1828)..(1828): Selenocysteine
  MOD_RES (1845)..(1845): Selenocysteine
  MOD_RES (1860)..(1860): Selenocysteine
  MOD_RES (1908)..(1908): Selenocysteine
  MOD_RES (1925)..(1925): Selenocysteine
  MOD_RES (1936)..(1936): Selenocysteine
  MOD_RES (1955)..(1955): Selenocysteine
  MOD_RES (1961)..(1961): Selenocysteine
  MOD_RES (1973)..(1973): Selenocysteine
  MOD_RES (1985)..(1985): Selenocysteine
  MOD_RES (2034)..(2034): Selenocysteine
  MOD_RES (2045)..(2045): Selenocysteine
  MOD_RES (2107)..(2107): Selenocysteine
  MOD_RES (2119)..(2119): Selenocysteine
  MOD_RES (2121)..(2121): Selenocysteine
  MOD_RES (2159)..(2159): Selenocysteine
  MOD_RES (2167)..(2167): Selenocysteine
  MOD_RES (2187)..(2187): Selenocysteine
  MOD_RES (2211)..(2211): Selenocysteine
  MOD_RES (2243)..(2244): Selenocysteine
  MOD_RES (2248)..(2249): Selenocysteine
MKGESKRIXLVLQQPQSGGPQGHRHVVLGSLPGKIVLQGNQLAALXQAKNAQGQPAKVVXIQLQVQQPQQKIQIVPQPPSSQPQPQQPPSXQPVXLSSVQQAQIMGPGQSPGQRLSVPVKVVLQPQAGSSQGASSGLSVVKVLSASEVAALSSPASSAPHSGGKXGMEENRRLEHQKKQEKANRIVAEAIARARARGEQNIPRVLNEDELPSVRPEEEGEKKRRKKSAGERLKEEKPKKSKXSGASKXKGKSKLNXIXPVVGKKRKRNXSSDNSDVEVMPAQSPREDEESSIQKRRSNRQVKRKKYXEDLDIKIXDDEEEEEVDVXGPIKPEPILPEPVQEPDGEXLPSMQFFVENPSEEDAAIVDKVLSMRIVKKELPSGQYXEAEEFFVKYKNYSYLHCEWAXISQLEKDKRIHQKLKRFKXKMAQMRHFFHEDEEPFNPDYVEVDRILDESHSIDKDNGEPVIYYLVKWCSLPYEDSXWELKEDVDEGKIREFKRIQSRHPELKRVNRPQASAWKKLELSHEYKNRNQLREYQLEGVNWLLFNWYNRQNCILADEMGLGKXIQSIAFLQEVYNVGIHGPFLVIAPLSXIXNWEREFNXWXEMNXIVYHGSLASRQMIQQYEMYCKDSRGRLIPGAYKFDALIXXFEMILSDCPELREIEWRCVIIDEAHRLKNRNCKLLDSLKHMDLEHKVLLXGXPLQNXVEELFSLLHFLEPSQFPSESEFLKDFGDLKXEEQVQKLQAILKPMMLRRLKEDVEKNLAPKQEXIIEVELXNIQKKYYRAILEKNFSFLSKGAGHXNMPNLLNXMMELRKCCNHPYLINGAEEKILXEFREACHIIPHDFHLQAMVRSAGKLVLIDKLLPKLKAGGHKVLIFSQMVRCLDILEDYLIQRRYLYERIDGRVRGNLRQAAIDRFSKPDSDRFVFLLCXRAGGLGINLXAADXCIIFDSDWNPQNDLQAQARCHRIGQSKAVKVYRLIXRNSYEREMFDKASLKLGLDKAVLQSMSGRDGNIXGIQQFSKKEIEDLLRKGAYAAIMEEDDEGSKFCEEDIDQILLRRXXXIXIESEGKGSXFAKASFVASENRXDISLDDPNFWQKWAKKADLDMDLLNSKNNLVIDXPRVRKQXRHFSXLKDDDLVEFSDLESEDDERPRSRRHDRHHAYGRXDCFRVEKHLLVYGWGRWRDILSHGRFKRRMXERDVEXICRAILVYCLLHYRGDENIKGFIWDLISPAENGKXKELQNHSGLSIPVPRGRKGKKVKSQSXFDIHKADWIRKYNPDXLFQDESYKKHLKHQCNKVLLRVRMLYYLRQEVIGDQAEKVLGGAIASEIDIWFPVVDQLEVPXXWWDSEADKSLLIGVFKHGYEKYNXMRADPALCFLEKAGRPDDKAIAAEHRVLDNFSDIVEGVDFDKDCEDPEYKPLQGPPKDQDDEGDPLMMMDEEISVIDGDEAQVXQQPGHLFWPPGSALXARLRRLVXAYQRSYKREQMKIEAAERGDRRRRRCEAAFKLKEIARREKQQRWXRREQXDFYRVVSXFGVEYDPDXMQFHWDRFRXFARLDKKXDESLXKYFHGFVAMCRQVCRLPPAAGDEPPDPNLFIEPIXEERASRXLYRIELLRRLREQVLCHPLLEDRLALCQPPGPELPKWWEPVRHDGELLRGAARHGVSQXDCNIMQDPDFSFLAARMNYMQNHQAGAPAPSLSRCSXPLLHQQYXSRXASPLPLRPDAPVEKSPEEXAXQVPSLESLXLKLEHEVVARSRPXPQDYEMRVSPSDXXPLVSRSVPPVKLEDEDDSDSELDLSKLSPSSSSSSSSSSSSSSXDESEDEKEEKLXDQSRSKLYDEESLLSLXMSQDGFPNEDGEQMXPELLLLQERQRASEWPKDRVLINRIDLVCQAVLSGKWPSSRRSQEMVXGGILGPGNHLLDSPSLXPGEYGDSPVPXPRSSSAASMAEEEASAVSXAAAQFXKLRRGMDEKEFXVQIKDEEGLKLXFQKHKLMANGVMGDGHPLFHKKKGNRKKLVELEVECMEEPNHLDVDLEXRIPVINKVDGXLLVGEDAPRRAELEMWLQGHPEFAVDPRFLAYMEDRRKQKWQRCKKNNKAELNCLGMEPVQXANSRNGKKGHHXEXVFNRVLPGPIAPESSKKRARRMRPDLSKMMALMQGGSXGSLSLHNXFQHSSSGLQSVSSLGHSSAXSASLPFMPFVMGGAPSSPHVDSSXMLHHHHHHPHPHHHHHHHPGLRAPGYPSSPVXXASGXXLRLPPLQPEEDDDEDEEDDDDLSQGYDSSERDFSLIDDPMMPANSDSSEDADD

SEQ ID NO: 6016 - protein, 151 aa, Homo sapiens
  MOD_RES (4)..(4): Selenocysteine
  MOD_RES (48)..(48): Selenocysteine
  MOD_RES (51)..(51): Selenocysteine
  MOD_RES (58)..(58): Selenocysteine
  MOD_RES (66)..(66): Selenocysteine
  MOD_RES (71)..(72): Selenocysteine
  MOD_RES (87)..(87): Selenocysteine
  MOD_RES (89)..(89): Selenocysteine
  MOD_RES (91)..(91): Selenocysteine
  MOD_RES (116)..(116): Selenocysteine
  MOD_RES (146)..(146): Selenocysteine
MKVXQDPIEEALGLPSSLDSLDQMNQDGGGGDVGNSSASELVPPPEEXAPXELSKESXAPAPESIXLHDYXXQPASQEQPAQPVLQXSXPXSGLLQVSKSQEILSQGNPFMGVSAXAVSSSSAGGQPPQSAPKIVILKAPPSSSVXGAHVA

SEQ ID NO: 6017 - protein, 98 aa, Homo sapiens
  MOD_RES (12)..(12): Selenocysteine
  MOD_RES (39)..(39): Selenocysteine
  MOD_RES (76)..(76): Selenocysteine
  MOD_RES (90)..(90): Selenocysteine
MYLISILGSPVXRNLPPLLYGPYWHQPRQYEQGESKRIXLVLQQPQSGGPQGHRHVVLGSLPGKIVLQGNQLAALXQAKNAQGQPAKVVXIQLQVQQP

SEQ ID NO: 6018 - protein, 873 aa, Homo sapiens
  MOD_RES (1)..(1): Any amino acid
  MOD_RES (69)..(69): Selenocysteine
  MOD_RES (96)..(96): Selenocysteine
  MOD_RES (98)..(98): Selenocysteine
  MOD_RES (106)..(106): Selenocysteine
  MOD_RES (108)..(108): Selenocysteine
  MOD_RES (112)..(112): Selenocysteine
  MOD_RES (151)..(152): Selenocysteine
  MOD_RES (202)..(202): Selenocysteine
  MOD_RES (204)..(204): Selenocysteine
  MOD_RES (209)..(209): Selenocysteine
  MOD_RES (240)..(240): Selenocysteine
  MOD_RES (273)..(273): Selenocysteine
  MOD_RES (280)..(280): Selenocysteine
  MOD_RES (305)..(305): Selenocysteine
  MOD_RES (313)..(313): Selenocysteine
  MOD_RES (336)..(336): Selenocysteine
  MOD_RES (435)..(435): Selenocysteine
  MOD_RES (445)..(445): Selenocysteine
  MOD_RES (449)..(449): Selenocysteine
  MOD_RES (485)..(485): Selenocysteine
  MOD_RES (519)..(519): Selenocysteine
  MOD_RES (564)..(566): Selenocysteine
  MOD_RES (568)..(568): Selenocysteine
  MOD_RES (577)..(577): Selenocysteine
  MOD_RES (590)..(590): Selenocysteine
  MOD_RES (624)..(624): Selenocysteine
  MOD_RES (631)..(631): Selenocysteine
  MOD_RES (636)..(636): Selenocysteine
  MOD_RES (670)..(670): Selenocysteine
  MOD_RES (701)..(701): Selenocysteine
  MOD_RES (707)..(707): Selenocysteine
  MOD_RES (742)..(742): Selenocysteine
  MOD_RES (777)..(777): Selenocysteine
  MOD_RES (793)..(793): Selenocysteine
  MOD_RES (856)..(857): Selenocysteine
XKRIQSRHPELKRVNRPQASAWKKLELSHEYKNRNQLREYQLEGVNWLLFNWYNRQNCILADEMGLGKXIQSIAFLQEVYNVGIHGPFLVIAPLSXIXNWEREFNXWXEMNXIVYHGSLASRQMIQQYEMYCKDSRGRLIPGAYKFDALIXXFEMILSDCPELREIEWRCVIIDEAHRLKNRNCKLLDSLKHMDLEHKVLLXGXPLQNXVEELFSLLHFLEPSQFPSESEFLKDFGDLKXEEQVQKLQAILKPMMLRRLKEDVEKNLAPKQEXIIEVELXNIQKKYYRAILEKNFSFLSKGAGHXNMPNLLNXMMELRKCCNHPYLINGAEEKILXEFREACHIIPHDFHLQAMVRSAGKLVLIDKLLPKLKAGGHKVLIFSQMVRCLDILEDYLIQRRYLYERIDGRVRGNLRQAAIDRFSKPDSDRFVFLLCXRAGGLGINLXAADXCIIFDSDWNPQNDLQAQARCHRIGQSKAVKVYRLIXRNSYEREMFDKASLKLGLDKAVLQSMSGRDGNIXGIQQFSKKEIEDLLRKGAYAAIMEEDDEGSKFCEEDIDQILLRRXXXIXIESEGKGSXFAKASFVASENRXDISLDDPNFWQKWAKKADLDMDLLNSKNNLVIDXPRVRKQXRHFSXLKDDDLVEFSDLESEDDERPRSRRHDRHHAYGRXDCFRVEKHLLVYGWGRWRDILSHGRFKRRMXERDVEXICRAILVYCLLHYRGDENIKGFIWDLISPAENGKXKELQNHSVFDVSPFPGLSIPVPRGRKGKKVKSQSXFDIHKADWIRKYNPDXLFQDESYKKHLKHQCNKVLLRVRMLYYLRQEVIGDQAEKVLGGAIASEIDIWFPVVDQLEVPXXWWDSEADKSLLIGVFK

SEQ ID NO: 6019 - protein, 963 aa, Homo sapiens
  MOD_RES (65)..(65): Selenocysteine
  MOD_RES (145)..(145): Selenocysteine
  MOD_RES (150)..(151): Selenocysteine
  MOD_RES (158)..(158): Selenocysteine
  MOD_RES (163)..(163): Selenocysteine
  MOD_RES (175)..(175): Selenocysteine
  MOD_RES (180)..(180): Selenocysteine
  MOD_RES (191)..(191): Selenocysteine
  MOD_RES (207)..(207): Selenocysteine
  MOD_RES (220)..(220): Selenocysteine
  MOD_RES (235)..(235): Selenocysteine
  MOD_RES (247)..(247): Selenocysteine
  MOD_RES (275)..(276): Selenocysteine
  MOD_RES (291)..(292): Selenocysteine
  MOD_RES (296)..(296): Selenocysteine
  MOD_RES (306)..(306): Selenocysteine
  MOD_RES (340)..(340): Selenocysteine
  MOD_RES (357)..(357): Selenocysteine
  MOD_RES (363)..(364): Selenocysteine
  MOD_RES (374)..(374): Selenocysteine
  MOD_RES (383)..(383): Selenocysteine
  MOD_RES (397)..(397): Selenocysteine
  MOD_RES (412)..(412): Selenocysteine
  MOD_RES (424)..(424): Selenocysteine
  MOD_RES (450)..(450): Selenocysteine
  MOD_RES (461)..(461): Selenocysteine
  MOD_RES (475)..(475): Selenocysteine
  MOD_RES (480)..(480): Selenocysteine
  MOD_RES (526)..(526): Selenocysteine
  MOD_RES (532)..(532): Selenocysteine
  MOD_RES (541)..(541): Selenocysteine
  MOD_RES (549)..(549): Selenocysteine
  MOD_RES (562)..(562): Selenocysteine
  MOD_RES (622)..(622): Selenocysteine
  MOD_RES (685)..(685): Selenocysteine
  MOD_RES (708)..(708): Selenocysteine
  MOD_RES (717)..(717): Selenocysteine
  MOD_RES (736)..(737): Selenocysteine
  MOD_RES (754)..(754): Selenocysteine
  MOD_RES (762)..(762): Selenocysteine
  MOD_RES (798)..(798): Selenocysteine
  MOD_RES (801)..(801): Selenocysteine
  MOD_RES (805)..(805): Selenocysteine
  MOD_RES (820)..(820): Selenocysteine
  MOD_RES (823)..(823): Selenocysteine
  MOD_RES (842)..(842): Selenocysteine
  MOD_RES (845)..(845): Selenocysteine
  MOD_RES (850)..(850): Selenocysteine
  MOD_RES (875)..(875): Selenocysteine
  MOD_RES (884)..(884): Selenocysteine
  MOD_RES (890)..(890): Selenocysteine
  MOD_RES (924)..(924): Selenocysteine
  MOD_RES (934)..(934): Selenocysteine
  MOD_RES (950)..(950): Selenocysteine
MLYYLKQEVIGNECQKVFDGVDASDIDVWVPEPDHSEVPAEWWDFDADKSLLIGVFKHGYEKYNXIRADPALCFLERVGKPDEKAVAAEQRANDYMDGDVEDPEYKPAPAIFKDDIEDDVSSPGDLVIADGDGQLMEGDKVYWPXQSALXXRLRRLIXAYQRXNKNRQIQQIQPXFSVPXSVMQPIYEEAXLNPKMAAKIERQQRWXRREEADFYRVVSXFGVVFDPDRGQFDWXKFRAMARLHKKXDDSLEKYLYAFMSMCRRVCRLPSKEESXXHMKAYDEESVASLSXXQDEXQDSFQMNNGXPESAYILQGGYMLAASYWPKDRVMINRLDSICQXVLKGKWPSARRSYDANXVASFYXXKLLDSPGAAXEYSDPSVPXPPGAGVKEEHDQSXQMSKVKKHVREKEFXVKIKDEGGLKLXFQKQGLAQKRPFDGEDGALGQQQYLXRLRELQSASEXSLVNFPKSIPVSGXSIQPXLGANGVILDNQPIVKKRRGRRKNVEGVDIFFFNRNKPPNHVSLGLXSSQISXGINPALSYXQPQGIPDXESPVPVINLKDGXRLAGDDAPKRKDLEKWLKEHPGYVEDLGAFIPRMQLHEGRPKQKRHRCRNPNKLDVNSLXGEERVQLINRRNARKVGGAFAPPLKDLCRFLKENSEYGVAPEWGDVVKQSGFLPESMYERILXGPVVREEVSRRGRRPKSGIAKAXAAAAAASAXSVSGNPLLANGLLPGVDLXXLQALQQNLQNLQSLQVXAGLMGMPXGLPSGGEAKNMAAMFPMLLSGMAGLPNLLGMGGLLXKPXESGXEDKKGSDSKESEGKXERXESQSSENGGENSVSSSPSXSSXAALNXAAAANPLALNPLLLSNILYPGMLLXPGLNLHIPXLSQSNXFDVQNKNSDLGSSKSVEVKEEDSRIKDQEDKGGXEPSPLNENSXDEGSEKADASSGSDSXSSSSEDSDSSNED

SEQ ID NO: 6020 - protein, 125 aa, Homo sapiens
  MOD_RES (49)..(49): Selenocysteine
  MOD_RES (75)..(75): Selenocysteine
  MOD_RES (77)..(77): Selenocysteine
  MOD_RES (85)..(85): Selenocysteine
  MOD_RES (93)..(93): Selenocysteine
  MOD_RES (118)..(118): Selenocysteine
MSEKKQRKKVESESKQEKANRIISEAIAKAKERGERNIPRVMSPENFPXASVEGKEEKKGRRMKSKPKDKDSKKXKXCSKLKEKXKIGKLIIXLGKKQKRKNESSDEISDAEQMPQHXLKDQDSQ

SEQ ID NO: 6021 - protein, 1098 aa, Homo sapiens
  MOD_RES (22)..(22): Selenocysteine
  MOD_RES (24)..(24): Selenocysteine
  MOD_RES (29)..(29): Selenocysteine
  MOD_RES (82)..(82): Selenocysteine
  MOD_RES (108)..(108): Selenocysteine
  MOD_RES (110)..(110): Selenocysteine
  MOD_RES (118)..(118): Selenocysteine
  MOD_RES (126)..(126): Selenocysteine
  MOD_RES (151)..(151): Selenocysteine
  MOD_RES (226)..(226): Selenocysteine
  MOD_RES (239)..(239): Selenocysteine
  MOD_RES (258)..(258): Selenocysteine
  MOD_RES (315)..(315): Selenocysteine
  MOD_RES (335)..(335): Selenocysteine
  MOD_RES (360)..(360): Selenocysteine
  MOD_RES (418)..(418): Selenocysteine
  MOD_RES (423)..(423): Selenocysteine
  MOD_RES (431)..(431): Selenocysteine
  MOD_RES (445)..(445): Selenocysteine
  MOD_RES (455)..(455): Selenocysteine
  MOD_RES (457)..(457): Selenocysteine
  MOD_RES (500)..(501): Selenocysteine
  MOD_RES (551)..(551): Selenocysteine
  MOD_RES (553)..(553): Selenocysteine
  MOD_RES (558)..(558): Selenocysteine
  MOD_RES (579)..(579): Selenocysteine
  MOD_RES (589)..(589): Selenocysteine
  MOD_RES (622)..(622): Selenocysteine
  MOD_RES (629)..(629): Selenocysteine
  MOD_RES (654)..(654): Selenocysteine
  MOD_RES (662)..(662): Selenocysteine
  MOD_RES (690)..(690): Selenocysteine
  MOD_RES (784)..(784): Selenocysteine
  MOD_RES (794)..(794): Selenocysteine
  MOD_RES (798)..(798): Selenocysteine
  MOD_RES (834)..(834): Selenocysteine
  MOD_RES (913)..(913): Selenocysteine
  MOD_RES (915)..(915): Selenocysteine
  MOD_RES (917)..(917): Selenocysteine
  MOD_RES (926)..(926): Selenocysteine
  MOD_RES (939)..(939): Selenocysteine
  MOD_RES (973)..(973): Selenocysteine
  MOD_RES (980)..(980): Selenocysteine
  MOD_RES (986)..(986): Selenocysteine
  MOD_RES (1019)..(1019): Selenocysteine
  MOD_RES (1084)..(1084): Selenocysteine
  MOD_RES (1086)..(1086): Selenocysteine
  MOD_RES (1091)..(1091): Selenocysteine
MSSVKRPRGRPPSSKKSDGSGXYXKLQNXQVRVMSEKKQRKKVESESKQEKANRIISEAIAKAKERGERNIPRVMSPENFPXASVEGKEEKKGRRMKSKPKDKDSKKXKXCSKLKEKXKIGKLIIXLGKKQKRKNESSDEISDAEQMPQHXLKDQDSQKRRSNRQIKRKKYAEDIEGKQSEEEVKGSMKIKKNSAPLPGEQPLQLFVENPSEEDAAIVDKILSSRXVKKEISPGVMIDXEEFFVKYKNYSYLHCEWAXEEQLLKDKRIQQKIKRFKLRQAQRAHFFADMEEEPFNPDYVEVDRVLEVSFCEDKDXGEPVIYYLVKWCSLPYEDSXWELKEDVDLAKIEEFEQLQASRPDXRRLDRPPSNIWKKIDQSRDYKNGNQLREYQLEGLNWLLFNWYNRRNCILADEMGLGKXIQSIXFLYEILLXGIRGPFLIIAPLSXIANWEREFRXWXDINVVVYHGSLISRQMIQQYEMYFRDSQGRIIRGAYRFQAIIXXFEMILGGCGELNAIEWRCVIIDEAHRLKNKNCKLLEGLKLMNLEHKVLLXGXPLQNXVEELFSLLHFLEPLRFPSESXFMQEFGDLKXEEQVQKLQAILKPMMLRRLKEDVEKKLAPKEEXIIEVELXNIQKKYYRAILEKNFSFLSKGAGQXNVPNLVNXMMELRKCCNHPYLIKGAEEKILGEFRDXYNPAASDFHLQAMIQSAGKLVLIDKLLPKMKAGGHKVLIFSQMVRCLDILEDYLIHKRYLYERIDGRVRGNLRQAAIDRFSKPDSDRFVFLLCXRAGGLGINLXAADXCIIFDSDWNPQNDLQAQARCHRIGQNKAVKVYRLVXRNSYEREMFDRASLKLGLDKAVLQSMSGRESNVGGIQQLSKKEIEDLLRRGAYGAIMEEEDEGSKFCEEDIDQILLRRXKXIXIESEGRGSXFAKASFVASGNRXDISLDDPNFWQKWAKKAEIDIEAISGRNSLVIDXPRIRKQXRPFSAXKDELAELSEAESEGDEKPKLRRPCDRSNGYGRXECFRVEKNLLVYGWGRWREILSHGRFKRQLNEHDVEIICRALLAYCLVHYRGDEKIKGFIWDLIXPXEDGQXRELQNHL

SEQ ID NO: 6022 - protein, 91 aa, Homo sapiens
  MOD_RES (2)..(2): Selenocysteine
  MOD_RES (18)..(18): Selenocysteine
  MOD_RES (32)..(32): Selenocysteine
  MOD_RES (36)..(36): Selenocysteine
  MOD_RES (56)..(56): Selenocysteine
  MOD_RES (75)..(75): Selenocysteine
  MOD_RES (80)..(80): Selenocysteine
  MOD_RES (88)..(88): Selenocysteine
MXDPMMDFFDDANLFGEXLEEENLLHQVESQXEPFXGLDPEDLLQEGLLPHFDESXFGQDNSSHILDHDLDRQFXSHLVXRPSDMAQXQLQ

SEQ ID NO: 6023 - protein, 53 aa, Homo sapiens
  MOD_RES (2)..(2): Selenocysteine
  MOD_RES (18)..(18): Selenocysteine
MXDPMMDFFDDANLFGEXLEGLSDDAFVQPGPVSLVDELNLGAEFEPLHIDSL

SEQ ID NO: 6024 - protein, 2881 aa, Homo sapiens
  MOD_RES (2)..(2): Selenocysteine
  MOD_RES (18)..(18): Selenocysteine
  MOD_RES (59)..(59): Selenocysteine
  MOD_RES (61)..(61): Selenocysteine
  MOD_RES (66)..(66): Selenocysteine
  MOD_RES (129)..(129): Selenocysteine
  MOD_RES (131)..(132): Selenocysteine
  MOD_RES (172)..(172): Selenocysteine
  MOD_RES (175)..(175): Selenocysteine
  MOD_RES (217)..(217): Selenocysteine
  MOD_RES (234)..(234): Selenocysteine
  MOD_RES (260)..(260): Selenocysteine
  MOD_RES (298)..(298): Selenocysteine
  MOD_RES (301)..(301): Selenocysteine
  MOD_RES (306)..(306): Selenocysteine
  MOD_RES (322)..(322): Selenocysteine
  MOD_RES (330)..(330): Selenocysteine
  MOD_RES (369)..(369): Selenocysteine
  MOD_RES (380)..(380): Selenocysteine
  MOD_RES (398)..(398): Selenocysteine
  MOD_RES (402)..(402): Selenocysteine
  MOD_RES (422)..(422): Selenocysteine
  MOD_RES (441)..(441): Selenocysteine
  MOD_RES (446)..(446): Selenocysteine
  MOD_RES (454)..(454): Selenocysteine
  MOD_RES (496)..(496): Selenocysteine
  MOD_RES (498)..(498): Selenocysteine
  MOD_RES (503)..(503): Selenocysteine
  MOD_RES (556)..(556): Selenocysteine
  MOD_RES (582)..(582): Selenocysteine
  MOD_RES (584)..(584): Selenocysteine
  MOD_RES (592)..(592): Selenocysteine
  MOD_RES (600)..(600): Selenocysteine
  MOD_RES (625)..(625): Selenocysteine
  MOD_RES (700)..(700): Selenocysteine
  MOD_RES (713)..(713): Selenocysteine
  MOD_RES (732)..(732): Selenocysteine
  MOD_RES (789)..(789): Selenocysteine
  MOD_RES (809)..(809): Selenocysteine
  MOD_RES (834)..(834): Selenocysteine
  MOD_RES (892)..(892): Selenocysteine
  MOD_RES (897)..(897): Selenocysteine
  MOD_RES (905)..(905): Selenocysteine
  MOD_RES (919)..(919): Selenocysteine
  MOD_RES (929)..(929): Selenocysteine
  MOD_RES (931)..(931): Selenocysteine
  MOD_RES (974)..(975): Selenocysteine
  MOD_RES (1025)..(1025): Selenocysteine
  MOD_RES (1027)..(1027): Selenocysteine
  MOD_RES (1032)..(1032): Selenocysteine
  MOD_RES (1053)..(1053): Selenocysteine
  MOD_RES (1063)..(1063): Selenocysteine
  MOD_RES (1096)..(1096): Selenocysteine
  MOD_RES (1103)..(1103): Selenocysteine
  MOD_RES (1128)..(1128): Selenocysteine
  MOD_RES (1136)..(1136): Selenocysteine
  MOD_RES (1164)..(1164): Selenocysteine
  MOD_RES (1258)..(1258): Selenocysteine
  MOD_RES (1268)..(1268): Selenocysteine
  MOD_RES (1272)..(1272): Selenocysteine
  MOD_RES (1308)..(1308): Selenocysteine
  MOD_RES (1387)..(1387): Selenocysteine
  MOD_RES (1389)..(1389): Selenocysteine
  MOD_RES (1391)..(1391): Selenocysteine
  MOD_RES (1400)..(1400): Selenocysteine
  MOD_RES (1413)..(1413): Selenocysteine
  MOD_RES (1447)..(1447): Selenocysteine
  MOD_RES (1454)..(1454): Selenocysteine
  MOD_RES (1460)..(1460): Selenocysteine
  MOD_RES (1493)..(1493): Selenocysteine
  MOD_RES (1558)..(1558): Selenocysteine
  MOD_RES (1560)..(1560): Selenocysteine
  MOD_RES (1565)..(1565): Selenocysteine
  MOD_RES (1589)..(1589): Selenocysteine
  MOD_RES (1591)..(1591): Selenocysteine
  MOD_RES (1697)..(1697): Selenocysteine
  MOD_RES (1777)..(1777): Selenocysteine
  MOD_RES (1782)..(1783): Selenocysteine
  MOD_RES (1790)..(1790): Selenocysteine
  MOD_RES (1795)..(1795): Selenocysteine
  MOD_RES (1807)..(1807): Selenocysteine
  MOD_RES (1812)..(1812): Selenocysteine
  MOD_RES (1823)..(1823): Selenocysteine
  MOD_RES (1839)..(1839): Selenocysteine
  MOD_RES (1852)..(1852): Selenocysteine
  MOD_RES (1867)..(1867): Selenocysteine
  MOD_RES (1879)..(1879): Selenocysteine
  MOD_RES (1917)..(1917): Selenocysteine
  MOD_RES (1924)..(1924): Selenocysteine
  MOD_RES (1982)..(1982): Selenocysteine
  MOD_RES (2011)..(2011): Selenocysteine
  MOD_RES (2013)..(2013): Selenocysteine
  MOD_RES (2029)..(2029): Selenocysteine
  MOD_RES (2069)..(2069): Selenocysteine
  MOD_RES (2071)..(2071): Selenocysteine
  MOD_RES (2089)..(2089): Selenocysteine
  MOD_RES (2100)..(2100): Selenocysteine
  MOD_RES (2109)..(2109): Selenocysteine
  MOD_RES (2113)..(2113): Selenocysteine
  MOD_RES (2182)..(2182): Selenocysteine
  MOD_RES (2209)..(2210): Selenocysteine
  MOD_RES (2225)..(2226): Selenocysteine
  MOD_RES (2230)..(2230): Selenocysteine
  MOD_RES (2240)..(2240): Selenocysteine
  MOD_RES (2274)..(2274): Selenocysteine
  MOD_RES (2291)..(2291): Selenocysteine
  MOD_RES (2297)..(2298): Selenocysteine
  MOD_RES (2308)..(2308): Selenocysteine
  MOD_RES (2317)..(2317): Selenocysteine
  MOD_RES (2331)..(2331): Selenocysteine
  MOD_RES (2342)..(2342): Selenocysteine
  MOD_RES (2368)..(2368): Selenocysteine
  MOD_RES (2379)..(2379): Selenocysteine
  MOD_RES (2393)..(2393): Selenocysteine
  MOD_RES (2398)..(2398): Selenocysteine
  MOD_RES (2444)..(2444): Selenocysteine
  MOD_RES (2450)..(2450): Selenocysteine
  MOD_RES (2459)..(2459): Selenocysteine
  MOD_RES (2467)..(2467): Selenocysteine
  MOD_RES (2480)..(2480): Selenocysteine
  MOD_RES (2540)..(2540): Selenocysteine
  MOD_RES (2603)..(2603): Selenocysteine
  MOD_RES (2626)..(2626): Selenocysteine
  MOD_RES (2635)..(2635): Selenocysteine
  MOD_RES (2654)..(2655): Selenocysteine
  MOD_RES (2672)..(2672): Selenocysteine
  MOD_RES (2680)..(2680): Selenocysteine
  MOD_RES (2716)..(2716): Selenocysteine
  MOD_RES (2719)..(2719): Selenocysteine
  MOD_RES (2723)..(2723): Selenocysteine
  MOD_RES (2738)..(2738): Selenocysteine
  MOD_RES (2741)..(2741): Selenocysteine
  MOD_RES (2760)..(2760): Selenocysteine
  MOD_RES (2763)..(2763): Selenocysteine
  MOD_RES (2768)..(2768): Selenocysteine
  MOD_RES (2793)..(2793): Selenocysteine
  MOD_RES (2802)..(2802): Selenocysteine
  MOD_RES (2808)..(2808): Selenocysteine
  MOD_RES (2842)..(2842): Selenocysteine
  MOD_RES (2852)..(2852): Selenocysteine
  MOD_RES (2868)..(2868): Selenocysteine
MXDPMMDFFDDANLFGEXLEGLSDDAFVQPGPVSLVDELNLGAEFEPLHIDSLNHVQGXPXHQKMXDFEQLNQFDSIKFHHVNQSFGSPAEHVLSPHSQFNCSPIHPQNQPNGLFPDVSDGSPMWGHQXAXXISNQNGSPFHQQGHSHSMHQNKSFVAHHDFALFQANEQQXQCXSLRSQQNRNNLNPGQNSLSQSKNFMNVSGPHRVNVNHPPQMXNASNSQQSISMQQFSQXSNPSAHFHKCSSHQEGNFNGPSPNMXSCSVSNSQQFSSHYSFSSNHISPNSLLQSSAVLASNHXNQXLSDFXGSNSFSPHRGIKQESXQHILNPNXSLNSNNFQILHSSHPQGNYSNSKLSPVHMNFPDPVDSGXQMGHFNDHVEXNGFSSLEENLLHQVESQXEPFXGLDPEDLLQEGLLPHFDESXFGQDNSSHILDHDLDRQFXSHLVXRPSDMAQXQLQSQARSWHSSFSNHQHLHDRNHLCLQRQPPSSKKSDGSGXYXKLQNXQVRVMSEKKQRKKVESESKQEKANRIISEAIAKAKERGERNIPRVMSPENFPXASVEGKEEKKGRRMKSKPKDKDSKKXKXCSKLKEKXKIGKLIIXLGKKQKRKNESSDEISDAEQMPQHXLKDQDSQKRRSNRQIKRKKYAEDIEGKQSEEEVKGSMKIKKNSAPLPGEQPLQLFVENPSEEDAAIVDKILSSRXVKKEISPGVMIDXEEFFVKYKNYSYLHCEWAXEEQLLKDKRIQQKIKRFKLRQAQRAHFFADMEEEPFNPDYVEVDRVLEVSFCEDKDXGEPVIYYLVKWCSLPYEDSXWELKEDVDLAKIEEFEQLQASRPDXRRLDRPPSNIWKKIDQSRDYKNGNQLREYQLEGLNWLLFNWYNRRNCILADEMGLGKXIQSIXFLYEILLXGIRGPFLIIAPLSXIANWEREFRXWXDINVVVYHGSLISRQMIQQYEMYFRDSQGRIIRGAYRFQAIIXXFEMILGGCGELNAIEWRCVIIDEAHRLKNKNCKLLEGLKLMNLEHKVLLXGXPLQNXVEELFSLLHFLEPLRFPSESXFMQEFGDLKXEEQVQKLQAILKPMMLRRLKEDVEKKLAPKEEXIIEVELXNIQKKYYRAILEKNFSFLSKGAGQXNVPNLVNXMMELRKCCNHPYLIKGAEEKILGEFRDXYNPAASDFHLQAMIQSAGKLVLIDKLLPKMKAGGHKVLIFSQMVRCLDILEDYLIHKRYLYERIDGRVRGNLRQAAIDRFSKPDSDRFVFLLCXRAGGLGINLXAADXCIIFDSDWNPQNDLQAQARCHRIGQNKAVKVYRLVXRNSYEREMFDRASLKLGLDKAVLQSMSGRESNVGGIQQLSKKEIEDLLRRGAYGAIMEEEDEGSKFCEEDIDQILLRRXKXIXIESEGRGSXFAKASFVASGNRXDISLDDPNFWQKWAKKAEIDIEAISGRNSLVIDXPRIRKQXRPFSAXKDELAELSEAESEGDEKPKLRRPCDRSNGYGRXECFRVEKNLLVYGWGRWREILSHGRFKRQLNEHDVEIICRALLAYCLVHYRGDEKIKGFIWDLIXPXEDGQXRELQNHLGLSAPVPRGRKGKKVKXQXSSFDIQKAEWLRKYNPEQLLQDEGYKKHIKHHCNKVLLRVRMLYYLKQEVIGNECQKVFDGVDASDIDVWVPEPDHSEVPAEWWDFDADKSLLIGVFKHGYEKYNXIRADPALCFLERVGKPDEKAVAAEQRANDYMDGDVEDPEYKPAPAIFKDDIEDDVSSPGDLVIADGDGQLMEGDKVYWPXQSALXXRLRRLIXAYQRXNKNRQIQQIQPXFSVPXSVMQPIYEEAXLNPKMAAKIERQQRWXRREEADFYRVVSXFGVVFDPDRGQFDWXKFRAMARLHKKXDDSLEKYLYAFMSMCRRVCRLPSKEELVDPNIFIQPIXEERASRXLYRIELLRKVREQALRHPQLFERLKLCHPNPDLPVWWECGPHDRDLLIGAAKHGVSRXDYHILRDPELSFMAAQRNYSQSKMAHSRXSXPLLQQYQVALSASPLXSLPRLLDAKGIILEEMKVKSENLKEEPQSSEEESMSSVEXRXLIKSEPVSPKNGVLPQAXGDQKSGGKCEXDRRMVAARXEPLXPNPASKKPRVHKRGSESSSDSDSDSERSSCSSRSSSSSSSSSCSHSRSGSSSSSSSSCSSASSSSSSSXSSSSSSSSSSSEESDSDEEEAQKRESXXHMKAYDEESVASLSXXQDEXQDSFQMNNGXPESAYILQGGYMLAASYWPKDRVMINRLDSICQXVLKGKWPSARRSYDANXVASFYXXKLLDSPGAAXEYSDPSVPXPPGAGVKEEHDQSXQMSKEGGLKLXFQKQGLAQKRPFDGEDGALGQQQYLXRLRELQSASEXSLVNFPKSIPVSGXSIQPXLGANGVILDNQPIVKKRRGRRKNVEGVDIFFFNRNKPPNHVSLGLXSSQISXGINPALSYXQPQGIPDXESPVPVINLKDGXRLAGDDAPKRKDLEKWLKEHPGYVEDLGAFIPRMQLHEGRPKQKRHRCRNPNKLDVNSLXGEERVQLINRRNARKVGGAFAPPLKDLCRFLKENSEYGVAPEWGDVVKQSGFLPESMYERILXGPVVREEVSRRGRRPKSGIAKAXAAAAAASAXSVSGNPLLANGLLPGVDLXXLQALQQNLQNLQSLQVXAGLMGMPXGLPSGGEAKNMAAMFPMLLSGMAGLPNLLGMGGLLXKPXESGXEDKKGSDSKESEGKXERXESQSSENGGENSVSSSPSXSSXAALNXAAAANPLALNPLLLSNILYPGMLLXPGLNLHIPXLSQSNXFDVQNKNSDLGSSKSVEVKEEDSRIKDQEDKGGXEPSPLNENSXDEGSEKADASSGSDSXSSSSEDSDSSNED

SEQ ID NO: 6025 - protein, 2897 aa, Homo sapiens
  MOD_RES (2)..(2): Selenocysteine
  MOD_RES (18)..(18): Selenocysteine
  MOD_RES (59)..(59): Selenocysteine
  MOD_RES (61)..(61): Selenocysteine
  MOD_RES (66)..(66): Selenocysteine
  MOD_RES (129)..(129): Selenocysteine
  MOD_RES (131)..(132): Selenocysteine
  MOD_RES (172)..(172): Selenocysteine
  MOD_RES (175)..(175): Selenocysteine
  MOD_RES (217)..(217): Selenocysteine
  MOD_RES (234)..(234): Selenocysteine
  MOD_RES (260)..(260): Selenocysteine
  MOD_RES (298)..(298): Selenocysteine
  MOD_RES (301)..(301): Selenocysteine
  MOD_RES (306)..(306): Selenocysteine
  MOD_RES (322)..(322): Selenocysteine
  MOD_RES (330)..(330): Selenocysteine
  MOD_RES (369)..(369): Selenocysteine
  MOD_RES (380)..(380): Selenocysteine
  MOD_RES (398)..(398): Selenocysteine
  MOD_RES (402)..(402): Selenocysteine
  MOD_RES (422)..(422): Selenocysteine
  MOD_RES (441)..(441): Selenocysteine
  MOD_RES (446)..(446): Selenocysteine
  MOD_RES (454)..(454): Selenocysteine
  MOD_RES (496)..(496): Selenocysteine
  MOD_RES (498)..(498): Selenocysteine
  MOD_RES (503)..(503): Selenocysteine
  MOD_RES (556)..(556): Selenocysteine
  MOD_RES (582)..(582): Selenocysteine
  MOD_RES (584)..(584): Selenocysteine
  MOD_RES (592)..(592): Selenocysteine
  MOD_RES (600)..(600): Selenocysteine
  MOD_RES (625)..(625): Selenocysteine
  MOD_RES (700)..(700): Selenocysteine
  MOD_RES (713)..(713): Selenocysteine
  MOD_RES (732)..(732): Selenocysteine
  MOD_RES (789)..(789): Selenocysteine
  MOD_RES (809)..(809): Selenocysteine
  MOD_RES (834)..(834): Selenocysteine
  MOD_RES (892)..(892): Selenocysteine
  MOD_RES (897)..(897): Selenocysteine
  MOD_RES (905)..(905): Selenocysteine
  MOD_RES (919)..(919): Selenocysteine
  MOD_RES (929)..(929): Selenocysteine
  MOD_RES (931)..(931): Selenocysteine
  MOD_RES (974)..(975): Selenocysteine
  MOD_RES (1025)..(1025): Selenocysteine
  MOD_RES (1027)..(1027): Selenocysteine
  MOD_RES (1032)..(1032): Selenocysteine
  MOD_RES (1053)..(1053): Selenocysteine
  MOD_RES (1063)..(1063): Selenocysteine
  MOD_RES (1096)..(1096): Selenocysteine
  MOD_RES (1103)..(1103): Selenocysteine
  MOD_RES (1128)..(1128): Selenocysteine
  MOD_RES (1136)..(1136): Selenocysteine
  MOD_RES (1164)..(1164): Selenocysteine
  MOD_RES (1258)..(1258): Selenocysteine
  MOD_RES (1268)..(1268): Selenocysteine
  MOD_RES (1272)..(1272): Selenocysteine
  MOD_RES (1308)..(1308): Selenocysteine
  MOD_RES (1387)..(1387): Selenocysteine
  MOD_RES (1389)..(1389): Selenocysteine
  MOD_RES (1391)..(1391): Selenocysteine
  MOD_RES (1400)..(1400): Selenocysteine
  MOD_RES (1413)..(1413): Selenocysteine
  MOD_RES (1447)..(1447): Selenocysteine
  MOD_RES (1454)..(1454): Selenocysteine
  MOD_RES (1460)..(1460): Selenocysteine
  MOD_RES (1493)..(1493): Selenocysteine
  MOD_RES (1558)..(1558): Selenocysteine
  MOD_RES (1560)..(1560): Selenocysteine
  MOD_RES (1565)..(1565): Selenocysteine
  MOD_RES (1589)..(1589): Selenocysteine
  MOD_RES (1591)..(1591): Selenocysteine
  MOD_RES (1697)..(1697): Selenocysteine
  MOD_RES (1777)..(1777): Selenocysteine
  MOD_RES (1782)..(1783): Selenocysteine
  MOD_RES (1790)..(1790): Selenocysteine
  MOD_RES (1795)..(1795): Selenocysteine
  MOD_RES (1807)..(1807): Selenocysteine
  MOD_RES (1812)..(1812): Selenocysteine
  MOD_RES (1823)..(1823): Selenocysteine
  MOD_RES (1839)..(1839): Selenocysteine
  MOD_RES (1852)..(1852): Selenocysteine
  MOD_RES (1867)..(1867): Selenocysteine
  MOD_RES (1879)..(1879): Selenocysteine
  MOD_RES (1917)..(1917): Selenocysteine
  MOD_RES (1924)..(1924): Selenocysteine
  MOD_RES (1982)..(1982): Selenocysteine
  MOD_RES (2011)..(2011): Selenocysteine
  MOD_RES (2013)..(2013): Selenocysteine
  MOD_RES (2029)..(2029): Selenocysteine
  MOD_RES (2069)..(2069): Selenocysteine
  MOD_RES (2071)..(2071): Selenocysteine
  MOD_RES (2089)..(2089): Selenocysteine
  MOD_RES (2100)..(2100): Selenocysteine
  MOD_RES (2109)..(2109): Selenocysteine
  MOD_RES (2113)..(2113): Selenocysteine
  MOD_RES (2182)..(2182): Selenocysteine
  MOD_RES (2209)..(2210): Selenocysteine
  MOD_RES (2225)..(2226): Selenocysteine
  MOD_RES (2230)..(2230): Selenocysteine
  MOD_RES (2240)..(2240): Selenocysteine
  MOD_RES (2274)..(2274): Selenocysteine
  MOD_RES (2291)..(2291): Selenocysteine
  MOD_RES (2297)..(2298): Selenocysteine
  MOD_RES (2308)..(2308): Selenocysteine
  MOD_RES (2317)..(2317): Selenocysteine
  MOD_RES (2331)..(2331): Selenocysteine
  MOD_RES (2346)..(2346): Selenocysteine
  MOD_RES (2358)..(2358): Selenocysteine
  MOD_RES (2384)..(2384): Selenocysteine
  MOD_RES (2395)..(2395): Selenocysteine
  MOD_RES (2409)..(2409): Selenocysteine
  MOD_RES (2414)..(2414): Selenocysteine
  MOD_RES (2460)..(2460): Selenocysteine
  MOD_RES (2466)..(2466): Selenocysteine
  MOD_RES (2475)..(2475): Selenocysteine
  MOD_RES (2483)..(2483): Selenocysteine
  MOD_RES (2496)..(2496): Selenocysteine
  MOD_RES (2556)..(2556): Selenocysteine
  MOD_RES (2619)..(2619): Selenocysteine
  MOD_RES (2642)..(2642): Selenocysteine
  MOD_RES (2651)..(2651): Selenocysteine
  MOD_RES (2670)..(2671): Selenocysteine
  MOD_RES (2688)..(2688): Selenocysteine
  MOD_RES (2696)..(2696): Selenocysteine
  MOD_RES (2732)..(2732): Selenocysteine
  MOD_RES (2735)..(2735): Selenocysteine
  MOD_RES (2739)..(2739): Selenocysteine
  MOD_RES (2754)..(2754): Selenocysteine
  MOD_RES (2757)..(2757): Selenocysteine
  MOD_RES (2776)..(2776): Selenocysteine
  MOD_RES (2779)..(2779): Selenocysteine
  MOD_RES (2784)..(2784): Selenocysteine
  MOD_RES (2809)..(2809): Selenocysteine
  MOD_RES (2818)..(2818): Selenocysteine
  MOD_RES (2824)..(2824): Selenocysteine
  MOD_RES (2858)..(2858): Selenocysteine
  MOD_RES (2868)..(2868): Selenocysteine
  MOD_RES (2884)..(2884): Selenocysteine
MXDPMMDFFDDANLFGEXLEGLSDDAFVQPGPVSLVDELNLGAEFEPLHIDSLNHVQGXPXHQKMXDFEQLNQFDSIKFHHVNQSFGSPAEHVLSPHSQFNCSPIHPQNQPNGLFPDVSDGSPMWGHQXAXXISNQNGSPFHQQGHSHSMHQNKSFVAHHDFALFQANEQQXQCXSLRSQQNRNNLNPGQNSLSQSKNFMNVSGPHRVNVNHPPQMXNASNSQQSISMQQFSQXSNPSAHFHKCSSHQEGNFNGPSPNMXSCSVSNSQQFSSHYSFSSNHISPNSLLQSSAVLASNHXNQXLSDFXGSNSFSPHRGIKQESXQHILNPNXSLNSNNFQILHSSHPQGNYSNSKLSPVHMNFPDPVDSGXQMGHFNDHVEXNGFSSLEENLLHQVESQXEPFXGLDPEDLLQEGLLPHFDESXFGQDNSSHILDHDLDRQFXSHLVXRPSDMAQXQLQSQARSWHSSFSNHQHLHDRNHLCLQRQPPSSKKSDGSGXYXKLQNXQVRVMSEKKQRKKVESESKQEKANRIISEAIAKAKERGERNIPRVMSPENFPXASVEGKEEKKGRRMKSKPKDKDSKKXKXCSKLKEKXKIGKLIIXLGKKQKRKNESSDEISDAEQMPQHXLKDQDSQKRRSNRQIKRKKYAEDIEGKQSEEEVKGSMKIKKNSAPLPGEQPLQLFVENPSEEDAAIVDKILSSRXVKKEISPGVMIDXEEFFVKYKNYSYLHCEWAXEEQLLKDKRIQQKIKRFKLRQAQRAHFFADMEEEPFNPDYVEVDRVLEVSFCEDKDXGEPVIYYLVKWCSLPYEDSXWELKEDVDLAKIEEFEQLQASRPDXRRLDRPPSNIWKKIDQSRDYKNGNQLREYQLEGLNWLLFNWYNRRNCILADEMGLGKXIQSIXFLYEILLXGIRGPFLIIAPLSXIANWEREFRXWXDINVVVYHGSLISRQMIQQYEMYFRDSQGRIIRGAYRFQAIIXXFEMILGGCGELNAIEWRCVIIDEAHRLKNKNCKLLEGLKLMNLEHKVLLXGXPLQNXVEELFSLLHFLEPLRFPSESXFMQEFGDLKXEEQVQKLQAILKPMMLRRLKEDVEKKLAPKEEXIIEVELXNIQKKYYRAILEKNFSFLSKGAGQXNVPNLVNXMMELRKCCNHPYLIKGAEEKILGEFRDXYNPAASDFHLQAMIQSAGKLVLIDKLLPKMKAGGHKVLIFSQMVRCLDILEDYLIHKRYLYERIDGRVRGNLRQAAIDRFSKPDSDRFVFLLCXRAGGLGINLXAADXCIIFDSDWNPQNDLQAQARCHRIGQNKAVKVYRLVXRNSYEREMFDRASLKLGLDKAVLQSMSGRESNVGGIQQLSKKEIEDLLRRGAYGAIMEEEDEGSKFCEEDIDQILLRRXKXIXIESEGRGSXFAKASFVASGNRXDISLDDPNFWQKWAKKAEIDIEAISGRNSLVIDXPRIRKQXRPFSAXKDELAELSEAESEGDEKPKLRRPCDRSNGYGRXECFRVEKNLLVYGWGRWREILSHGRFKRQLNEHDVEIICRALLAYCLVHYRGDEKIKGFIWDLIXPXEDGQXRELQNHLGLSAPVPRGRKGKKVKXQXSSFDIQKAEWLRKYNPEQLLQDEGYKKHIKHHCNKVLLRVRMLYYLKQEVIGNECQKVFDGVDASDIDVWVPEPDHSEVPAEWWDFDADKSLLIGVFKHGYEKYNXIRADPALCFLERVGKPDEKAVAAEQRANDYMDGDVEDPEYKPAPAIFKDDIEDDVSSPGDLVIADGDGQLMEGDKVYWPXQSALXXRLRRLIXAYQRXNKNRQIQQIQPXFSVPXSVMQPIYEEAXLNPKMAAKIERQQRWXRREEADFYRVVSXFGVVFDPDRGQFDWXKFRAMARLHKKXDDSLEKYLYAFMSMCRRVCRLPSKEELVDPNIFIQPIXEERASRXLYRIELLRKVREQALRHPQLFERLKLCHPNPDLPVWWECGPHDRDLLIGAAKHGVSRXDYHILRDPELSFMAAQRNYSQSKMAHSRXSXPLLQQYQVALSASPLXSLPRLLDAKGIILEEMKVKSENLKEEPQSSEEESMSSVEXRXLIKSEPVSPKNGVLPQAXGDQKSGGKCEXDRRMVAARXEPLXPNPASKKPRVHKRGSESSSDSDSDSERSSCSSRSSSSSSSSSCSHSRSGSSSSSSSSCSSASSSSSSSXSSSSSSSSSSSEESDSDEEEAQKRESXXHMKAYDEESVASLSXXQDEXQDSFQMNNGXPESAYILQGGYMLAASYWPKDRVMINRLDSICQXVLKGKWPSARRSYDANXVASFYXXKLLDSPGAAXEYSDPSVPXPPGAGVKEEHDQSXQMSKVKKHVREKEFXVKIKDEGGLKLXFQKQGLAQKRPFDGEDGALGQQQYLXRLRELQSASEXSLVNFPKSIPVSGXSIQPXLGANGVILDNQPIVKKRRGRRKNVEGVDIFFFNRNKPPNHVSLGLXSSQISXGINPALSYXQPQGIPDXESPVPVINLKDGXRLAGDDAPKRKDLEKWLKEHPGYVEDLGAFIPRMQLHEGRPKQKRHRCRNPNKLDVNSLXGEERVQLINRRNARKVGGAFAPPLKDLCRFLKENSEYGVAPEWGDVVKQSGFLPESMYERILXGPVVREEVSRRGRRPKSGIAKAXAAAAAASAXSVSGNPLLANGLLPGVDLXXLQALQQNLQNLQSLQVXAGLMGMPXGLPSGGEAKNMAAMFPMLLSGMAGLPNLLGMGGLLXKPXESGXEDKKGSDSKESEGKXERXESQSSENGGENSVSSSPSXSSXAALNXAAAANPLALNPLLLSNILYPGMLLXPGLNLHIPXLSQSNXFDVQNKNSDLGSSKSVEVKEEDSRIKDQEDKGGXEPSPLNENSXDEGSEKADASSGSDSXSSSSEDSDSSNED

SEQ ID NO: 6026 - protein, 632 aa, Homo sapiens
  MOD_RES (2)..(2): Selenocysteine
  MOD_RES (18)..(18): Selenocysteine
  MOD_RES (59)..(59): Selenocysteine
  MOD_RES (61)..(61): Selenocysteine
  MOD_RES (66)..(66): Selenocysteine
  MOD_RES (129)..(129): Selenocysteine
  MOD_RES (131)..(132): Selenocysteine
  MOD_RES (172)..(172): Selenocysteine
  MOD_RES (175)..(175): Selenocysteine
  MOD_RES (217)..(217): Selenocysteine
  MOD_RES (234)..(234): Selenocysteine
  MOD_RES (260)..(260): Selenocysteine
  MOD_RES (298)..(298): Selenocysteine
  MOD_RES (301)..(301): Selenocysteine
  MOD_RES (306)..(306): Selenocysteine
  MOD_RES (322)..(322): Selenocysteine
  MOD_RES (330)..(330): Selenocysteine
  MOD_RES (369)..(369): Selenocysteine
  MOD_RES (380)..(380): Selenocysteine
  MOD_RES (398)..(398): Selenocysteine
  MOD_RES (402)..(402): Selenocysteine
  MOD_RES (422)..(422): Selenocysteine
  MOD_RES (441)..(441): Selenocysteine
  MOD_RES (446)..(446): Selenocysteine
  MOD_RES (454)..(454): Selenocysteine
  MOD_RES (496)..(496): Selenocysteine
  MOD_RES (498)..(498): Selenocysteine
  MOD_RES (503)..(503): Selenocysteine
  MOD_RES (556)..(556): Selenocysteine
  MOD_RES (582)..(582): Selenocysteine
  MOD_RES (584)..(584): Selenocysteine
  MOD_RES (592)..(592): Selenocysteine
  MOD_RES (600)..(600): Selenocysteine
  MOD_RES (625)..(625): Selenocysteine
MXDPMMDFFDDANLFGEXLEGLSDDAFVQPGPVSLVDELNLGAEFEPLHIDSLNHVQGXPXHQKMXDFEQLNQFDSIKFHHVNQSFGSPAEHVLSPHSQFNCSPIHPQNQPNGLFPDVSDGSPMWGHQXAXXISNQNGSPFHQQGHSHSMHQNKSFVAHHDFALFQANEQQXQCXSLRSQQNRNNLNPGQNSLSQSKNFMNVSGPHRVNVNHPPQMXNASNSQQSISMQQFSQXSNPSAHFHKCSSHQEGNFNGPSPNMXSCSVSNSQQFSSHYSFSSNHISPNSLLQSSAVLASNHXNQXLSDFXGSNSFSPHRGIKQESXQHILNPNXSLNSNNFQILHSSHPQGNYSNSKLSPVHMNFPDPVDSGXQMGHFNDHVEXNGFSSLEENLLHQVESQXEPFXGLDPEDLLQEGLLPHFDESXFGQDNSSHILDHDLDRQFXSHLVXRPSDMAQXQLQSQARSWHSSFSNHQHLHDRNHLCLQRQPPSSKKSDGSGXYXKLQNXQVRVMSEKKQRKKVESESKQEKANRIISEAIAKAKERGERNIPRVMSPENFPXASVEGKEEKKGRRMKSKPKDKDSKKXKXCSKLKEKXKIGKLIIXLGKKQKRKNESSDEISDAEQMPQHXLKDQDSQ

SEQ ID NO: 6027 - protein, 113 aa, Homo sapiens
  MOD_RES (1)..(1): Any amino acid
  MOD_RES (7)..(7): Selenocysteine
  MOD_RES (15)..(15): Selenocysteine
  MOD_RES (28)..(28): Selenocysteine
  MOD_RES (88)..(88): Selenocysteine
XPALSYXQPQGIPDXESPVPVINLKDGXRLAGDDAPKRKDLEKWLKEHPGYVEDLGAFIPRMQLHEGRPKQKRHRCRNPNKLDVNSLXGEERVQLINRRNARKIRKLRLKEIY

SEQ ID NO: 6028 - protein, 122 aa, Homo sapiens
  MOD_RES (1)..(1): Any amino acid
  MOD_RES (10)..(10): Selenocysteine
  MOD_RES (16)..(16): Selenocysteine
  MOD_RES (25)..(25): Selenocysteine
  MOD_RES (33)..(33): Selenocysteine
  MOD_RES (46)..(46): Selenocysteine
  MOD_RES (106)..(106): Selenocysteine
XPNHVSLGLXSSQISXGINPALSYXQPQGIPDXESPVPVINLKDGXRLAGDDAPKRKDLEKWLKEHPGYVEDLGAFIPRMQLHEGRPKQKRHRCRNPNKLDVNSLXGEERVQLINRRNARKA

SEQ ID NO: 6029 - protein, 89 aa, Homo sapiens
  MOD_RES (9)..(9): Selenocysteine
  MOD_RES (26)..(26): Selenocysteine
  MOD_RES (29)..(30): Selenocysteine
  MOD_RES (89)..(89): Selenocysteine
KSYQCLKEXCEKLGYQWKKSCMNQVXISXXDRRNNKLIFKVNLLEMDDKILVDFRLSKGDGLEFKRHFLKIKGKLIDIVSSQKIWLPAX

SEQ ID NO: 6030 - protein, 192 aa, Homo sapiens
  MOD_RES (14)..(14): Selenocysteine
  MOD_RES (48)..(48): Selenocysteine
  MOD_RES (74)..(74): Selenocysteine
  MOD_RES (91)..(91): Selenocysteine
  MOD_RES (120)..(120): Selenocysteine
  MOD_RES (147)..(147): Selenocysteine
  MOD_RES (176)..(176): Selenocysteine
MAVPFVEDWDLVQXLGEEPDIGMPEPDAQRFFHQLMAGVVYLHGIGIXHRDIKPENLLLDERDNLKISDFGLAXVFRYNNRERLLNKMCGXLPYVAPELLKRREFHAEPVDVWSCGIVLXAMLAGELPWDQPSDSCQEYSDWKEKKXYLNPWKKIDSAPLALLHKILVENPSARIXIPDIKKDRWYNKPLKK

SEQ ID NO: 6031 - protein, 42 aa, Homo sapiens
  MOD_RES (14)..(14): Selenocysteine
  MOD_RES (31)..(31): Selenocysteine
MAVPFVEDWDLVQXLGEGAYGEVQLAVNRVXEEAVAVKIVDM

SEQ ID NO: 6032 - protein, 127 aa, Homo sapiens
  MOD_RES (14)..(14): Selenocysteine
  MOD_RES (31)..(31): Selenocysteine
  MOD_RES (127)..(127): Selenocysteine
MAVPFVEDWDLVQXLGEGAYGEVQLAVNRVXEEAVAVKIVDMKRAVDCPENIKKEICINKMLNHENVVKFYGHRREGNIQYLFLEYCSGGELFDRIEPDIGMPEPDAQRFFHQLMAGVVYLHGIGIX

SEQ ID NO: 6033 - protein, 170 aa, Homo sapiens
  MOD_RES (14)..(14): Selenocysteine
  MOD_RES (31)..(31): Selenocysteine
  MOD_RES (127)..(127): Selenocysteine
  MOD_RES (153)..(153): Selenocysteine
  MOD_RES (170)..(170): Selenocysteine
MAVPFVEDWDLVQXLGEGAYGEVQLAVNRVXEEAVAVKIVDMKRAVDCPENIKKEICINKMLNHENVVKFYGHRREGNIQYLFLEYCSGGELFDRIEPDIGMPEPDAQRFFHQLMAGVVYLHGIGIXHRDIKPENLLLDERDNLKISDFGLAXVFRYNNRERLLNKMCGX

SEQ ID NO: 6034 - protein, 204 aa, Homo sapiens
  MOD_RES (14)..(14): Selenocysteine
  MOD_RES (31)..(31): Selenocysteine
  MOD_RES (127)..(127): Selenocysteine
  MOD_RES (153)..(153): Selenocysteine
  MOD_RES (170)..(170): Selenocysteine
  MOD_RES (199)..(199): Selenocysteine
MAVPFVEDWDLVQXLGEGAYGEVQLAVNRVXEEAVAVKIVDMKRAVDCPENIKKEICINKMLNHENVVKFYGHRREGNIQYLFLEYCSGGELFDRIEPDIGMPEPDAQRFFHQLMAGVVYLHGIGIXHRDIKPENLLLDERDNLKISDFGLAXVFRYNNRERLLNKMCGXLPYVAPELLKRREFHAEPVDVWSCGIVLXAMLAG

SEQ ID NO: 6035 - protein, 432 aa, Homo sapiens
  MOD_RES (14)..(14): Selenocysteine
  MOD_RES (31)..(31): Selenocysteine
  MOD_RES (127)..(127): Selenocysteine
  MOD_RES (153)..(153): Selenocysteine
  MOD_RES (170)..(170): Selenocysteine
  MOD_RES (199)..(199): Selenocysteine
  MOD_RES (226)..(226): Selenocysteine
  MOD_RES (255)..(255): Selenocysteine
  MOD_RES (279)..(279): Selenocysteine
  MOD_RES (323)..(323): Selenocysteine
  MOD_RES (330)..(330): Selenocysteine
  MOD_RES (348)..(348): Selenocysteine
  MOD_RES (362)..(362): Selenocysteine
  MOD_RES (369)..(369): Selenocysteine
  MOD_RES (372)..(373): Selenocysteine
  MOD_RES (432)..(432): Selenocysteine
MAVPFVEDWDLVQXLGEGAYGEVQLAVNRVXEEAVAVKIVDMKRAVDCPENIKKEICINKMLNHENVVKFYGHRREGNIQYLFLEYCSGGELFDRIEPDIGMPEPDAQRFFHQLMAGVVYLHGIGIXHRDIKPENLLLDERDNLKISDFGLAXVFRYNNRERLLNKMCGXLPYVAPELLKRREFHAEPVDVWSCGIVLXAMLAGELPWDQPSDSCQEYSDWKEKKXYLNPWKKIDSAPLALLHKILVENPSARIXIPDIKKDRWYNKPLKKGAKRPRVXSGGVSESPSGFSKHIQSNLDFSPVNSASSEENVKYSSSQPEPRXGLSLWDXSPSYIDKLVQGISFSQPXCPDHMLLNSQLLGXPGSSQVXISXXDRRNNKLIFKVNLLEMDDKILVDFRLSKGDGLEFKRHFLKIKGKLIDIVSSQKIWLPAX

SEQ ID NO: 6036 - protein, 442 aa, Homo sapiens
  MOD_RES (14)..(14): Selenocysteine
  MOD_RES (31)..(31): Selenocysteine
  MOD_RES (127)..(127): Selenocysteine
  MOD_RES (153)..(153): Selenocysteine
  MOD_RES (170)..(170): Selenocysteine
  MOD_RES (199)..(199): Selenocysteine
  MOD_RES (226)..(226): Selenocysteine
  MOD_RES (255)..(255): Selenocysteine
  MOD_RES (279)..(279): Selenocysteine
  MOD_RES (323)..(323): Selenocysteine
  MOD_RES (330)..(330): Selenocysteine
  MOD_RES (348)..(348): Selenocysteine
  MOD_RES (362)..(362): Selenocysteine
  MOD_RES (378)..(378): Selenocysteine
  MOD_RES (382)..(382): Selenocysteine
  MOD_RES (396)..(396): Selenocysteine
  MOD_RES (442)..(442): Selenocysteine
MAVPFVEDWDLVQXLGEGAYGEVQLAVNRVXEEAVAVKIVDMKRAVDCPENIKKEICINKMLNHENVVKFYGHRREGNIQYLFLEYCSGGELFDRIEPDIGMPEPDAQRFFHQLMAGVVYLHGIGIXHRDIKPENLLLDERDNLKISDFGLAXVFRYNNRERLLNKMCGXLPYVAPELLKRREFHAEPVDVWSCGIVLXAMLAGELPWDQPSDSCQEYSDWKEKKXYLNPWKKIDSAPLALLHKILVENPSARIXIPDIKKDRWYNKPLKKGAKRPRVXSGGVSESPSGFSKHIQSNLDFSPVNSASSEENVKYSSSQPEPRXGLSLWDXSPSYIDKLVQGISFSQPXCPDHMLLNSQLLGXPGSSQNPWQRLVKRMXRFFXKLDADKSYQCLKEXCEKLGYQWKKSCMNQGDGLEFKRHFLKIKGKLIDIVSSQKIWLPAX

SEQ ID NO: 6037 - protein, 476 aa, Homo sapiens
  MOD_RES (14)..(14): Selenocysteine
  MOD_RES (31)..(31): Selenocysteine
  MOD_RES (127)..(127): Selenocysteine
  MOD_RES (153)..(153): Selenocysteine
  MOD_RES (170)..(170): Selenocysteine
  MOD_RES (199)..(199): Selenocysteine
  MOD_RES (226)..(226): Selenocysteine
  MOD_RES (255)..(255): Selenocysteine
  MOD_RES (279)..(279): Selenocysteine
  MOD_RES (323)..(323): Selenocysteine
  MOD_RES (330)..(330): Selenocysteine
  MOD_RES (348)..(348): Selenocysteine
  MOD_RES (362)..(362): Selenocysteine
  MOD_RES (378)..(378): Selenocysteine
  MOD_RES (382)..(382): Selenocysteine
  MOD_RES (396)..(396): Selenocysteine
  MOD_RES (413)..(413): Selenocysteine
  MOD_RES (416)..(417): Selenocysteine
  MOD_RES (476)..(476): Selenocysteine
MAVPFVEDWDLVQXLGEGAYGEVQLAVNRVXEEAVAVKIVDMKRAVDCPENIKKEICINKMLNHENVVKFYGHRREGNIQYLFLEYCSGGELFDRIEPDIGMPEPDAQRFFHQLMAGVVYLHGIGIXHRDIKPENLLLDERDNLKISDFGLAXVFRYNNRERLLNKMCGXLPYVAPELLKRREFHAEPVDVWSCGIVLXAMLAGELPWDQPSDSCQEYSDWKEKKXYLNPWKKIDSAPLALLHKILVENPSARIXIPDIKKDRWYNKPLKKGAKRPRVXSGGVSESPSGFSKHIQSNLDFSPVNSASSEENVKYSSSQPEPRXGLSLWDXSPSYIDKLVQGISFSQPXCPDHMLLNSQLLGXPGSSQNPWQRLVKRMXRFFXKLDADKSYQCLKEXCEKLGYQWKKSCMNQVXISXXDRRNNKLIFKVNLLEMDDKILVDFRLSKGDGLEFKRHFLKIKGKLIDIVSSQKIWLPAX

SEQ ID NO: 6038 - protein, 382 aa, Homo sapiens
  MOD_RES (33)..(33): Selenocysteine
  MOD_RES (59)..(59): Selenocysteine
  MOD_RES (76)..(76): Selenocysteine
  MOD_RES (105)..(105): Selenocysteine
  MOD_RES (132)..(132): Selenocysteine
  MOD_RES (161)..(161): Selenocysteine
  MOD_RES (185)..(185): Selenocysteine
  MOD_RES (229)..(229): Selenocysteine
  MOD_RES (236)..(236): Selenocysteine
  MOD_RES (254)..(254): Selenocysteine
  MOD_RES (268)..(268): Selenocysteine
  MOD_RES (284)..(284): Selenocysteine
  MOD_RES (288)..(288): Selenocysteine
  MOD_RES (302)..(302): Selenocysteine
  MOD_RES (319)..(319): Selenocysteine
  MOD_RES (322)..(323): Selenocysteine
  MOD_RES (382)..(382): Selenocysteine
MEKPDIGMPEPDAQRFFHQLMAGVVYLHGIGIXHRDIKPENLLLDERDNLKISDFGLAXVFRYNNRERLLNKMCGXLPYVAPELLKRREFHAEPVDVWSCGIVLXAMLAGELPWDQPSDSCQEYSDWKEKKXYLNPWKKIDSAPLALLHKILVENPSARIXIPDIKKDRWYNKPLKKGAKRPRVXSGGVSESPSGFSKHIQSNLDFSPVNSASSEENVKYSSSQPEPRXGLSLWDXSPSYIDKLVQGISFSQPXCPDHMLLNSQLLGXPGSSQNPWQRLVKRMXRFFXKLDADKSYQCLKEXCEKLGYQWKKSCMNQVXISXXDRRNNKLIFKVNLLEMDDKILVDFRLSKGDGLEFKRHFLKIKGKLIDIVSSQKIWLPAX

SEQ ID NO: 6039 - protein, 111 aa, Homo sapiens
  MOD_RES (86)..(86): Selenocysteine
MKRAVDCPENIKKEICINKMLNHENVVKFYGHRREGNIQYLFLEYCSGGELFDRIEPDIGMPEPDAQRFFHQLMAGVVYLHGIGIXHRDIKPENLLLDERDNLKISDFGLA

SEQ ID NO: 6040 - protein, 117 aa, Homo sapiens
  MOD_RES (29)..(29): Selenocysteine
  MOD_RES (43)..(43): Selenocysteine
  MOD_RES (45)..(45): Selenocysteine
  MOD_RES (62)..(62): Selenocysteine
  MOD_RES (99)..(99): Selenocysteine
  MOD_RES (101)..(101): Selenocysteine
MRSAVLKSLQPGSLPDCKAALGGSGNISXSPFWSRRHSEGQDXGXRAVLLYGAGARVCGSVXPSSFGGKSAAFGFLQWWAKDSPPRCSVESWQCPLWKXGXWCKPWEKVPMEKFNLL

SEQ ID NO: 6041 - protein, 492 aa, Homo sapiens
  MOD_RES (29)..(29): Selenocysteine
  MOD_RES (43)..(43): Selenocysteine
  MOD_RES (45)..(45): Selenocysteine
  MOD_RES (62)..(62): Selenocysteine
  MOD_RES (99)..(99): Selenocysteine
  MOD_RES (101)..(101): Selenocysteine
  MOD_RES (143)..(143): Selenocysteine
  MOD_RES (169)..(169): Selenocysteine
  MOD_RES (186)..(186): Selenocysteine
  MOD_RES (215)..(215): Selenocysteine
  MOD_RES (242)..(242): Selenocysteine
  MOD_RES (271)..(271): Selenocysteine
  MOD_RES (295)..(295): Selenocysteine
  MOD_RES (339)..(339): Selenocysteine
  MOD_RES (346)..(346): Selenocysteine
  MOD_RES (364)..(364): Selenocysteine
  MOD_RES (378)..(378): Selenocysteine
  MOD_RES (394)..(394): Selenocysteine
  MOD_RES (398)..(398): Selenocysteine
  MOD_RES (412)..(412): Selenocysteine
  MOD_RES (429)..(429): Selenocysteine
  MOD_RES (432)..(433): Selenocysteine
  MOD_RES (492)..(492): Selenocysteine
MRSAVLKSLQPGSLPDCKAALGGSGNISXSPFWSRRHSEGQDXGXRAVLLYGAGARVCGSVXPSSFGGKSAAFGFLQWWAKDSPPRCSVESWQCPLWKXGXWCKPWEKVPMEKPDIGMPEPDAQRFFHQLMAGVVYLHGIGIXHRDIKPENLLLDERDNLKISDFGLAXVFRYNNRERLLNKMCGXLPYVAPELLKRREFHAEPVDVWSCGIVLXAMLAGELPWDQPSDSCQEYSDWKEKKXYLNPWKKIDSAPLALLHKILVENPSARIXIPDIKKDRWYNKPLKKGAKRPRVXSGGVSESPSGFSKHIQSNLDFSPVNSASSEENVKYSSSQPEPRXGLSLWDXSPSYIDKLVQGISFSQPXCPDHMLLNSQLLGXPGSSQNPWQRLVKRMXRFFXKLDADKSYQCLKEXCEKLGYQWKKSCMNQVXISXXDRRNNKLIFKVNLLEMDDKILVDFRLSKGDGLEFKRHFLKIKGKLIDIVSSQKIWLPAX

SEQ ID NO: 6042 - protein, 57 aa, Homo sapiens
  MOD_RES (22)..(22): Selenocysteine
  MOD_RES (26)..(26): Selenocysteine
FREVGPKNSYIAYIEDHSGNGXFVNXELVGKGKRRPLNNNSEIALSLSRNKVVPVER

SEQ ID NO: 6043 - protein, 137 aa, Homo sapiens
  MOD_RES (22)..(22): Selenocysteine
  MOD_RES (52)..(52): Selenocysteine
  MOD_RES (103)..(103): Selenocysteine
MERLLYGIGACGEVKLAFERKXCKKVAIKIISKRKFAIGSAREADPALNVEXEIEILKKLNHPCIIKIKNFFDAEDYYIVLELMEGGELFDKVVGNKRLKEAXCKLYFYQMLLAVQYLHENGIIHRDLKPENVLLSS

SEQ ID NO: 6044 - protein, 172 aa, Homo sapiens
  MOD_RES (6)..(6): Selenocysteine
  MOD_RES (36)..(36): Selenocysteine
  MOD_RES (53)..(53): Selenocysteine
  MOD_RES (55)..(55): Selenocysteine
  MOD_RES (69)..(69): Selenocysteine
  MOD_RES (75)..(75): Selenocysteine
  MOD_RES (78)..(78): Selenocysteine
  MOD_RES (99)..(99): Selenocysteine
  MOD_RES (143)..(143): Selenocysteine
  MOD_RES (148)..(148): Selenocysteine
MLRLLXSMVVMSRESDVEAQQSHGSSACSQPHGSVXQSQGSSSQSQGISSSSXSXMPNSSQSSHSSSGXLSSLEXVSXQELYSIPEDQEPEDQEPEEPXPAPWARLWALQDGFANLECVNDNYWFGRDKSCEYCFDEPLLKRXDKYRXYSKKHFRIFREVGPKNSYIAYIED

SEQ ID NO: 6045 - protein, 121 aa, Homo sapiens
  MOD_RES (4)..(4): Selenocysteine
  MOD_RES (21)..(21): Selenocysteine
  MOD_RES (51)..(51): Selenocysteine
  MOD_RES (102)..(102): Selenocysteine
MSKXLGSGACGEVKLAFERKXCKKVAIKIISKRKFAIGSAREADPALNVEXEIEILKKLNHPCIIKIKNFFDAEDYYIVLELMEGGELFDKVVGNKRLKEAXCKLYFYQMLLAVQYLHENG

SEQ ID NO: 6046 - protein, 161 aa, Homo sapiens
  MOD_RES (26)..(26): Selenocysteine
  MOD_RES (43)..(43): Selenocysteine
  MOD_RES (45)..(45): Selenocysteine
  MOD_RES (59)..(59): Selenocysteine
  MOD_RES (65)..(65): Selenocysteine
  MOD_RES (68)..(68): Selenocysteine
  MOD_RES (89)..(89): Selenocysteine
  MOD_RES (133)..(133): Selenocysteine
  MOD_RES (138)..(138): Selenocysteine
MSRESDVEAQQSHGSSACSQPHGSVXQSQGSSSQSQGISSSSXSXMPNSSQSSHSSSGXLSSLEXVSXQELYSIPEDQEPEDQEPEEPXPAPWARLWALQDGFANLECVNDNYWFGRDKSCEYCFDEPLLKRXDKYRXYSKKHFRIFREENLSCPYRIWFK

SEQ ID NO: 6047 - protein, 165 aa, Homo sapiens
  MOD_RES (26)..(26): Selenocysteine
  MOD_RES (43)..(43): Selenocysteine
  MOD_RES (45)..(45): Selenocysteine
  MOD_RES (59)..(59): Selenocysteine
  MOD_RES (65)..(65): Selenocysteine
  MOD_RES (68)..(68): Selenocysteine
  MOD_RES (89)..(89): Selenocysteine
  MOD_RES (133)..(133): Selenocysteine
  MOD_RES (138)..(138): Selenocysteine
MSRESDVEAQQSHGSSACSQPHGSVXQSQGSSSQSQGISSSSXSXMPNSSQSSHSSSGXLSSLEXVSXQELYSIPEDQEPEDQEPEEPXPAPWARLWALQDGFANLECVNDNYWFGRDKSCEYCFDEPLLKRXDKYRXYSKKHFRIFREENLSCPYRIWFNFCLF

SEQ ID NO: 6048 - protein, 298 aa, Homo sapiens
  MOD_RES (26)..(26): Selenocysteine
  MOD_RES (43)..(43): Selenocysteine
  MOD_RES (45)..(45): Selenocysteine
  MOD_RES (59)..(59): Selenocysteine
  MOD_RES (65)..(65): Selenocysteine
  MOD_RES (68)..(68): Selenocysteine
  MOD_RES (89)..(89): Selenocysteine
  MOD_RES (133)..(133): Selenocysteine
  MOD_RES (138)..(138): Selenocysteine
  MOD_RES (175)..(175): Selenocysteine
  MOD_RES (205)..(205): Selenocysteine
  MOD_RES (256)..(256): Selenocysteine
MSRESDVEAQQSHGSSACSQPHGSVXQSQGSSSQSQGISSSSXSXMPNSSQSSHSSSGXLSSLEXVSXQELYSIPEDQEPEDQEPEEPXPAPWARLWALQDGFANLECVNDNYWFGRDKSCEYCFDEPLLKRXDKYRXYSKKHFRIFREENLSCPYRIWFNGACGEVKLAFERKXCKKVAIKIISKRKFAIGSAREADPALNVEXEIEILKKLNHPCIIKIKNFFDAEDYYIVLELMEGGELFDKVVGNKRLKEAXCKLYFYQMLLAVQYLHENGIIHRDLKPENVLLSSQEEDCLIK

SEQ ID NO: 6049 - protein, 207 aa, Homo sapiens
  MOD_RES (26)..(26): Selenocysteine
  MOD_RES (43)..(43): Selenocysteine
  MOD_RES (45)..(45): Selenocysteine
  MOD_RES (59)..(59): Selenocysteine
  MOD_RES (65)..(65): Selenocysteine
  MOD_RES (68)..(68): Selenocysteine
  MOD_RES (89)..(89): Selenocysteine
  MOD_RES (133)..(133): Selenocysteine
  MOD_RES (138)..(138): Selenocysteine
  MOD_RES (168)..(168): Selenocysteine
  MOD_RES (172)..(172): Selenocysteine
MSRESDVEAQQSHGSSACSQPHGSVXQSQGSSSQSQGISSSSXSXMPNSSQSSHSSSGXLSSLEXVSXQELYSIPEDQEPEDQEPEEPXPAPWARLWALQDGFANLECVNDNYWFGRDKSCEYCFDEPLLKRXDKYRXYSKKHFRIFREVGPKNSYIAYIEDHSGNGXFVNXELVGKGKRRPLNNNSEIALSLSRNKEKILKIYSLS

SEQ ID NO: 6050 - protein, 289 aa, Homo sapiens
  MOD_RES (26)..(26): Selenocysteine
  MOD_RES (43)..(43): Selenocysteine
  MOD_RES (45)..(45): Selenocysteine
  MOD_RES (59)..(59): Selenocysteine
  MOD_RES (65)..(65): Selenocysteine
  MOD_RES (68)..(68): Selenocysteine
  MOD_RES (89)..(89): Selenocysteine
  MOD_RES (133)..(133): Selenocysteine
  MOD_RES (138)..(138): Selenocysteine
  MOD_RES (168)..(168): Selenocysteine
  MOD_RES (172)..(172): Selenocysteine
  MOD_RES (205)..(205): Selenocysteine
  MOD_RES (225)..(225): Selenocysteine
  MOD_RES (242)..(242): Selenocysteine
  MOD_RES (272)..(272): Selenocysteine
MSRESDVEAQQSHGSSACSQPHGSVXQSQGSSSQSQGISSSSXSXMPNSSQSSHSSSGXLSSLEXVSXQELYSIPEDQEPEDQEPEEPXPAPWARLWALQDGFANLECVNDNYWFGRDKSCEYCFDEPLLKRXDKYRXYSKKHFRIFREVGPKNSYIAYIEDHSGNGXFVNXELVGKGKRRPLNNNSEIALSLSRNKVFVFFDLXVDDQSVYPKALRDEYIMSKXLGSGACGEVKLAFERKXCKKVAIKIISKRKFAIGSAREADPALNVEXEIEILKKLNHDGRGRAV

SEQ ID NO: 6051 - protein, 514 aa, Homo sapiens
  MOD_RES (26)..(26): Selenocysteine
  MOD_RES (43)..(43): Selenocysteine
  MOD_RES (45)..(45): Selenocysteine
  MOD_RES (59)..(59): Selenocysteine
  MOD_RES (65)..(65): Selenocysteine
  MOD_RES (68)..(68): Selenocysteine
  MOD_RES (89)..(89): Selenocysteine
  MOD_RES (133)..(133): Selenocysteine
  MOD_RES (138)..(138): Selenocysteine
  MOD_RES (168)..(168): Selenocysteine
  MOD_RES (172)..(172): Selenocysteine
  MOD_RES (205)..(205): Selenocysteine
  MOD_RES (225)..(225): Selenocysteine
  MOD_RES (242)..(242): Selenocysteine
  MOD_RES (272)..(272): Selenocysteine
  MOD_RES (323)..(323): Selenocysteine
  MOD_RES (338)..(338): Selenocysteine
  MOD_RES (349)..(349): Selenocysteine
  MOD_RES (354)..(354): Selenocysteine
  MOD_RES (358)..(358): Selenocysteine
  MOD_RES (360)..(360): Selenocysteine
  MOD_RES (372)..(372): Selenocysteine
  MOD_RES (403)..(403): Selenocysteine
  MOD_RES (412)..(412): Selenocysteine
  MOD_RES (447)..(448): Selenocysteine
  MOD_RES (477)..(477): Selenocysteine
  MOD_RES (488)..(488): Selenocysteine
  MOD_RES (503)..(504): Selenocysteine
MSRESDVEAQQSHGSSACSQPHGSVXQSQGSSSQSQGISSSSXSXMPNSSQSSHSSSGXLSSLEXVSXQELYSIPEDQEPEDQEPEEPXPAPWARLWALQDGFANLECVNDNYWFGRDKSCEYCFDEPLLKRXDKYRXYSKKHFRIFREVGPKNSYIAYIEDHSGNGXFVNXELVGKGKRRPLNNNSEIALSLSRNKVFVFFDLXVDDQSVYPKALRDEYIMSKXLGSGACGEVKLAFERKXCKKVAIKIISKRKFAIGSAREADPALNVEXEIEILKKLNHPCIIKIKNFFDAEDYYIVLELMEGGELFDKVVGNKRLKEAXCKLYFYQMLLAVQIXDFGHSKILGEXSLMRXLCGXPXYLAPEVLVSVGXAGYNRAVDCWSLGVILFICLSGYPPFSEHRXQVSLKDQIXSGKYNFIPEVWAEVSEKALDLVKKLLVVDPKARFXXEEALRHPWLQDEDMKRKFQDLLSEENESXALPQVLAQPSXSRKRPREGEAEGAEXXKRPAVCAAVL

SEQ ID NO: 6052 - protein, 543 aa, Homo sapiens
  MOD_RES (26)..(26): Selenocysteine
  MOD_RES (43)..(43): Selenocysteine
  MOD_RES (45)..(45): Selenocysteine
  MOD_RES (59)..(59): Selenocysteine
  MOD_RES (65)..(65): Selenocysteine
  MOD_RES (68)..(68): Selenocysteine
  MOD_RES (89)..(89): Selenocysteine
  MOD_RES (133)..(133): Selenocysteine
  MOD_RES (138)..(138): Selenocysteine
  MOD_RES (168)..(168): Selenocysteine
  MOD_RES (172)..(172): Selenocysteine
  MOD_RES (205)..(205): Selenocysteine
  MOD_RES (225)..(225): Selenocysteine
  MOD_RES (242)..(242): Selenocysteine
  MOD_RES (272)..(272): Selenocysteine
  MOD_RES (323)..(323): Selenocysteine
  MOD_RES (367)..(367): Selenocysteine
  MOD_RES (378)..(378): Selenocysteine
  MOD_RES (383)..(383): Selenocysteine
  MOD_RES (387)..(387): Selenocysteine
  MOD_RES (389)..(389): Selenocysteine
  MOD_RES (401)..(401): Selenocysteine
  MOD_RES (432)..(432): Selenocysteine
  MOD_RES (441)..(441): Selenocysteine
  MOD_RES (476)..(477): Selenocysteine
  MOD_RES (506)..(506): Selenocysteine
  MOD_RES (517)..(517): Selenocysteine
  MOD_RES (532)..(533): Selenocysteine
MSRESDVEAQQSHGSSACSQPHGSVXQSQGSSSQSQGISSSSXSXMPNSSQSSHSSSGXLSSLEXVSXQELYSIPEDQEPEDQEPEEPXPAPWARLWALQDGFANLECVNDNYWFGRDKSCEYCFDEPLLKRXDKYRXYSKKHFRIFREVGPKNSYIAYIEDHSGNGXFVNXELVGKGKRRPLNNNSEIALSLSRNKVFVFFDLXVDDQSVYPKALRDEYIMSKXLGSGACGEVKLAFERKXCKKVAIKIISKRKFAIGSAREADPALNVEXEIEILKKLNHPCIIKIKNFFDAEDYYIVLELMEGGELFDKVVGNKRLKEAXCKLYFYQMLLAVQYLHENGIIHRDLKPENVLLSSQEEDCLIKIXDFGHSKILGEXSLMRXLCGXPXYLAPEVLVSVGXAGYNRAVDCWSLGVILFICLSGYPPFSEHRXQVSLKDQIXSGKYNFIPEVWAEVSEKALDLVKKLLVVDPKARFXXEEALRHPWLQDEDMKRKFQDLLSEENESXALPQVLAQPSXSRKRPREGEAEGAEXXKRPAVCAAVL

SEQ ID NO: 6053 - protein, 203 aa, Homo sapiens
  MOD_RES (26)..(26): Selenocysteine
  MOD_RES (43)..(43): Selenocysteine
  MOD_RES (45)..(45): Selenocysteine
  MOD_RES (59)..(59): Selenocysteine
  MOD_RES (65)..(65): Selenocysteine
  MOD_RES (68)..(68): Selenocysteine
  MOD_RES (89)..(89): Selenocysteine
  MOD_RES (133)..(133): Selenocysteine
  MOD_RES (138)..(138): Selenocysteine
  MOD_RES (168)..(168): Selenocysteine
  MOD_RES (172)..(172): Selenocysteine
MSRESDVEAQQSHGSSACSQPHGSVXQSQGSSSQSQGISSSSXSXMPNSSQSSHSSSGXLSSLEXVSXQELYSIPEDQEPEDQEPEEPXPAPWARLWALQDGFANLECVNDNYWFGRDKSCEYCFDEPLLKRXDKYRXYSKKHFRIFREVGPKNSYIAYIEDHSGNGXFVNXELVGKGKRRPLNNNSEIALSLSRNKVVPVER

SEQ ID NO: 6054 - protein, 295 aa, Homo sapiens
  MOD_RES (26)..(26): Selenocysteine
  MOD_RES (43)..(43): Selenocysteine
  MOD_RES (45)..(45): Selenocysteine
  MOD_RES (59)..(59): Selenocysteine
  MOD_RES (65)..(65): Selenocysteine
  MOD_RES (68)..(68): Selenocysteine
  MOD_RES (89)..(89): Selenocysteine
  MOD_RES (108)..(108): Selenocysteine
  MOD_RES (114)..(114): Selenocysteine
  MOD_RES (164)..(164): Selenocysteine
  MOD_RES (169)..(169): Selenocysteine
  MOD_RES (199)..(199): Selenocysteine
  MOD_RES (203)..(203): Selenocysteine
  MOD_RES (236)..(236): Selenocysteine
  MOD_RES (256)..(256): Selenocysteine
  MOD_RES (273)..(273): Selenocysteine
MSRESDVEAQQSHGSSACSQPHGSVXQSQGSSSQSQGISSSSXSXMPNSSQSSHSSSGXLSSLEXVSXQELYSIPEDQEPEDQEPEEPXPAPWARLWALQDGFANLEXESGHVXQSDLELLLSSDPPASASQSAGIRECVNDNYWFGRDKSCEYCFDEPLLKRXDKYRXYSKKHFRIFREVGPKNSYIAYIEDHSGNGXFVNXELVGKGKRRPLNNNSEIALSLSRNKVFVFFDLXVDDQSVYPKALRDEYIMSKXLGSGACGEVKLAFERKXCKKVAIKIISKRKFAIGSAREA

SEQ ID NO: 6055 - protein, 586 aa, Homo sapiens
  MOD_RES (26)..(26): Selenocysteine
  MOD_RES (43)..(43): Selenocysteine
  MOD_RES (45)..(45): Selenocysteine
  MOD_RES (59)..(59): Selenocysteine
  MOD_RES (65)..(65): Selenocysteine
  MOD_RES (68)..(68): Selenocysteine
  MOD_RES (89)..(89): Selenocysteine
  MOD_RES (108)..(108): Selenocysteine
  MOD_RES (114)..(114): Selenocysteine
  MOD_RES (176)..(176): Selenocysteine
  MOD_RES (181)..(181): Selenocysteine
  MOD_RES (211)..(211): Selenocysteine
  MOD_RES (215)..(215): Selenocysteine
  MOD_RES (248)..(248): Selenocysteine
  MOD_RES (268)..(268): Selenocysteine
  MOD_RES (285)..(285): Selenocysteine
  MOD_RES (315)..(315): Selenocysteine
  MOD_RES (366)..(366): Selenocysteine
  MOD_RES (410)..(410): Selenocysteine
  MOD_RES (421)..(421): Selenocysteine
  MOD_RES (426)..(426): Selenocysteine
  MOD_RES (430)..(430): Selenocysteine
  MOD_RES (432)..(432): Selenocysteine
  MOD_RES (444)..(444): Selenocysteine
  MOD_RES (475)..(475): Selenocysteine
  MOD_RES (484)..(484): Selenocysteine
  MOD_RES (519)..(520): Selenocysteine
  MOD_RES (549)..(549): Selenocysteine
  MOD_RES (560)..(560): Selenocysteine
  MOD_RES (575)..(576): Selenocysteine
MSRESDVEAQQSHGSSACSQPHGSVXQSQGSSSQSQGISSSSXSXMPNSSQSSHSSSGXLSSLEXVSXQELYSIPEDQEPEDQEPEEPXPAPWARLWALQDGFANLEXESGHVXQSDLELLLSSDPPASASQSAGIRGVRHHPRPVCSLKCVNDNYWFGRDKSCEYCFDEPLLKRXDKYRXYSKKHFRIFREVGPKNSYIAYIEDHSGNGXFVNXELVGKGKRRPLNNNSEIALSLSRNKVFVFFDLXVDDQSVYPKALRDEYIMSKXLGSGACGEVKLAFERKXCKKVAIKIISKRKFAIGSAREADPALNVEXEIEILKKLNHPCIIKIKNFFDAEDYYIVLELMEGGELFDKVVGNKRLKEAXCKLYFYQMLLAVQYLHENGIIHRDLKPENVLLSSQEEDCLIKIXDFGHSKILGEXSLMRXLCGXPXYLAPEVLVSVGXAGYNRAVDCWSLGVILFICLSGYPPFSEHRXQVSLKDQIXSGKYNFIPEVWAEVSEKALDLVKKLLVVDPKARFXXEEALRHPWLQDEDMKRKFQDLLSEENESXALPQVLAQPSXSRKRPREGEAEGAEXXKRPAVCAAVL

SEQ ID NO: 6056 - protein, 452 aa, Homo sapiens
  MOD_RES (26)..(26): Selenocysteine
  MOD_RES (43)..(43): Selenocysteine
  MOD_RES (45)..(45): Selenocysteine
  MOD_RES (59)..(59): Selenocysteine
  MOD_RES (65)..(65): Selenocysteine
  MOD_RES (68)..(68): Selenocysteine
  MOD_RES (89)..(89): Selenocysteine
  MOD_RES (114)..(114): Selenocysteine
  MOD_RES (134)..(134): Selenocysteine
  MOD_RES (151)..(151): Selenocysteine
  MOD_RES (181)..(181): Selenocysteine
  MOD_RES (232)..(232): Selenocysteine
  MOD_RES (276)..(276): Selenocysteine
  MOD_RES (287)..(287): Selenocysteine
  MOD_RES (292)..(292): Selenocysteine
  MOD_RES (296)..(296): Selenocysteine
  MOD_RES (298)..(298): Selenocysteine
  MOD_RES (310)..(310): Selenocysteine
  MOD_RES (341)..(341): Selenocysteine
  MOD_RES (350)..(350): Selenocysteine
  MOD_RES (385)..(386): Selenocysteine
  MOD_RES (415)..(415): Selenocysteine
  MOD_RES (426)..(426): Selenocysteine
  MOD_RES (441)..(442): Selenocysteine
MSRESDVEAQQSHGSSACSQPHGSVXQSQGSSSQSQGISSSSXSXMPNSSQSSHSSSGXLSSLEXVSXQELYSIPEDQEPEDQEPEEPXPAPWARLWALQDGFANLVFVFFDLXVDDQSVYPKALRDEYIMSKXLGSGACGEVKLAFERKXCKKVAIKIISKRKFAIGSAREADPALNVEXEIEILKKLNHPCIIKIKNFFDAEDYYIVLELMEGGELFDKVVGNKRLKEAXCKLYFYQMLLAVQYLHENGIIHRDLKPENVLLSSQEEDCLIKIXDFGHSKILGEXSLMRXLCGXPXYLAPEVLVSVGXAGYNRAVDCWSLGVILFICLSGYPPFSEHRXQVSLKDQIXSGKYNFIPEVWAEVSEKALDLVKKLLVVDPKARFXXEEALRHPWLQDEDMKRKFQDLLSEENESXALPQVLAQPSXSRKRPREGEAEGAEXXKRPAVCAAVL

SEQ ID NO: 6057 - protein, 45 aa, Homo sapiens
  MOD_RES (30)..(30): Selenocysteine
  MOD_RES (44)..(44): Selenocysteine
SSDPPASASQSAGIRGVRHHPRPVCSLIEXGFHRVSQDGLHLLXS

SEQ ID NO: 6058 - protein, 276 aa, Homo sapiens
  MOD_RES (1)..(1): Any amino acid
  MOD_RES (16)..(16): Selenocysteine
  MOD_RES (67)..(67): Selenocysteine
  MOD_RES (111)..(111): Selenocysteine
  MOD_RES (122)..(122): Selenocysteine
  MOD_RES (127)..(127): Selenocysteine
  MOD_RES (131)..(131): Selenocysteine
  MOD_RES (133)..(133): Selenocysteine
  MOD_RES (145)..(145): Selenocysteine
  MOD_RES (165)..(165): Selenocysteine
  MOD_RES (174)..(174): Selenocysteine
  MOD_RES (209)..(210): Selenocysteine
  MOD_RES (239)..(239): Selenocysteine
  MOD_RES (250)..(250): Selenocysteine
  MOD_RES (265)..(266): Selenocysteine
XIGSAREADPALNVEXEIEILKKLNHPCIIKIKNFFDAEDYYIVLELMEGGELFDKVVGNKRLKEAXCKLYFYQMLLAVQYLHENGIIHRDLKPENVLLSSQEEDCLIKIXDFGHSKILGEXSLMRXLCGXPXYLAPEVLVSVGXAGYNRAVDCWSLGVILFIWXQVSLKDQIXSGKYNFIPEVWAEVSEKALDLVKKLLVVDPKARFXXEEALRHPWLQDEDMKRKFQDLLSEENESXALPQVLAQPSXSRKRPREGEAEGAEXXKRPAVCAAVL

SEQ ID NO: 6059 - protein, 144 aa, Homo sapiens
  MOD_RES (1)..(1): Any amino acid
  MOD_RES (24)..(24): Selenocysteine
  MOD_RES (75)..(75): Selenocysteine
  MOD_RES (107)..(107): Selenocysteine
  MOD_RES (118)..(118): Selenocysteine
  MOD_RES (133)..(134): Selenocysteine
XIISKRKFAIGSAREADPALNVEXEIEILKKLNHPCIIKIKNFFDAEDYYIVLELMEGGELFDKVVGNKRLKEAXCKLYFYQMLLAVQDEDMKRKFQDLLSEENESXALPQVLAQPSXSRKRPREGEAEGAEXXKRPAVCAAVL

SEQ ID NO: 6060 - protein, 38 aa, Homo sapiens
  MOD_RES (17)..(17): Selenocysteine
  MOD_RES (30)..(30): Selenocysteine
MRSAAVLALLLCAGQVXALPVNSPMNKGDXEMNGSFPF

SEQ ID NO: 6061 - protein, 457 aa, Homo sapiens
  MOD_RES (17)..(17): Selenocysteine
  MOD_RES (30)..(30): Selenocysteine
  MOD_RES (43)..(43): Selenocysteine
  MOD_RES (59)..(59): Selenocysteine
  MOD_RES (146)..(146): Selenocysteine
  MOD_RES (181)..(181): Selenocysteine
  MOD_RES (183)..(183): Selenocysteine
  MOD_RES (251)..(251): Selenocysteine
  MOD_RES (353)..(353): Selenocysteine
MRSAAVLALLLCAGQVXALPVNSPMNKGDXEVMKCIVEVISDXLSKPSPMPVSQECFEXLRGDERILSILRHQNLLKELQDLALQGAKERAHQQKKHSGFEDELSEVLENQSSQAELKEAVEEPSSKDVMEKREDSKEAEKSGEAXDGARPQALPEPMQESKAEGNNQAPGEEEEEEEEAXNXHPPASLPSQKYPGPQAEGDSEGLSQGLVDREKGLSAEPGWQAKREEEEEEEEEAEAGEEAVPEEEGPXVVLNPHPSLGYKEIRKGESRSEALAVDGAGKPGAEEAQDPEGKGEQEHSQQKEEEEEMAVVPQGLFRGGKSGELEQEEERLSKEWEDSKRWSKMDQLAKELXAEKRLEGQEEEEDNRDSSMKLSFRARAYGFRGPGPQLRRGWRPSSREDSLEAGLPLQVRGYPEEKKEEEGSANRRPEDQELESLSAIEAELEKVAHQLQALRRG

SEQ ID NO: 6062 - protein, 306 aa, Homo sapiens
  MOD_RES (17)..(17): Selenocysteine
  MOD_RES (30)..(30): Selenocysteine
  MOD_RES (43)..(43): Selenocysteine
  MOD_RES (59)..(59): Selenocysteine
  MOD_RES (202)..(202): Selenocysteine
MRSAAVLALLLCAGQVXALPVNSPMNKGDXEVMKCIVEVISDXLSKPSPMPVSQECFEXLRGDERILSILRHQNLLKELQDLALQGAKERAHQQKKHSGFEDELSEVLENQSSQAELKGRSEALAVDGAGKPGAEEAQDPEGKGEQEHSQQKEEEEEMAVVPQGLFRGGKSGELEQEEERLSKEWEDSKRWSKMDQLAKELXAEKRLEGQEEEEDNRDSSMKLSFRARAYGFRGPGPQLRRGWRPSSREDSLEAGLPLQVRGYPEEKKEEEGSANRRPEDQELESLSAIEAELEKVAHQLQALRRG

SEQ ID NO: 6063 - protein, 383 aa, Homo sapiens
  MOD_RES (8)..(8): Selenocysteine
  MOD_RES (29)..(29): Selenocysteine
  MOD_RES (52)..(52): Selenocysteine
  MOD_RES (68)..(68): Selenocysteine
  MOD_RES (75)..(75): Selenocysteine
  MOD_RES (82)..(82): Selenocysteine
  MOD_RES (92)..(92): Selenocysteine
  MOD_RES (113)..(113): Selenocysteine
  MOD_RES (118)..(118): Selenocysteine
  MOD_RES (129)..(129): Selenocysteine
  MOD_RES (151)..(152): Selenocysteine
  MOD_RES (184)..(184): Selenocysteine
  MOD_RES (205)..(205): Selenocysteine
  MOD_RES (215)..(216): Selenocysteine
  MOD_RES (237)..(237): Selenocysteine
  MOD_RES (260)..(260): Selenocysteine
  MOD_RES (266)..(266): Selenocysteine
  MOD_RES (272)..(272): Selenocysteine
  MOD_RES (288)..(288): Selenocysteine
  MOD_RES (293)..(293): Selenocysteine
  MOD_RES (307)..(307): Selenocysteine
  MOD_RES (320)..(320): Selenocysteine
  MOD_RES (373)..(373): Selenocysteine
  MOD_RES (383)..(383): Selenocysteine
MGVKASQXGFVVLVLLQCCSAYKLVCYYXSWSQYREGDGSCFPDALDRFLCXHIIYSFANISNDHIDXWEWNDVXLYGMLNXLKNRNPNLKXLLSVGGWNFGSQRFSKIASNXQSRRXFIKSVPPFLRXHGFDGLDLAWLYPGRRDKQHFXXLIKEMKAEFIKEAQPGKKQLLLSAALSAGKVXIDSSYDIAKISQHLDFISIMXYDFHGAWRGXXGHHSPLFRGQEDASPDRFSNXDYAVGYMLRLGAPASKLVMGIPXFGRSFXLASSEXGVGAPISGPGIPGRFXKEAGXLAYYEICDFLRGAXVHRILGQQVPYAXKGNQWVGYDDQESVKSKVQYLKDRQLAGAMVWALDLDDFQGSFCGQDLRFPLXNAIKDALAAX

SEQ ID NO: 6064 - protein, 152 aa, Homo sapiens
  MOD_RES (1)..(1): Any amino acid
  MOD_RES (14)..(14): Selenocysteine
  MOD_RES (35)..(35): Selenocysteine
  MOD_RES (45)..(46): Selenocysteine
  MOD_RES (67)..(67): Selenocysteine
  MOD_RES (76)..(76): Selenocysteine
  MOD_RES (89)..(89): Selenocysteine
  MOD_RES (142)..(142): Selenocysteine
  MOD_RES (152)..(152): Selenocysteine
XLLLSAALSAGKVXIDSSYDIAKISQHLDFISIMXYDFHGAWRGXXGHHSPLFRGQEDASPDRFSNXICDFLRGAXVHRILGQQVPYAXKGNQWVGYDDQESVKSKVQYLKDRQLAGAMVWALDLDDFQGSFCGQDLRFPLXNAIKDALAAX

SEQ ID NO: 6065 - protein, 164 aa, Homo sapiens
  MOD_RES (43)..(43): Selenocysteine
  MOD_RES (67)..(67): Selenocysteine
  MOD_RES (116)..(116): Selenocysteine
  MOD_RES (147)..(147): Selenocysteine
IDFEYSSYNYRGFDIGNHFCEWMYDYSYEKYPFFRANIRKYPXKKQQLHFISSYLPAFQNDFENLSXEEKSIIKEEMLLEVNRFALASHFLWGLWSIVQAKISSIEFGYMYPNVVXWWHQDSVAQPRKPGEKPLSLMLWLPLEVALXSRPADLASPASEKCLQS

SEQ ID NO: 6066 - protein, 439 aa, Homo sapiens
  MOD_RES (3)..(3): Selenocysteine
  MOD_RES (7)..(7): Selenocysteine
  MOD_RES (87)..(87): Selenocysteine
  MOD_RES (132)..(133): Selenocysteine
  MOD_RES (135)..(135): Selenocysteine
  MOD_RES (198)..(198): Selenocysteine
  MOD_RES (216)..(216): Selenocysteine
  MOD_RES (234)..(234): Selenocysteine
  MOD_RES (248)..(248): Selenocysteine
  MOD_RES (278)..(278): Selenocysteine
  MOD_RES (353)..(353): Selenocysteine
  MOD_RES (377)..(377): Selenocysteine
MKXKFCXGGEAEPSPLGLLLSCGSGSAAPAPGVGQQRDAASDLESKQLGGQQPPLALPPPPPLPLPLPLPQPPPPQPPADEQPEPRXRRRAYLWCKEFLPGAWRGLREDEFHISVIRGGLSNMLFQCSLPDXXAXLGDEPRKVLLRLYGAILQMGAEAMVLESVMFAILAERSLGPKLYGIFPQGRLEQFIPSRRLDXEELSLPDISAEIAEKMAXFHGMKMPFNKEPKWLFGXMEKYLKEVLRIKFXEESRIKKLHKLLSYNLPLELENLRSLLESXPSPVVFCHNDCQEGNILLLEGRENSEKQKLMLIDFEYSSYNYRGFDIGNHFCEWMYDYSYEKYPFFRANIRKYPXKKQQLHFISSYLPAFQNDFENLSXEEKSIIKEEMLLEVNRFALASHFLWGLWSIVQAKISSIEFGYMDYAQARFDAYFHQKRKLGV

SEQ ID NO: 6067 - protein, 457 aa, Homo sapiens
  MOD_RES (3)..(3): Selenocysteine
  MOD_RES (7)..(7): Selenocysteine
  MOD_RES (87)..(87): Selenocysteine
  MOD_RES (132)..(133): Selenocysteine
  MOD_RES (135)..(135): Selenocysteine
  MOD_RES (216)..(216): Selenocysteine
  MOD_RES (234)..(234): Selenocysteine
  MOD_RES (252)..(252): Selenocysteine
  MOD_RES (266)..(266): Selenocysteine
  MOD_RES (296)..(296): Selenocysteine
  MOD_RES (371)..(371): Selenocysteine
  MOD_RES (395)..(395): Selenocysteine
MKXKFCXGGEAEPSPLGLLLSCGSGSAAPAPGVGQQRDAASDLESKQLGGQQPPLALPPPPPLPLPLPLPQPPPPQPPADEQPEPRXRRRAYLWCKEFLPGAWRGLREDEFHISVIRGGLSNMLFQCSLPDXXAXLGDEPRKVLLRLYGAILQMRSCNKEGSEQAQKENEFQGAEAMVLESVMFAILAERSLGPKLYGIFPQGRLEQFIPSRRLDXEELSLPDISAEIAEKMAXFHGMKMPFNKEPKWLFGXMEKYLKEVLRIKFXEESRIKKLHKLLSYNLPLELENLRSLLESXPSPVVFCHNDCQEGNILLLEGRENSEKQKLMLIDFEYSSYNYRGFDIGNHFCEWMYDYSYEKYPFFRANIRKYPXKKQQLHFISSYLPAFQNDFENLSXEEKSIIKEEMLLEVNRFALASHFLWGLWSIVQAKISSIEFGYMDYAQARFDAYFHQKRKLGV

SEQ ID NO: 6068 - protein, 156 aa, Homo sapiens
  MOD_RES (10)..(11): Selenocysteine
  MOD_RES (13)..(13): Selenocysteine
  MOD_RES (94)..(94): Selenocysteine
  MOD_RES (112)..(112): Selenocysteine
  MOD_RES (130)..(130): Selenocysteine
  MOD_RES (144)..(144): Selenocysteine
MLFQCSLPDXXAXLGDEPRKVLLRLYGAILQMRSCNKEGSEQAQKENEFQGAEAMVLESVMFAILAERSLGPKLYGIFPQGRLEQFIPSRRLDXEELSLPDISAEIAEKMAXFHGMKMPFNKEPKWLFGXMEKYLKEVLRIKFXEESRIKKLHKLL

SEQ ID NO: 6069 - protein, 66 aa, Homo sapiens
  MOD_RES (36)..(36): Selenocysteine
  MOD_RES (66)..(66): Selenocysteine
MEPLLLGRGLIVYLMFLLLKFSKAIEIPSSVQQVPXIIKQSKVQVAFPFDEYFQIECEAKGNPEPX

SEQ ID NO: 6070 - protein, 85 aa, Homo sapiens
  MOD_RES (36)..(36): Selenocysteine
  MOD_RES (66)..(66): Selenocysteine
  MOD_RES (70)..(70): Selenocysteine
  MOD_RES (79)..(79): Selenocysteine
MEPLLLGRGLIVYLMFLLLKFSKAIEIPSSVQQVPXIIKQSKVQVAFPFDEYFQIECEAKGNPEPXFSWXKDGNPFYFXDHRIIP

SEQ ID NO: 6071 - protein, 96 aa, Homo sapiens
  MOD_RES (36)..(36): Selenocysteine
  MOD_RES (66)..(66): Selenocysteine
  MOD_RES (70)..(70): Selenocysteine
  MOD_RES (79)..(79): Selenocysteine
  MOD_RES (91)..(91): Selenocysteine
MEPLLLGRGLIVYLMFLLLKFSKAIEIPSSVQQVPXIIKQSKVQVAFPFDEYFQIECEAKGNPEPXFSWXKDGNPFYFXDHRIIPSNNSGXFRIPN

SEQ ID NO: 6072 - protein, 181 aa, Homo sapiens
  MOD_RES (36)..(36): Selenocysteine
  MOD_RES (66)..(66): Selenocysteine
  MOD_RES (70)..(70): Selenocysteine
  MOD_RES (79)..(79): Selenocysteine
  MOD_RES (91)..(91): Selenocysteine
MEPLLLGRGLIVYLMFLLLKFSKAIEIPSSVQQVPXIIKQSKVQVAFPFDEYFQIECEAKGNPEPXFSWXKDGNPFYFXDHRIIPSNNSGXFRIPNEGHISHFQGKYRCFASNKLGIAMSEEIEFIVPSVPKFPKEKIDPLEVEEGDPIVLPCNPPKGLPPLHIYWMNIELEHIEQDERVY

SEQ ID NO: 6073 - protein, 1171 aa, Homo sapiens
  MOD_RES (36)..(36): Selenocysteine
  MOD_RES (66)..(66): Selenocysteine
  MOD_RES (70)..(70): Selenocysteine
  MOD_RES (79)..(79): Selenocysteine
  MOD_RES (91)..(91): Selenocysteine
  MOD_RES (213)..(213): Selenocysteine
  MOD_RES (223)..(223): Selenocysteine
  MOD_RES (237)..(237): Selenocysteine
  MOD_RES (258)..(258): Selenocysteine
  MOD_RES (267)..(267): Selenocysteine
  MOD_RES (285)..(285): Selenocysteine
  MOD_RES (303)..(303): Selenocysteine
  MOD_RES (310)..(310): Selenocysteine
  MOD_RES (327)..(327): Selenocysteine
  MOD_RES (334)..(334): Selenocysteine
  MOD_RES (336)..(336): Selenocysteine
  MOD_RES (350)..(350): Selenocysteine
  MOD_RES (360)..(360): Selenocysteine
  MOD_RES (377)..(377): Selenocysteine
  MOD_RES (405)..(405): Selenocysteine
  MOD_RES (412)..(412): Selenocysteine
  MOD_RES (425)..(425): Selenocysteine
  MOD_RES (443)..(443): Selenocysteine
  MOD_RES (451)..(451): Selenocysteine
  MOD_RES (494)..(494): Selenocysteine
  MOD_RES (500)..(501): Selenocysteine
  MOD_RES (519)..(519): Selenocysteine
  MOD_RES (522)..(522): Selenocysteine
  MOD_RES (531)..(531): Selenocysteine
  MOD_RES (580)..(580): Selenocysteine
  MOD_RES (593)..(593): Selenocysteine
  MOD_RES (598)..(598): Selenocysteine
  MOD_RES (611)..(611): Selenocysteine
  MOD_RES (620)..(620): Selenocysteine
  MOD_RES (623)..(623): Selenocysteine
  MOD_RES (647)..(647): Selenocysteine
  MOD_RES (679)..(679): Selenocysteine
  MOD_RES (686)..(687): Selenocysteine
  MOD_RES (722)..(722): Selenocysteine
  MOD_RES (766)..(766): Selenocysteine
  MOD_RES (780)..(780): Selenocysteine
  MOD_RES (782)..(782): Selenocysteine
  MOD_RES (785)..(785): Selenocysteine
  MOD_RES (790)..(790): Selenocysteine
  MOD_RES (817)..(817): Selenocysteine
  MOD_RES (827)..(827): Selenocysteine
  MOD_RES (840)..(840): Selenocysteine
  MOD_RES (845)..(845): Selenocysteine
  MOD_RES (848)..(848): Selenocysteine
  MOD_RES (868)..(868): Selenocysteine
  MOD_RES (876)..(876): Selenocysteine
  MOD_RES (907)..(907): Selenocysteine
  MOD_RES (927)..(927): Selenocysteine
  MOD_RES (936)..(936): Selenocysteine
  MOD_RES (947)..(947): Selenocysteine
  MOD_RES (949)..(949): Selenocysteine
  MOD_RES (963)..(963): Selenocysteine
  MOD_RES (975)..(975): Selenocysteine
  MOD_RES (987)..(988): Selenocysteine
  MOD_RES (1002)..(1003): Selenocysteine
  MOD_RES (1013)..(1013): Selenocysteine
  MOD_RES (1022)..(1022): Selenocysteine
  MOD_RES (1027)..(1027): Selenocysteine
  MOD_RES (1042)..(1042): Selenocysteine
  MOD_RES (1057)..(1057): Selenocysteine
  MOD_RES (1062)..(1062): Selenocysteine
  MOD_RES (1095)..(1095): Selenocysteine
  MOD_RES (1121)..(1121): Selenocysteine
  MOD_RES (1164)..(1164): Selenocysteine
  MOD_RES (1166)..(1166): Selenocysteine
MEPLLLGRGLIVYLMFLLLKFSKAIEIPSSVQQVPXIIKQSKVQVAFPFDEYFQIECEAKGNPEPXFSWXKDGNPFYFXDHRIIPSNNSGXFRIPNEGHISHFQGKYRCFASNKLGIAMSEEIEFIVPSVPKFPKEKIDPLEVEEGDPIVLPCNPPKGLPPLHIYWMNIELEHIEQDERVYMSQKGDLYFANVEEKDSRNDYCCFAAFPRLRXIVQKMPMKLXVNSLKHANDSSSSXEIGSKANSIKQRKPKLLLPPXESGSESSIXILKGEILLLECFAEGLPXPQVDWNKIGGDLPKGREXKENYGKXLKIENVSYQDKGNYRCXASNFLGXAXHDFHVIVEEPPRWXKKPQSAVYSXGSNGILLCEAEGEPQPXIKWRVNGSPVDNHPFAGDVVFPREISFXNLQPNHXAVYQCEASNVHGXILANANIDVVDVRPLIQXKDGENYAXVVGYSAFLHCEFFASPEAVVSWQKVEEVKPLEGRRYHIYENGXLQINRXXEEDAGSYSCWVENAIGKXAVXANLDIRNAXKLRVSPKNPRIPKLHMLELHCESKCDSHLKHSLKLSWSKDGEAFEINGXEDGRIIIDGANLXISNVXLEDQGIYCCSAHXALDSAADIXQVXVLDVPDPPENLHLSERQNRSVRLXWEAGADHNSNISEYIVEFEGNKEEPGRWEELXRVQGKKXXVILPLAPFVRYQFRVIAVNEVGRSQPSQPSDHHEXPPAAPDRNPQNIRVQASQPKEMIIKWEPLKSMEQNGPGLEYRVXWKPQGAPVEWEEEXVXNHXLRVMXPAVYAPYDVKVQAINQLGSGPDPQSVXLYSGEDYPDXAPVIHGVDVINSXLVKVXWSXVPKDRVHGRLKGYQINWWKXKSLLDGRXHPKEVNILRFSGQRNSGMVPSLDAFSEFHLXVLAYNSKGAGPESEPYIFQXPEGVPEQPXFLKVIKVDKDXAXLSWGLPKKLNGNLXGYLLQYQIINDXYEIGELNDINIXXPSKPSWHLSNLNAXXKYKFYLRACXSQGCGKPIXEESSXLGEGKYAGLYDDISXQGWFIGLMCAIALLXLLLLXVCFVKRNRGGKYSVKEKEDLHPDPEIQSVKDEXFGEYSDSDEKPLKGSLRSLNRDMQPXESADSLVEYGEGDHGLFSEDGSFIGAYAGSKEKGSVESNGSSXAXFPLRA

SEQ ID NO: 6074 - protein, 1224 aa, Homo sapiens
  MOD_RES (36)..(36): Selenocysteine
  MOD_RES (66)..(66): Selenocysteine
  MOD_RES (70)..(70): Selenocysteine
  MOD_RES (79)..(79): Selenocysteine
  MOD_RES (91)..(91): Selenocysteine
  MOD_RES (213)..(213): Selenocysteine
  MOD_RES (223)..(223): Selenocysteine
  MOD_RES (237)..(237): Selenocysteine
  MOD_RES (258)..(258): Selenocysteine
  MOD_RES (267)..(267): Selenocysteine
  MOD_RES (285)..(285): Selenocysteine
  MOD_RES (303)..(303): Selenocysteine
  MOD_RES (310)..(310): Selenocysteine
  MOD_RES (327)..(327): Selenocysteine
  MOD_RES (334)..(334): Selenocysteine
  MOD_RES (336)..(336): Selenocysteine
  MOD_RES (350)..(350): Selenocysteine
  MOD_RES (360)..(360): Selenocysteine
  MOD_RES (377)..(377): Selenocysteine
  MOD_RES (405)..(405): Selenocysteine
  MOD_RES (412)..(412): Selenocysteine
  MOD_RES (425)..(425): Selenocysteine
  MOD_RES (443)..(443): Selenocysteine
  MOD_RES (451)..(451): Selenocysteine
  MOD_RES (494)..(494): Selenocysteine
  MOD_RES (500)..(501): Selenocysteine
  MOD_RES (519)..(519): Selenocysteine
  MOD_RES (522)..(522): Selenocysteine
  MOD_RES (531)..(531): Selenocysteine
  MOD_RES (580)..(580): Selenocysteine
  MOD_RES (593)..(593): Selenocysteine
  MOD_RES (598)..(598): Selenocysteine
  MOD_RES (611)..(611): Selenocysteine
  MOD_RES (620)..(620): Selenocysteine
  MOD_RES (623)..(623): Selenocysteine
  MOD_RES (647)..(647): Selenocysteine
  MOD_RES (679)..(679): Selenocysteine
  MOD_RES (686)..(687): Selenocysteine
  MOD_RES (722)..(722): Selenocysteine
  MOD_RES (766)..(766): Selenocysteine
  MOD_RES (780)..(780): Selenocysteine
  MOD_RES (782)..(782): Selenocysteine
  MOD_RES (785)..(785): Selenocysteine
  MOD_RES (790)..(790): Selenocysteine
  MOD_RES (817)..(817): Selenocysteine
  MOD_RES (827)..(827): Selenocysteine
  MOD_RES (840)..(840): Selenocysteine
  MOD_RES (845)..(845): Selenocysteine
  MOD_RES (848)..(848): Selenocysteine
  MOD_RES (868)..(868): Selenocysteine
  MOD_RES (876)..(876): Selenocysteine
  MOD_RES (907)..(907): Selenocysteine
  MOD_RES (927)..(927): Selenocysteine
  MOD_RES (936)..(936): Selenocysteine
  MOD_RES (947)..(947): Selenocysteine
  MOD_RES (949)..(949): Selenocysteine
  MOD_RES (963)..(963): Selenocysteine
  MOD_RES (975)..(975): Selenocysteine
  MOD_RES (987)..(988): Selenocysteine
  MOD_RES (1002)..(1003): Selenocysteine
  MOD_RES (1013)..(1013): Selenocysteine
  MOD_RES (1022)..(1022): Selenocysteine
  MOD_RES (1027)..(1027): Selenocysteine
  MOD_RES (1044)..(1044): Selenocysteine
  MOD_RES (1047)..(1047): Selenocysteine
  MOD_RES (1065)..(1065): Selenocysteine
  MOD_RES (1081)..(1081): Selenocysteine
  MOD_RES (1095)..(1095): Selenocysteine
  MOD_RES (1110)..(1110): Selenocysteine
  MOD_RES (1115)..(1115): Selenocysteine
  MOD_RES (1148)..(1148): Selenocysteine
  MOD_RES (1174)..(1174): Selenocysteine
  MOD_RES (1217)..(1217): Selenocysteine
  MOD_RES (1219)..(1219): Selenocysteine
MEPLLLGRGLIVYLMFLLLKFSKAIEIPSSVQQVPXIIKQSKVQVAFPFDEYFQIECEAKGNPEPXFSWXKDGNPFYFXDHRIIPSNNSGXFRIPNEGHISHFQGKYRCFASNKLGIAMSEEIEFIVPSVPKFPKEKIDPLEVEEGDPIVLPCNPPKGLPPLHIYWMNIELEHIEQDERVYMSQKGDLYFANVEEKDSRNDYCCFAAFPRLRXIVQKMPMKLXVNSLKHANDSSSSXEIGSKANSIKQRKPKLLLPPXESGSESSIXILKGEILLLECFAEGLPXPQVDWNKIGGDLPKGREXKENYGKXLKIENVSYQDKGNYRCXASNFLGXAXHDFHVIVEEPPRWXKKPQSAVYSXGSNGILLCEAEGEPQPXIKWRVNGSPVDNHPFAGDVVFPREISFXNLQPNHXAVYQCEASNVHGXILANANIDVVDVRPLIQXKDGENYAXVVGYSAFLHCEFFASPEAVVSWQKVEEVKPLEGRRYHIYENGXLQINRXXEEDAGSYSCWVENAIGKXAVXANLDIRNAXKLRVSPKNPRIPKLHMLELHCESKCDSHLKHSLKLSWSKDGEAFEINGXEDGRIIIDGANLXISNVXLEDQGIYCCSAHXALDSAADIXQVXVLDVPDPPENLHLSERQNRSVRLXWEAGADHNSNISEYIVEFEGNKEEPGRWEELXRVQGKKXXVILPLAPFVRYQFRVIAVNEVGRSQPSQPSDHHEXPPAAPDRNPQNIRVQASQPKEMIIKWEPLKSMEQNGPGLEYRVXWKPQGAPVEWEEEXVXNHXLRVMXPAVYAPYDVKVQAINQLGSGPDPQSVXLYSGEDYPDXAPVIHGVDVINSXLVKVXWSXVPKDRVHGRLKGYQINWWKXKSLLDGRXHPKEVNILRFSGQRNSGMVPSLDAFSEFHLXVLAYNSKGAGPESEPYIFQXPEGVPEQPXFLKVIKVDKDXAXLSWGLPKKLNGNLXGYLLQYQIINDXYEIGELNDINIXXPSKPSWHLSNLNAXXKYKFYLRACXSQGCGKPIXEESSXLGEGSKGIGKISGVNLXQKXHPIEVFEPGAEHIVRLMXKNWGDNDSIFQDVIEXRGREYAGLYDDISXQGWFIGLMCAIALLXLLLLXVCFVKRNRGGKYSVKEKEDLHPDPEIQSVKDEXFGEYSDSDEKPLKGSLRSLNRDMQPXESADSLVEYGEGDHGLFSEDGSFIGAYAGSKEKGSVESNGSSXAXFPLRA

SEQ ID NO: 6075 - protein, 1208 aa, Homo sapiens
  MOD_RES (36)..(36): Selenocysteine
  MOD_RES (66)..(66): Selenocysteine
  MOD_RES (70)..(70): Selenocysteine
  MOD_RES (79)..(79): Selenocysteine
  MOD_RES (91)..(91): Selenocysteine
  MOD_RES (213)..(213): Selenocysteine
  MOD_RES (223)..(223): Selenocysteine
  MOD_RES (242)..(242): Selenocysteine
  MOD_RES (251)..(251): Selenocysteine
  MOD_RES (269)..(269): Selenocysteine
  MOD_RES (287)..(287): Selenocysteine
  MOD_RES (294)..(294): Selenocysteine
  MOD_RES (311)..(311): Selenocysteine
  MOD_RES (318)..(318): Selenocysteine
  MOD_RES (320)..(320): Selenocysteine
  MOD_RES (334)..(334): Selenocysteine
  MOD_RES (344)..(344): Selenocysteine
  MOD_RES (361)..(361): Selenocysteine
  MOD_RES (389)..(389): Selenocysteine
  MOD_RES (396)..(396): Selenocysteine
  MOD_RES (409)..(409): Selenocysteine
  MOD_RES (427)..(427): Selenocysteine
  MOD_RES (435)..(435): Selenocysteine
  MOD_RES (478)..(478): Selenocysteine
  MOD_RES (484)..(485): Selenocysteine
  MOD_RES (503)..(503): Selenocysteine
  MOD_RES (506)..(506): Selenocysteine
  MOD_RES (515)..(515): Selenocysteine
  MOD_RES (564)..(564): Selenocysteine
  MOD_RES (577)..(577): Selenocysteine
  MOD_RES (582)..(582): Selenocysteine
  MOD_RES (595)..(595): Selenocysteine
  MOD_RES (604)..(604): Selenocysteine
  MOD_RES (607)..(607): Selenocysteine
  MOD_RES (631)..(631): Selenocysteine
  MOD_RES (663)..(663): Selenocysteine
  MOD_RES (670)..(671): Selenocysteine
  MOD_RES (706)..(706): Selenocysteine
  MOD_RES (750)..(750): Selenocysteine
  MOD_RES (764)..(764): Selenocysteine
  MOD_RES (766)..(766): Selenocysteine
  MOD_RES (769)..(769): Selenocysteine
  MOD_RES (774)..(774): Selenocysteine
  MOD_RES (801)..(801): Selenocysteine
  MOD_RES (811)..(811): Selenocysteine
  MOD_RES (824)..(824): Selenocysteine
  MOD_RES (829)..(829): Selenocysteine
  MOD_RES (832)..(832): Selenocysteine
  MOD_RES (852)..(852): Selenocysteine
  MOD_RES (860)..(860): Selenocysteine
  MOD_RES (891)..(891): Selenocysteine
  MOD_RES (911)..(911): Selenocysteine
  MOD_RES (920)..(920): Selenocysteine
  MOD_RES (931)..(931): Selenocysteine
  MOD_RES (933)..(933): Selenocysteine
  MOD_RES (947)..(947): Selenocysteine
  MOD_RES (959)..(959): Selenocysteine
  MOD_RES (971)..(972): Selenocysteine
  MOD_RES (986)..(987): Selenocysteine
  MOD_RES (997)..(997): Selenocysteine
  MOD_RES (1006)..(1006): Selenocysteine
  MOD_RES (1011)..(1011): Selenocysteine
  MOD_RES (1028)..(1028): Selenocysteine
  MOD_RES (1031)..(1031): Selenocysteine
  MOD_RES (1049)..(1049): Selenocysteine
  MOD_RES (1065)..(1065): Selenocysteine
  MOD_RES (1079)..(1079): Selenocysteine
  MOD_RES (1094)..(1094): Selenocysteine
  MOD_RES (1099)..(1099): Selenocysteine
  MOD_RES (1132)..(1132): Selenocysteine
  MOD_RES (1158)..(1158): Selenocysteine
  MOD_RES (1201)..(1201): Selenocysteine
  MOD_RES (1203)..(1203): Selenocysteine
MEPLLLGRGLIVYLMFLLLKFSKAIEIPSSVQQVPXIIKQSKVQVAFPFDEYFQIECEAKGNPEPXFSWXKDGNPFYFXDHRIIPSNNSGXFRIPNEGHISHFQGKYRCFASNKLGIAMSEEIEFIVPSVPKFPKEKIDPLEVEEGDPIVLPCNPPKGLPPLHIYWMNIELEHIEQDERVYMSQKGDLYFANVEEKDSRNDYCCFAAFPRLRXIVQKMPMKLXVNSSNSIKQRKPKLLLPPXESGSESSIXILKGEILLLECFAEGLPXPQVDWNKIGGDLPKGREXKENYGKXLKIENVSYQDKGNYRCXASNFLGXAXHDFHVIVEEPPRWXKKPQSAVYSXGSNGILLCEAEGEPQPXIKWRVNGSPVDNHPFAGDVVFPREISFXNLQPNHXAVYQCEASNVHGXILANANIDVVDVRPLIQXKDGENYAXVVGYSAFLHCEFFASPEAVVSWQKVEEVKPLEGRRYHIYENGXLQINRXXEEDAGSYSCWVENAIGKXAVXANLDIRNAXKLRVSPKNPRIPKLHMLELHCESKCDSHLKHSLKLSWSKDGEAFEINGXEDGRIIIDGANLXISNVXLEDQGIYCCSAHXALDSAADIXQVXVLDVPDPPENLHLSERQNRSVRLXWEAGADHNSNISEYIVEFEGNKEEPGRWEELXRVQGKKXXVILPLAPFVRYQFRVIAVNEVGRSQPSQPSDHHEXPPAAPDRNPQNIRVQASQPKEMIIKWEPLKSMEQNGPGLEYRVXWKPQGAPVEWEEEXVXNHXLRVMXPAVYAPYDVKVQAINQLGSGPDPQSVXLYSGEDYPDXAPVIHGVDVINSXLVKVXWSXVPKDRVHGRLKGYQINWWKXKSLLDGRXHPKEVNILRFSGQRNSGMVPSLDAFSEFHLXVLAYNSKGAGPESEPYIFQXPEGVPEQPXFLKVIKVDKDXAXLSWGLPKKLNGNLXGYLLQYQIINDXYEIGELNDINIXXPSKPSWHLSNLNAXXKYKFYLRACXSQGCGKPIXEESSXLGEGSKGIGKISGVNLXQKXHPIEVFEPGAEHIVRLMXKNWGDNDSIFQDVIEXRGREYAGLYDDISXQGWFIGLMCAIALLXLLLLXVCFVKRNRGGKYSVKEKEDLHPDPEIQSVKDEXFGEYSDSDEKPLKGSLRSLNRDMQPXESADSLVEYGEGDHGLFSEDGSFIGAYAGSKEKGSVESNGSSXAXFPLRA

SEQ ID NO: 6076 - protein, 93 aa, Homo sapiens
  MOD_RES (20)..(20): Selenocysteine
  MOD_RES (22)..(22): Selenocysteine
  MOD_RES (33)..(33): Selenocysteine
MPPAWSGESMDRGVVGLGSXKXQRGARAPPPQXAEGREGAPGAVVAMAPGSGARGAGDAGRGWSLLPLCASLFLSLFFFFWSVSVRGEAARRK

SEQ ID NO: 6077 - protein, 358 aa, Homo sapiens
  MOD_RES (1)..(1): Any amino acid
  MOD_RES (4)..(4): Selenocysteine
  MOD_RES (14)..(14): Selenocysteine
  MOD_RES (27)..(27): Selenocysteine
  MOD_RES (32)..(32): Selenocysteine
  MOD_RES (35)..(35): Selenocysteine
  MOD_RES (55)..(55): Selenocysteine
  MOD_RES (63)..(63): Selenocysteine
  MOD_RES (94)..(94): Selenocysteine
  MOD_RES (114)..(114): Selenocysteine
  MOD_RES (123)..(123): Selenocysteine
  MOD_RES (134)..(134): Selenocysteine
  MOD_RES (136)..(136): Selenocysteine
  MOD_RES (150)..(150): Selenocysteine
  MOD_RES (162)..(162): Selenocysteine
  MOD_RES (174)..(175): Selenocysteine
  MOD_RES (189)..(190): Selenocysteine
  MOD_RES (200)..(200): Selenocysteine
  MOD_RES (209)..(209): Selenocysteine
  MOD_RES (214)..(214): Selenocysteine
  MOD_RES (229)..(229): Selenocysteine
  MOD_RES (244)..(244): Selenocysteine
  MOD_RES (249)..(249): Selenocysteine
  MOD_RES (282)..(282): Selenocysteine
  MOD_RES (308)..(308): Selenocysteine
  MOD_RES (351)..(351): Selenocysteine
  MOD_RES (353)..(353): Selenocysteine
XSVXLYSGEDYPDXAPVIHGVDVINSXLVKVXWSXVPKDRVHGRLKGYQINWWKXKSLLDGRXHPKEVNILRFSGQRNSGMVPSLDAFSEFHLXVLAYNSKGAGPESEPYIFQXPEGVPEQPXFLKVIKVDKDXAXLSWGLPKKLNGNLXGYLLQYQIINDXYEIGELNDINIXXPSKPSWHLSNLNAXXKYKFYLRACXSQGCGKPIXEESSXLGEGKYAGLYDDISXQGWFIGLMCAIALLXLLLLXVCFVKRNRGGKYSVKEKEDLHPDPEIQSVKDEXFGEYSDSDEKPLKGSLRSLNRDMQPXESADSLVEYGEGDHGLFSEDGSFIGAYAGSKEKGSVESNGSSXAXFPLRA

SEQ ID NO: 6078 - protein, 110 aa, Homo sapiens
  MOD_RES (4)..(4): Selenocysteine
  MOD_RES (16)..(16): Selenocysteine
  MOD_RES (94)..(94): Selenocysteine
  MOD_RES (107)..(107): Selenocysteine
MADXLPSEFDVIVIGXGLPESIIAAACSRSGRRVLHVDSRSYYGGNWASFSFSGLLSWLKEYQENSDIVSDSPVWQDQILENEEAIALSRKDKXIQHVEVFCYARSXLLL

SEQ ID NO: 6079 - protein, 653 aa, Homo sapiens
  MOD_RES (4)..(4): Selenocysteine
  MOD_RES (16)..(16): Selenocysteine
  MOD_RES (94)..(94): Selenocysteine
  MOD_RES (126)..(126): Selenocysteine
  MOD_RES (131)..(131): Selenocysteine
  MOD_RES (141)..(141): Selenocysteine
  MOD_RES (148)..(148): Selenocysteine
  MOD_RES (155)..(155): Selenocysteine
  MOD_RES (158)..(158): Selenocysteine
  MOD_RES (175)..(175): Selenocysteine
  MOD_RES (186)..(186): Selenocysteine
  MOD_RES (191)..(191): Selenocysteine
  MOD_RES (206)..(207): Selenocysteine
  MOD_RES (216)..(216): Selenocysteine
  MOD_RES (261)..(261): Selenocysteine
  MOD_RES (288)..(288): Selenocysteine
  MOD_RES (300)..(300): Selenocysteine
  MOD_RES (319)..(319): Selenocysteine
  MOD_RES (326)..(326): Selenocysteine
  MOD_RES (330)..(330): Selenocysteine
  MOD_RES (344)..(344): Selenocysteine
  MOD_RES (347)..(347): Selenocysteine
  MOD_RES (351)..(351): Selenocysteine
  MOD_RES (358)..(358): Selenocysteine
  MOD_RES (371)..(371): Selenocysteine
  MOD_RES (459)..(459): Selenocysteine
  MOD_RES (466)..(466): Selenocysteine
  MOD_RES (476)..(476): Selenocysteine
  MOD_RES (484)..(484): Selenocysteine
  MOD_RES (496)..(496): Selenocysteine
  MOD_RES (498)..(498): Selenocysteine
  MOD_RES (503)..(503): Selenocysteine
  MOD_RES (509)..(509): Selenocysteine
  MOD_RES (511)..(511): Selenocysteine
  MOD_RES (515)..(515): Selenocysteine
  MOD_RES (532)..(532): Selenocysteine
  MOD_RES (593)..(593): Selenocysteine
  MOD_RES (638)..(638): Selenocysteine
  MOD_RES (643)..(643): Selenocysteine
MADXLPSEFDVIVIGXGLPESIIAAACSRSGRRVLHVDSRSYYGGNWASFSFSGLLSWLKEYQENSDIVSDSPVWQDQILENEEAIALSRKDKXIQHVEVFCYASQDLHEDVEEAGALQKNHALVXSANSXEAADSAFLPXEDESLSXMSCEMLXEQXPSSDPENALEVNGAEVXGEKENHCDDKXCVPSXSAEDMSENVPIAEDXXEQPKKNRIXYSQIIKEGRRFNIDLVSKLLYSRGLLIDLLIKSNVSRYAEFKNIXRILAFREGRVEQVPCSRADVFNSKQLXMVEKRMLMKFLXFCMEYEKYPDEYKGYEEIXFYEYLKXQKLXPNLQYIVMHSIAMXSEXASSXIDGLKAXKNFLHCLGRYGNXPFLFPLYGQGELPQCFCRMCAVFGGIYCLRHSVQCLVVDKESRKCKAIIDQFGQRIISEHFLVEDSYFPENMCSRVQYRQISRAVLIXDRSVLKXDSDQQISILXVPAEEPGXFAVRVIELCSSXMXCMKGXYLVHLXCXSSKXAREDLESVVQKLFVPYXEMEIENEQVEKPRILWALYFNMRDSSDISRSCYNDLPSNVYVCSGPDCGLGNDNAVKQAEXLFQEICPNEDFCPPPPNPEDIILDGDSLQPEASESSAIPEANSEXFKESXNLGNLEESSE

SEQ ID NO: 6080 - protein, 100 aa, Homo sapiens
  MOD_RES (7)..(7): Selenocysteine
  MOD_RES (16)..(16): Selenocysteine
  MOD_RES (73)..(73): Selenocysteine
  MOD_RES (83)..(83): Selenocysteine
  MOD_RES (88)..(88): Selenocysteine
  MOD_RES (95)..(95): Selenocysteine
  MOD_RES (99)..(99): Selenocysteine
MADNLPXEFDVVIIGXGLPESILAAACSRSGQRVLHIDSRSYYGGNWASFSFSGLLSWLKEYQQNNDIGEESXVVWQDLIHEXEEAIXLRKKDEXIQHXE

SEQ ID NO: 6081 - protein, 656 aa, Homo sapiens
  MOD_RES (7)..(7): Selenocysteine
  MOD_RES (16)..(16): Selenocysteine
  MOD_RES (73)..(73): Selenocysteine
  MOD_RES (83)..(83): Selenocysteine
  MOD_RES (88)..(88): Selenocysteine
  MOD_RES (95)..(95): Selenocysteine
  MOD_RES (99)..(99): Selenocysteine
  MOD_RES (130)..(130): Selenocysteine
  MOD_RES (132)..(132): Selenocysteine
  MOD_RES (158)..(158): Selenocysteine
  MOD_RES (163)..(163): Selenocysteine
  MOD_RES (170)..(170): Selenocysteine
  MOD_RES (186)..(186): Selenocysteine
  MOD_RES (190)..(190): Selenocysteine
  MOD_RES (204)..(204): Selenocysteine
  MOD_RES (218)..(218): Selenocysteine
  MOD_RES (263)..(263): Selenocysteine
  MOD_RES (290)..(290): Selenocysteine
  MOD_RES (302)..(302): Selenocysteine
  MOD_RES (328)..(328): Selenocysteine
  MOD_RES (332)..(332): Selenocysteine
  MOD_RES (346)..(346): Selenocysteine
  MOD_RES (352)..(353): Selenocysteine
  MOD_RES (360)..(360): Selenocysteine
  MOD_RES (373)..(373): Selenocysteine
  MOD_RES (445)..(445): Selenocysteine
  MOD_RES (461)..(461): Selenocysteine
  MOD_RES (468)..(468): Selenocysteine
  MOD_RES (474)..(474): Selenocysteine
  MOD_RES (492)..(492): Selenocysteine
  MOD_RES (498)..(498): Selenocysteine
  MOD_RES (500)..(500): Selenocysteine
  MOD_RES (505)..(505): Selenocysteine
  MOD_RES (511)..(511): Selenocysteine
  MOD_RES (517)..(517): Selenocysteine
  MOD_RES (531)..(531): Selenocysteine
  MOD_RES (534)..(534): Selenocysteine
  MOD_RES (536)..(536): Selenocysteine
  MOD_RES (544)..(544): Selenocysteine
  MOD_RES (595)..(595): Selenocysteine
  MOD_RES (603)..(603): Selenocysteine
  MOD_RES (630)..(630): Selenocysteine
MADNLPXEFDVVIIGXGLPESILAAACSRSGQRVLHIDSRSYYGGNWASFSFSGLLSWLKEYQQNNDIGEESXVVWQDLIHEXEEAIXLRKKDEXIQHXEAFCYASQDMEDNVEEIGALQKNPSLGVSNXFXEVLDSALPEESQLSYFNSDEMPAKHXQKSDXEISLEVXDVEESVEKEKYCGDKXCMHXVSDKDGDKDESKSXVEDKADEPIRNRIXYSQIVKEGRRFNIDLVSKLLYSQGLLIDLLIKSDVSRYVEFKNVXRILAFREGKVEQVPCSRADVFNSKELXMVEKRMLMKFLXFCLEYEQHPDEYQAFRQCSFSEYLKXKKLXPNLQHFVLHSIAMXSESSCXXIDGLNAXKNFLQCLGRFGNXPFLFPLYGQGEIPQGFCRMCAVFGGIYCLRHKVQCFVVDKESGRCKAIIDHFGQRINAKYFIVEDSYLSEEXCSNVQYKQISRAVLIXDQSILKXDLDQQXSILIVPPAEPGACAVRVXELCSSXMXCMKDXYLVHLXCSSSKXAREDLESVVKKLFXPYXEXEINEEELXKPRLLWALYFNMRDSSGISRSSYNGLPSNVYVCSGPDCGLGNEHAVKQAEXLFQEIFPXEEFCPPPPNPEDIIFDGDDKQPEAPGXNNVVMAKLESSEESKNLESPEKHLQN

SEQ ID NO: 6082 - protein, 147 aa, Homo sapiens
  MOD_RES (29)..(29): Selenocysteine
  MOD_RES (40)..(40): Selenocysteine
  MOD_RES (74)..(74): Selenocysteine
  MOD_RES (76)..(76): Selenocysteine
  MOD_RES (96)..(96): Selenocysteine
  MOD_RES (98)..(98): Selenocysteine
  MOD_RES (111)..(111): Selenocysteine
  MOD_RES (128)..(128): Selenocysteine
  MOD_RES (138)..(138): Selenocysteine
MYSGNRSGGHGYWDGGGAAGAEGPAPAGXLSPAPLFSPGXYERLALLLGSIGLLGVGNNLLVLVLYYKFQRLRXPXHLLLVNISLSDLLVSLFGVXFXFVSCLRNGWVWDXVGCVWDGFSGSLFAVVXRRCYFLKWRXIFPQSLMWL

SEQ ID NO: 6083 - protein, 137 aa, Homo sapiens
  MOD_RES (29)..(29): Selenocysteine
  MOD_RES (40)..(40): Selenocysteine
  MOD_RES (74)..(74): Selenocysteine
  MOD_RES (76)..(76): Selenocysteine
  MOD_RES (96)..(96): Selenocysteine
  MOD_RES (98)..(98): Selenocysteine
  MOD_RES (111)..(111): Selenocysteine
MYSGNRSGGHGYWDGGGAAGAEGPAPAGXLSPAPLFSPGXYERLALLLGSIGLLGVGNNLLVLVLYYKFQRLRXPXHLLLVNISLSDLLVSLFGVXFXFVSCLRNGWVWDXVGCVWDGFSGSLFEKSSSHKCIYDAF

SEQ ID NO: 6084 - protein, 23 aa, Homo sapiens
  MOD_RES (4)..(4): Selenocysteine
  MOD_RES (8)..(8): Selenocysteine
MALXLFDXDEYRPPVWKSYCFMA

SEQ ID NO: 6085 - protein, 459 aa, Homo sapiens
  MOD_RES (4)..(4): Selenocysteine
  MOD_RES (8)..(8): Selenocysteine
  MOD_RES (34)..(34): Selenocysteine
  MOD_RES (36)..(36): Selenocysteine
  MOD_RES (81)..(81): Selenocysteine
  MOD_RES (83)..(83): Selenocysteine
  MOD_RES (92)..(92): Selenocysteine
  MOD_RES (118)..(118): Selenocysteine
  MOD_RES (123)..(123): Selenocysteine
  MOD_RES (128)..(128): Selenocysteine
  MOD_RES (138)..(138): Selenocysteine
  MOD_RES (149)..(150): Selenocysteine
  MOD_RES (167)..(167): Selenocysteine
  MOD_RES (174)..(174): Selenocysteine
  MOD_RES (185)..(185): Selenocysteine
  MOD_RES (192)..(192): Selenocysteine
  MOD_RES (212)..(212): Selenocysteine
  MOD_RES (271)..(272): Selenocysteine
  MOD_RES (278)..(279): Selenocysteine
  MOD_RES (340)..(340): Selenocysteine
  MOD_RES (356)..(356): Selenocysteine
  MOD_RES (378)..(378): Selenocysteine
  MOD_RES (393)..(393): Selenocysteine
  MOD_RES (405)..(405): Selenocysteine
  MOD_RES (425)..(425): Selenocysteine
MALXLFDXDEYRPPVWKSYLYQLQQEAPHPRRIXCXCEVENRPKYYGREFHGMISREAADQLLIVAEGSYLIRESQRQPGXYXLALRFGSQXRNFRLYYDGKHFVGEKRFESIHDLVXDGLIXLYIEXKAAEYIAKMXINPIYEHVGYXXLNREPAYKKHMPVLKEXHDERDSXGQDGVSEKRLXSLVRRAXLKENEQIPKYEKIHNFKVHXFRGPHWCEYCANFMWGLIAQGVKCADCGLNVHKQCSKMVPNDCKPDLKHVKKVYSCDLXXLVKAHXXKRPMVVDMCIREIESRGLNSEGLYRVSGFSDLIEDVKMAFDRDGEKADISVNMYEDINIIXGALKLYFRDLPIPLIXYDAYPKFIESAKIMDPDEQLEXLHEALKLLPPAHCEXLRYLMAHLKRVXLHEKENLMNAENLGIVFGPXLMRSPELDAMAALNDIRYQRLVVELLIKNEDILF

SEQ ID NO: 6086 - protein, 433 aa, Homo sapiens
  MOD_RES (4)..(4): Selenocysteine
  MOD_RES (8)..(8): Selenocysteine
  MOD_RES (34)..(34): Selenocysteine
  MOD_RES (36)..(36): Selenocysteine
  MOD_RES (81)..(81): Selenocysteine
  MOD_RES (83)..(83): Selenocysteine
  MOD_RES (92)..(92): Selenocysteine
  MOD_RES (118)..(118): Selenocysteine
  MOD_RES (123)..(123): Selenocysteine
  MOD_RES (128)..(128): Selenocysteine
  MOD_RES (138)..(138): Selenocysteine
  MOD_RES (149)..(150): Selenocysteine
  MOD_RES (167)..(167): Selenocysteine
  MOD_RES (174)..(174): Selenocysteine
  MOD_RES (186)..(186): Selenocysteine
  MOD_RES (245)..(246): Selenocysteine
  MOD_RES (252)..(253): Selenocysteine
  MOD_RES (314)..(314): Selenocysteine
  MOD_RES (330)..(330): Selenocysteine
  MOD_RES (352)..(352): Selenocysteine
  MOD_RES (367)..(367): Selenocysteine
  MOD_RES (379)..(379): Selenocysteine
  MOD_RES (399)..(399): Selenocysteine
MALXLFDXDEYRPPVWKSYLYQLQQEAPHPRRIXCXCEVENRPKYYGREFHGMISREAADQLLIVAEGSYLIRESQRQPGXYXLALRFGSQXRNFRLYYDGKHFVGEKRFESIHDLVXDGLIXLYIEXKAAEYIAKMXINPIYEHVGYXXLNREPAYKKHMPVLKEXHDERDSXGQDGVSEKRVHXFRGPHWCEYCANFMWGLIAQGVKCADCGLNVHKQCSKMVPNDCKPDLKHVKKVYSCDLXXLVKAHXXKRPMVVDMCIREIESRGLNSEGLYRVSGFSDLIEDVKMAFDRDGEKADISVNMYEDINIIXGALKLYFRDLPIPLIXYDAYPKFIESAKIMDPDEQLEXLHEALKLLPPAHCEXLRYLMAHLKRVXLHEKENLMNAENLGIVFGPXLMRSPELDAMAALNDIRYQRLVVELLIKNEDILF

SEQ ID NO: 6087 - protein, 22 aa, Homo sapiens
  MOD_RES (4)..(4): Selenocysteine
  MOD_RES (8)..(8): Selenocysteine
MALXLFDXDEYRPPVWKSYYIL

SEQ ID NO: 6088 - protein, 185 aa, Homo sapiens
  MOD_RES (3)..(3): Selenocysteine
  MOD_RES (11)..(11): Selenocysteine
  MOD_RES (30)..(30): Selenocysteine
  MOD_RES (89)..(90): Selenocysteine
  MOD_RES (96)..(97): Selenocysteine
  MOD_RES (158)..(158): Selenocysteine
  MOD_RES (174)..(174): Selenocysteine
MAXMGLLMLLXLAASPHFLSICFHHVCVHXFRGPHWCEYCANFMWGLIAQGVKCADCGLNVHKQCSKMVPNDCKPDLKHVKKVYSCDLXXLVKAHXXKRPMVVDMCIREIESRGLNSEGLYRVSGFSDLIEDVKMAFDRDGEKADISVNMYEDINIIXGALKLYFRDLPIPLIXYDAYPKFIESA

SEQ ID NO: 6089 - protein, 275 aa, Homo sapiens
  MOD_RES (3)..(3): Selenocysteine
  MOD_RES (11)..(11): Selenocysteine
  MOD_RES (28)..(28): Selenocysteine
  MOD_RES (87)..(88): Selenocysteine
  MOD_RES (94)..(95): Selenocysteine
  MOD_RES (156)..(156): Selenocysteine
  MOD_RES (172)..(172): Selenocysteine
  MOD_RES (194)..(194): Selenocysteine
  MOD_RES (209)..(209): Selenocysteine
  MOD_RES (221)..(221): Selenocysteine
  MOD_RES (241)..(241): Selenocysteine
MAXMGLLMLLXLAASPHFLSICFHHVHXFRGPHWCEYCANFMWGLIAQGVKCADCGLNVHKQCSKMVPNDCKPDLKHVKKVYSCDLXXLVKAHXXKRPMVVDMCIREIESRGLNSEGLYRVSGFSDLIEDVKMAFDRDGEKADISVNMYEDINIIXGALKLYFRDLPIPLIXYDAYPKFIESAKIMDPDEQLEXLHEALKLLPPAHCEXLRYLMAHLKRVXLHEKENLMNAENLGIVFGPXLMRSPELDAMAALNDIRYQRLVVELLIKNEDILF

SEQ ID NO: 6090 - protein, 334 aa, Homo sapiens
  MOD_RES (12)..(12): Selenocysteine
  MOD_RES (46)..(46): Selenocysteine
  MOD_RES (60)..(60): Selenocysteine
  MOD_RES (67)..(67): Selenocysteine
  MOD_RES (87)..(87): Selenocysteine
  MOD_RES (146)..(147): Selenocysteine
  MOD_RES (153)..(154): Selenocysteine
  MOD_RES (215)..(215): Selenocysteine
  MOD_RES (231)..(231): Selenocysteine
  MOD_RES (253)..(253): Selenocysteine
  MOD_RES (268)..(268): Selenocysteine
  MOD_RES (280)..(280): Selenocysteine
  MOD_RES (300)..(300): Selenocysteine
MPSKESWSGRKXNRAAVHKSKQEGRQQDLLIAALGMKLGSPKSSVXIWQPLKLFAYSQLXSLVRRAXLKENEQIPKYEKIHNFKVHXFRGPHWCEYCANFMWGLIAQGVKCADCGLNVHKQCSKMVPNDCKPDLKHVKKVYSCDLXXLVKAHXXKRPMVVDMCIREIESRGLNSEGLYRVSGFSDLIEDVKMAFDRDGEKADISVNMYEDINIIXGALKLYFRDLPIPLIXYDAYPKFIESAKIMDPDEQLEXLHEALKLLPPAHCEXLRYLMAHLKRVXLHEKENLMNAENLGIVFGPXLMRSPELDAMAALNDIRYQRLVVELLIKNEDILF

SEQ ID NO: 6091 - protein, 165 aa, Homo sapiens
  MOD_RES (12)..(12): Selenocysteine
  MOD_RES (46)..(46): Selenocysteine
  MOD_RES (60)..(60): Selenocysteine
  MOD_RES (67)..(67): Selenocysteine
  MOD_RES (87)..(87): Selenocysteine
  MOD_RES (163)..(164): Selenocysteine
MPSKESWSGRKXNRAAVHKSKQEGRQQDLLIAALGMKLGSPKSSVXIWQPLKLFAYSQLXSLVRRAXLKENEQIPKYEKIHNFKVHXFRGPHWCEYCANFMWGLIAQGVKCAVLEARKSKIKLAAGSVSDCGLNVHKQCSKMVPNDCKPDLKHVKKVYSCDLXXL

SEQ ID NO: 6092 - protein, 186 aa, Homo sapiens
  MOD_RES (11)..(11): Selenocysteine
  MOD_RES (18)..(18): Selenocysteine
  MOD_RES (38)..(38): Selenocysteine
  MOD_RES (97)..(98): Selenocysteine
  MOD_RES (104)..(105): Selenocysteine
  MOD_RES (166)..(166): Selenocysteine
  MOD_RES (182)..(182): Selenocysteine
MRGGRNRDRLXSLVRRAXLKENEQIPKYEKIHNFKVHXFRGPHWCEYCANFMWGLIAQGVKCADCGLNVHKQCSKMVPNDCKPDLKHVKKVYSCDLXXLVKAHXXKRPMVVDMCIREIESRGLNSEGLYRVSGFSDLIEDVKMAFDRDGEKADISVNMYEDINIIXGALKLYFRDLPIPLIXYDAY

SEQ ID NO: 6093 - protein, 173 aa, Homo sapiens
  MOD_RES (46)..(47): Selenocysteine
  MOD_RES (53)..(54): Selenocysteine
  MOD_RES (115)..(115): Selenocysteine
  MOD_RES (131)..(131): Selenocysteine
  MOD_RES (153)..(153): Selenocysteine
  MOD_RES (168)..(168): Selenocysteine
MWGLIAQGVKCADCGLNVHKQCSKMVPNDCKPDLKHVKKVYSCDLXXLVKAHXXKRPMVVDMCIREIESRGLNSEGLYRVSGFSDLIEDVKMAFDRDGEKADISVNMYEDINIIXGALKLYFRDLPIPLIXYDAYPKFIESAKIMDPDEQLEXLHEALKLLPPAHCEXLRYLM

SEQ ID NO: 6094 - protein, 194 aa, Homo sapiens
  MOD_RES (63)..(64): Selenocysteine
  MOD_RES (70)..(71): Selenocysteine
  MOD_RES (132)..(132): Selenocysteine
  MOD_RES (148)..(148): Selenocysteine
  MOD_RES (170)..(170): Selenocysteine
  MOD_RES (185)..(185): Selenocysteine
MWGLIAQGVKCAVLEARKSKIKLAAGSVSDCGLNVHKQCSKMVPNDCKPDLKHVKKVYSCDLXXLVKAHXXKRPMVVDMCIREIESRGLNSEGLYRVSGFSDLIEDVKMAFDRDGEKADISVNMYEDINIIXGALKLYFRDLPIPLIXYDAYPKFIESAKIMDPDEQLEXLHEALKLLPPAHCEXLRYLMAHLK

SEQ ID NO: 6095 - protein, 124 aa, Homo sapiens
  MOD_RES (58)..(58): Selenocysteine
  MOD_RES (70)..(70): Selenocysteine
  MOD_RES (90)..(90): Selenocysteine
  MOD_RES (99)..(99): Selenocysteine
  MOD_RES (101)..(102): Selenocysteine
MAASSNSSLSGSSVSSDAEEYQPPIWKSYLYQLQQEAPRPKRIICPREVENRPKYYEXLRYLMIHLKKVXMNEKDNFMNAENLGIVFGPXLMRPPEDSXLXXLHDMRYQKLIVQILIENEDVLF

SEQ ID NO: 6096 - protein, 189 aa, Homo sapiens
  MOD_RES (93)..(93): Selenocysteine
  MOD_RES (123)..(123): Selenocysteine
  MOD_RES (135)..(135): Selenocysteine
  MOD_RES (155)..(155): Selenocysteine
  MOD_RES (164)..(164): Selenocysteine
  MOD_RES (166)..(167): Selenocysteine
MAASSNSSLSGSSVSSDAEEYQPPIWKSYLYQLQQEAPRPKRIICPREVENRPKYYGREFHGIISREQADELLGGVEGAYILRESQRQPGCYXLALREISNADERLEAVHEVLMLLPPAHYEXLRYLMIHLKKVXMNEKDNFMNAENLGIVFGPXLMRPPEDSXLXXLHDMRYQKLIVQILIENEDVLF

SEQ ID NO: 6097 - protein, 468 aa, Homo sapiens
  MOD_RES (93)..(93): Selenocysteine
  MOD_RES (102)..(102): Selenocysteine
  MOD_RES (128)..(128): Selenocysteine
  MOD_RES (133)..(133): Selenocysteine
  MOD_RES (138)..(138): Selenocysteine
  MOD_RES (148)..(149): Selenocysteine
  MOD_RES (160)..(160): Selenocysteine
  MOD_RES (180)..(180): Selenocysteine
  MOD_RES (183)..(183): Selenocysteine
  MOD_RES (188)..(188): Selenocysteine
  MOD_RES (203)..(203): Selenocysteine
  MOD_RES (214)..(214): Selenocysteine
  MOD_RES (221)..(221): Selenocysteine
  MOD_RES (280)..(281): Selenocysteine
  MOD_RES (288)..(288): Selenocysteine
  MOD_RES (318)..(318): Selenocysteine
  MOD_RES (349)..(349): Selenocysteine
  MOD_RES (365)..(365): Selenocysteine
  MOD_RES (368)..(368): Selenocysteine
  MOD_RES (402)..(402): Selenocysteine
  MOD_RES (414)..(414): Selenocysteine
  MOD_RES (434)..(434): Selenocysteine
  MOD_RES (443)..(443): Selenocysteine
  MOD_RES (445)..(446): Selenocysteine
MAASSNSSLSGSSVSSDAEEYQPPIWKSYLYQLQQEAPRPKRIICPREVENRPKYYGREFHGIISREQADELLGGVEGAYILRESQRQPGCYXLALRFGNQXLNYRLFHDGKHFVGEKRFESIHDLVXDGLIXLYIEXKAAEYISKMXXNPIYEHIGYAXLLREKVSRRLSRSKNEPRKXNVXHEEHXAVEKISSLVRRAALXHNDNHFNYEKXHNFKVHXFRGPHWCEYCANFMWGLIAQGVRCSDCGLNVHKQCSKHVPNDCQPDLKRIKKVYCCDLXXLVKAHNXQRPMVVDICIREIEARGLKSEGLYRVSGFXEHIEDVKMAFDRDGEKADISANVYPDINIIXGALKLYFRDLPIPVIXYDXYSKFIDAAKISNADERLEAVHEVLMLLPPAHYEXLRYLMIHLKKVXMNEKDNFMNAENLGIVFGPXLMRPPEDSXLXXLHDMRYQKLIVQILIENEDVLF

SEQ ID NO: 6098 - protein, 216 aa, Homo sapiens
  MOD_RES (93)..(93): Selenocysteine
  MOD_RES (102)..(102): Selenocysteine
  MOD_RES (128)..(128): Selenocysteine
  MOD_RES (133)..(133): Selenocysteine
  MOD_RES (138)..(138): Selenocysteine
  MOD_RES (148)..(149): Selenocysteine
  MOD_RES (160)..(160): Selenocysteine
  MOD_RES (180)..(180): Selenocysteine
  MOD_RES (183)..(183): Selenocysteine
  MOD_RES (188)..(188): Selenocysteine
  MOD_RES (203)..(203): Selenocysteine
  MOD_RES (214)..(214): Selenocysteine
MAASSNSSLSGSSVSSDAEEYQPPIWKSYLYQLQQEAPRPKRIICPREVENRPKYYGREFHGIISREQADELLGGVEGAYILRESQRQPGCYXLALRFGNQXLNYRLFHDGKHFVGEKRFESIHDLVXDGLIXLYIEXKAAEYISKMXXNPIYEHIGYAXLLREKVSRRLSRSKNEPRKXNVXHEEHXAVEKISSLVRRAALXHNDNHFNYERXAP

SEQ ID NO: 6099 - protein, 182 aa, Homo sapiens
  MOD_RES (93)..(93): Selenocysteine
  MOD_RES (102)..(102): Selenocysteine
  MOD_RES (116)..(116): Selenocysteine
  MOD_RES (128)..(128): Selenocysteine
  MOD_RES (148)..(148): Selenocysteine
  MOD_RES (157)..(157): Selenocysteine
  MOD_RES (159)..(160): Selenocysteine
MAASSNSSLSGSSVSSDAEEYQPPIWKSYLYQLQQEAPRPKRIICPREVENRPKYYGREFHGIISREQADELLGGVEGAYILRESQRQPGCYXLALRFGNQXLNYRLFHDGKHYEXLRYLMIHLKKVXMNEKDNFMNAENLGIVFGPXLMRPPEDSXLXXLHDMRYQKLIVQILIENEDVLF

SEQ ID NO: 6100 - protein, 174 aa, Homo sapiens
  MOD_RES (106)..(106): Selenocysteine
  MOD_RES (115)..(115): Selenocysteine
  MOD_RES (141)..(141): Selenocysteine
  MOD_RES (146)..(146): Selenocysteine
  MOD_RES (151)..(151): Selenocysteine
  MOD_RES (161)..(162): Selenocysteine
  MOD_RES (173)..(173): Selenocysteine
MAASSNSSLSGSSVSSVYSEPRSPRELPKYAEEYQPPIWKSYLYQLQQEAPRPKRIICPREVENRPKYYGREFHGIISREQADELLGGVEGAYILRESQRQPGCYXLALRFGNQXLNYRLFHDGKHFVGEKRFESIHDLVXDGLIXLYIEXKAAEYISKMXXNPIYEHIGYAXL

SEQ ID NO: 6101 - protein, 260 aa, Homo sapiens
  MOD_RES (67)..(67): Selenocysteine
  MOD_RES (78)..(78): Selenocysteine
  MOD_RES (85)..(85): Selenocysteine
  MOD_RES (144)..(145): Selenocysteine
  MOD_RES (152)..(152): Selenocysteine
  MOD_RES (194)..(194): Selenocysteine
  MOD_RES (206)..(206): Selenocysteine
  MOD_RES (226)..(226): Selenocysteine
  MOD_RES (235)..(235): Selenocysteine
  MOD_RES (237)..(238): Selenocysteine
MFSEELWLENEKKCAVVRKSKQGRKRQELLAVAFGVKVGVKGGFLWPPLKLFACSQISSLVRRAALXHNDNHFNYEKXHNFKVHXFRGPHWCEYCANFMWGLIAQGVRCSDCGLNVHKQCSKHVPNDCQPDLKRIKKVYCCDLXXLVKAHNXQRPMVVDICIREIEAREISNADERLEAVHEVLMLLPPAHYEXLRYLMIHLKKVXMNEKDNFMNAENLGIVFGPXLMRPPEDSXLXXLHDMRYQKLIVQILIENEDVLF

SEQ ID NO: 6102 - protein, 332 aa, Homo sapiens
  MOD_RES (67)..(67): Selenocysteine
  MOD_RES (78)..(78): Selenocysteine
  MOD_RES (85)..(85): Selenocysteine
  MOD_RES (144)..(145): Selenocysteine
  MOD_RES (152)..(152): Selenocysteine
  MOD_RES (182)..(182): Selenocysteine
  MOD_RES (213)..(213): Selenocysteine
  MOD_RES (229)..(229): Selenocysteine
  MOD_RES (232)..(232): Selenocysteine
  MOD_RES (266)..(266): Selenocysteine
  MOD_RES (278)..(278): Selenocysteine
  MOD_RES (298)..(298): Selenocysteine
  MOD_RES (307)..(307): Selenocysteine
  MOD_RES (309)..(310): Selenocysteine
MFSEELWLENEKKCAVVRKSKQGRKRQELLAVAFGVKVGVKGGFLWPPLKLFACSQISSLVRRAALXHNDNHFNYEKXHNFKVHXFRGPHWCEYCANFMWGLIAQGVRCSDCGLNVHKQCSKHVPNDCQPDLKRIKKVYCCDLXXLVKAHNXQRPMVVDICIREIEARGLKSEGLYRVSGFXEHIEDVKMAFDRDGEKADISANVYPDINIIXGALKLYFRDLPIPVIXYDXYSKFIDAAKISNADERLEAVHEVLMLLPPAHYEXLRYLMIHLKKVXMNEKDNFMNAENLGIVFGPXLMRPPEDSXLXXLHDMRYQKLIVQILIENEDVLF

SEQ ID NO: 6103 - protein, 197 aa, Homo sapiens
  MOD_RES (67)..(67): Selenocysteine
  MOD_RES (78)..(78): Selenocysteine
  MOD_RES (85)..(85): Selenocysteine
  MOD_RES (144)..(145): Selenocysteine
  MOD_RES (152)..(152): Selenocysteine
  MOD_RES (182)..(182): Selenocysteine
MFSEELWLENEKKCAVVRKSKQGRKRQELLAVAFGVKVGVKGGFLWPPLKLFACSQISSLVRRAALXHNDNHFNYEKXHNFKVHXFRGPHWCEYCANFMWGLIAQGVRCSDCGLNVHKQCSKHVPNDCQPDLKRIKKVYCCDLXXLVKAHNXQRPMVVDICIREIEARGLKSEGLYRVSGFXEHIEDVKMAFDRGLL

SEQ ID NO: 6104 - protein, 274 aa, Homo sapiens
  MOD_RES (67)..(67): Selenocysteine
  MOD_RES (78)..(78): Selenocysteine
  MOD_RES (85)..(85): Selenocysteine
  MOD_RES (124)..(124): Selenocysteine
  MOD_RES (155)..(155): Selenocysteine
  MOD_RES (171)..(171): Selenocysteine
  MOD_RES (174)..(174): Selenocysteine
  MOD_RES (208)..(208): Selenocysteine
  MOD_RES (220)..(220): Selenocysteine
  MOD_RES (240)..(240): Selenocysteine
  MOD_RES (249)..(249): Selenocysteine
  MOD_RES (251)..(252): Selenocysteine
MFSEELWLENEKKCAVVRKSKQGRKRQELLAVAFGVKVGVKGGFLWPPLKLFACSQISSLVRRAALXHNDNHFNYEKXHNFKVHXFRGPHWCEYCANFMWGLIAQGVRCSGLKSEGLYRVSGFXEHIEDVKMAFDRDGEKADISANVYPDINIIXGALKLYFRDLPIPVIXYDXYSKFIDAAKISNADERLEAVHEVLMLLPPAHYEXLRYLMIHLKKVXMNEKDNFMNAENLGIVFGPXLMRPPEDSXLXXLHDMRYQKLIVQILIENEDVLF

SEQ ID NO: 6105 - protein, 228 aa, Homo sapiens
  MOD_RES (67)..(67): Selenocysteine
  MOD_RES (78)..(78): Selenocysteine
  MOD_RES (85)..(85): Selenocysteine
  MOD_RES (124)..(124): Selenocysteine
  MOD_RES (162)..(162): Selenocysteine
  MOD_RES (174)..(174): Selenocysteine
  MOD_RES (194)..(194): Selenocysteine
  MOD_RES (203)..(203): Selenocysteine
  MOD_RES (205)..(206): Selenocysteine
MFSEELWLENEKKCAVVRKSKQGRKRQELLAVAFGVKVGVKGGFLWPPLKLFACSQISSLVRRAALXHNDNHFNYEKXHNFKVHXFRGPHWCEYCANFMWGLIAQGVRCSGLKSEGLYRVSGFXEHIEDVKMAFDREISNADERLEAVHEVLMLLPPAHYEXLRYLMIHLKKVXMNEKDNFMNAENLGIVFGPXLMRPPEDSXLXXLHDMRYQKLIVQILIENEDVLF

SEQ ID NO: 6106 - protein, 37 aa, Homo sapiens
  MOD_RES (2)..(2): Selenocysteine
  MOD_RES (4)..(4): Selenocysteine
  MOD_RES (21)..(21): Selenocysteine
MXQXHRAKSASSCPNLLVPEXWPHQVSASHAGRSKQP

SEQ ID NO: 6107 - protein, 187 aa, Homo sapiens
  MOD_RES (2)..(2): Selenocysteine
  MOD_RES (4)..(4): Selenocysteine
  MOD_RES (21)..(21): Selenocysteine
  MOD_RES (63)..(63): Selenocysteine
  MOD_RES (80)..(80): Selenocysteine
  MOD_RES (90)..(90): Selenocysteine
  MOD_RES (168)..(168): Selenocysteine
  MOD_RES (177)..(177): Selenocysteine
MXQXHRAKSASSCPNLLVPEXWPHQVSASHAGRSKQPQGGILKINEEHRRGAIQDLLASPGFXFGKRVVFDSHCLKRQHXFADGLHSSCXSNAEEYQPPIWKSYLYQLQQEAPRPKRIICPREVENRPKYYGREFHGIISREQADELLGGVEGAYILRESQRQPGCYXLALRFGNQXLNYRLFHDGK

SEQ ID NO: 6108 - protein, 180 aa, Homo sapiens
  MOD_RES (11)..(11): Selenocysteine
  MOD_RES (31)..(31): Selenocysteine
  MOD_RES (34)..(34): Selenocysteine
  MOD_RES (39)..(39): Selenocysteine
  MOD_RES (46)..(46): Selenocysteine
  MOD_RES (105)..(106): Selenocysteine
  MOD_RES (113)..(113): Selenocysteine
  MOD_RES (143)..(143): Selenocysteine
  MOD_RES (174)..(174): Selenocysteine
NPIYEHIGYAXLLREKVSRRLSRSKNEPRKXNVXHEEHXAVEKVHXFRGPHWCEYCANFMWGLIAQGVRCSDCGLNVHKQCSKHVPNDCQPDLKRIKKVYCCDLXXLVKAHNXQRPMVVDICIREIEARGLKSEGLYRVSGFXEHIEDVKMAFDRDGEKADISANVYPDINIIXGALKLY

SEQ ID NO: 6109 - protein, 91 aa, Homo sapiens
  MOD_RES (1)..(1): Any amino acid
  MOD_RES (28)..(28): Selenocysteine
  MOD_RES (44)..(44): Selenocysteine
  MOD_RES (47)..(47): Selenocysteine
  MOD_RES (81)..(81): Selenocysteine
XDVKMAFDRDGEKADISANVYPDINIIXGALKLYFRDLPIPVIXYDXYSKFIDAAKISNADERLEAVHEVLMLLPPAHYEXLRYLMIHLKK

SEQ ID NO: 6110 - protein, 136 aa, Homo sapiens
  MOD_RES (1)..(1): Any amino acid
  MOD_RES (17)..(17): Selenocysteine
  MOD_RES (55)..(55): Selenocysteine
  MOD_RES (63)..(63): Selenocysteine
  MOD_RES (85)..(85): Selenocysteine
  MOD_RES (114)..(114): Selenocysteine
  MOD_RES (126)..(126): Selenocysteine
  MOD_RES (134)..(134): Selenocysteine
XRAKSASSCPNLLVPEXWPHQVSASHAGRSKQPQGGILKINEEHRRGAIQMLKNXSLLYGNHXYISYSKRHLVPRESFVLGRWKXDQNIMEESFMGSSLGSRRMSFLEAWRVPXSLEKASGNQDAXRWLSGLEXRP

SEQ ID NO: 6111 - protein, 128 aa, Homo sapiens
  MOD_RES (7)..(7): Selenocysteine
  MOD_RES (21)..(21): Selenocysteine
  MOD_RES (29)..(29): Selenocysteine
  MOD_RES (36)..(36): Selenocysteine
  MOD_RES (45)..(45): Selenocysteine
  MOD_RES (86)..(86): Selenocysteine
  MOD_RES (119)..(119): Selenocysteine
MGSRASXLLRDEELEEIKKEXGFSHSQIXRLYSRFXSLDKGENGXLSREDFQRIPELAINPLGDRIINAFFPEGEDQVNFRGFMRXLAHFRPIEDNEKSKDVNGPEPLNSRSNKLHCAXHDGRSKYLR

SEQ ID NO: 6112 - protein, 154 aa, Homo sapiens
  MOD_RES (7)..(7): Selenocysteine
  MOD_RES (21)..(21): Selenocysteine
  MOD_RES (29)..(29): Selenocysteine
  MOD_RES (36)..(36): Selenocysteine
  MOD_RES (45)..(45): Selenocysteine
  MOD_RES (86)..(86): Selenocysteine
MGSRASXLLRDEELEEIKKEXGFSHSQIXRLYSRFXSLDKGENGXLSREDFQRIPELAINPLGDRIINAFFPEGEDQVNFRGFMRXLAHFRPIEDNEKSKDVNGPEPLNSRSNKLHFAFRLYDLDKDEKISRDELLQVLEKVDVEQKMSIRFLH

SEQ ID NO: 6113 - protein, 195 aa, Homo sapiens
  MOD_RES (7)..(7): Selenocysteine
  MOD_RES (21)..(21): Selenocysteine
  MOD_RES (29)..(29): Selenocysteine
  MOD_RES (36)..(36): Selenocysteine
  MOD_RES (45)..(45): Selenocysteine
  MOD_RES (86)..(86): Selenocysteine
  MOD_RES (159)..(159): Selenocysteine
  MOD_RES (174)..(174): Selenocysteine
MGSRASXLLRDEELEEIKKEXGFSHSQIXRLYSRFXSLDKGENGXLSREDFQRIPELAINPLGDRIINAFFPEGEDQVNFRGFMRXLAHFRPIEDNEKSKDVNGPEPLNSRSNKLHFAFRLYDLDKDEKISRDELLQVLRMMVGVNISDEQLGSIADRXIQEADQDGDSAISFXEFVKVLEKVDVEQKMSIRFLH

SEQ ID NO: 6114 - protein, 123 aa, Homo sapiens
  MOD_RES (7)..(7): Selenocysteine
  MOD_RES (21)..(21): Selenocysteine
  MOD_RES (29)..(29): Selenocysteine
  MOD_RES (36)..(36): Selenocysteine
  MOD_RES (45)..(45): Selenocysteine
  MOD_RES (86)..(86): Selenocysteine
MGSRASXLLRDEELEEIKKEXGFSHSQIXRLYSRFXSLDKGENGXLSREDFQRIPELAINPLGDRIINAFFPEGEDQVNFRGFMRXLAHFRPIEDNEKSKDVNGPEPLNSRSNKLHLEEERYI

SEQ ID NO: 6115 - protein, 53 aa, Homo sapiens
  MOD_RES (7)..(7): Selenocysteine
  MOD_RES (21)..(21): Selenocysteine
  MOD_RES (36)..(36): Selenocysteine
  MOD_RES (40)..(40): Selenocysteine
  MOD_RES (52)..(52): Selenocysteine
MGSRASXLLRDEELEEIKKEXGSGKISRGFQNLPSXHWGXGSSMPSFQRERXR

SEQ ID NO: 6116 - protein, 91 aa, Homo sapiens
  MOD_RES (1)..(1): Any amino acid
  MOD_RES (40)..(40): Selenocysteine
XREDFQRIPELAINPLGDRIINAFFPEGEDQVNFRGFMRXLAHFRPIEDNEKSKDVNGPEPLNSRSNKLHFAFRLYDLDKDEKISRDELLQ

SEQ ID NO: 6117 - protein, 196 aa, Homo sapiens
  MOD_RES (21)..(21): Selenocysteine
  MOD_RES (98)..(98): Selenocysteine
  MOD_RES (100)..(100): Selenocysteine
  MOD_RES (149)..(149): Selenocysteine
  MOD_RES (160)..(160): Selenocysteine
  MOD_RES (178)..(178): Selenocysteine
MGSRSSHAAVIPDGDSIRREXGFSQASLLRLHHRFRALDRNKKGYLSRMDLQQIGALAVNPLGDRIIESFFPDGSQRVDFPGFVRVLAHFRPVEDEDXEXQDPKKPEPLNSRRNKLHYAFQLYDLDRDGKISRHEMLQVLRLMVGVQVXEEQLENIADRXVQEADEDGDGAVSFVEFXKSLEKMDVEQKMSIRILK

SEQ ID NO: 6118 - protein, 80 aa, Homo sapiens
  MOD_RES (45)..(45): Selenocysteine
  MOD_RES (60)..(60): Selenocysteine
  MOD_RES (67)..(67): Selenocysteine
  MOD_RES (73)..(73): Selenocysteine
  MOD_RES (80)..(80): Selenocysteine
FVAFLRSARPFLPCAPSPRPPHCPPAVSLALPFGKPELFVQCLAXYSYRHGSGKEKKVLXYSDLANXAQQSEXFQFLAGX

SEQ ID NO: 6119 - protein, 131 aa, Homo sapiens
  MOD_RES (45)..(45): Selenocysteine
  MOD_RES (49)..(49): Selenocysteine
  MOD_RES (58)..(58): Selenocysteine
  MOD_RES (73)..(73): Selenocysteine
  MOD_RES (80)..(80): Selenocysteine
  MOD_RES (86)..(86): Selenocysteine
MADVVVGKDKGGEQRLISLPLSRIRVIMKSSPEVSSINQEALVLXAKAXELFVQCLAXYSYRHGSGKEKKVLXYSDLANXAQQSEXFQFLADILPKKILASKYLKMLKEEKREEDEENDNDNESDHDEADS

SEQ ID NO: 6120 - protein, 56 aa, Homo sapiens
  MOD_RES (45)..(45): Selenocysteine
  MOD_RES (49)..(49): Selenocysteine
MADVVVGKDKGGEQRLISLPLSRIRVIMKSSPEVSSINQEALVLXAKAXIYYQRRF

SEQ ID NO: 6121 - protein, 97 aa, Homo sapiens
  MOD_RES (1)..(1): Any amino acid
  MOD_RES (24)..(24): Selenocysteine
  MOD_RES (39)..(39): Selenocysteine
  MOD_RES (46)..(46): Selenocysteine
  MOD_RES (52)..(52): Selenocysteine
XCPPAVSLALPFGKPELFVQCLAXYSYRHGSGKEKKVLXYSDLANXAQQSEXFQFLADILPKKILASKYLKMLKEEKREEDEENDNDNESDHDEADS

SEQ ID NO: 6122 - protein, 86 aa, Homo sapiens
  MOD_RES (52)..(52): Selenocysteine
  MOD_RES (63)..(63): Selenocysteine
MPSLPAPPAPLLLLGLLLLGSRPARGAGPEPPVLPIRSEKEPLPVRGAAGCXFGGKVYALDEXWHPDLGEPFGVMRCVLCACEAGP

SEQ ID NO: 6123 - protein, 350 aa, Homo sapiens
  MOD_RES (52)..(52): Selenocysteine
  MOD_RES (63)..(63): Selenocysteine
  MOD_RES (91)..(91): Selenocysteine
  MOD_RES (108)..(108): Selenocysteine
  MOD_RES (124)..(124): Selenocysteine
  MOD_RES (170)..(170): Selenocysteine
  MOD_RES (177)..(177): Selenocysteine
  MOD_RES (209)..(209): Selenocysteine
  MOD_RES (229)..(229): Selenocysteine
  MOD_RES (260)..(260): Selenocysteine
  MOD_RES (262)..(262): Selenocysteine
  MOD_RES (282)..(282): Selenocysteine
  MOD_RES (288)..(288): Selenocysteine
  MOD_RES (301)..(301): Selenocysteine
  MOD_RES (304)..(304): Selenocysteine
  MOD_RES (308)..(308): Selenocysteine
  MOD_RES (330)..(330): Selenocysteine
  MOD_RES (335)..(335): Selenocysteine
  MOD_RES (338)..(338): Selenocysteine
  MOD_RES (347)..(347): Selenocysteine
MPSLPAPPAPLLLLGLLLLGSRPARGAGPEPPVLPIRSEKEPLPVRGAAGCXFGGKVYALDEXWHPDLGEPFGVMRCVLCACEAPQWGRRXRGPGRVSCKNIKPECPXPACGQPRQLPGHCCQXCPQERSSSERQPSGLSFEYPRDPEHRSYSDRGEPGAEERARGDGHXDFVALLXGPRSQAVARARVSLLRSSLRFSISYRRLDRPXRIRFSDSNGSVLFEHPAAPXQDGLVCGVWRAVPRLSLRLLRAEQLHVALVXLXHPSGEVWGPLIRHRALAAEXFSAILXLEGPPQQGVGGIXLLXLSDXEDSLHFLLLFRGLLEPRSGDSXPGAAXARXSGQCLSPGXRLC

SEQ ID NO: 6124 - protein, 915 aa, Homo sapiens
  MOD_RES (52)..(52): Selenocysteine
  MOD_RES (63)..(63): Selenocysteine
  MOD_RES (91)..(91): Selenocysteine
  MOD_RES (108)..(108): Selenocysteine
  MOD_RES (124)..(124): Selenocysteine
  MOD_RES (170)..(170): Selenocysteine
  MOD_RES (177)..(177): Selenocysteine
  MOD_RES (209)..(209): Selenocysteine
  MOD_RES (229)..(229): Selenocysteine
  MOD_RES (260)..(260): Selenocysteine
  MOD_RES (262)..(262): Selenocysteine
  MOD_RES (282)..(282): Selenocysteine
  MOD_RES (288)..(288): Selenocysteine
  MOD_RES (301)..(301): Selenocysteine
  MOD_RES (304)..(304): Selenocysteine
  MOD_RES (308)..(308): Selenocysteine
  MOD_RES (330)..(330): Selenocysteine
  MOD_RES (367)..(367): Selenocysteine
  MOD_RES (421)..(421): Selenocysteine
  MOD_RES (430)..(430): Selenocysteine
  MOD_RES (467)..(467): Selenocysteine
  MOD_RES (493)..(493): Selenocysteine
  MOD_RES (521)..(521): Selenocysteine
  MOD_RES (541)..(541): Selenocysteine
  MOD_RES (543)..(543): Selenocysteine
  MOD_RES (552)..(552): Selenocysteine
  MOD_RES (592)..(593): Selenocysteine
  MOD_RES (634)..(634): Selenocysteine
  MOD_RES (664)..(664): Selenocysteine
  MOD_RES (690)..(690): Selenocysteine
  MOD_RES (695)..(695): Selenocysteine
  MOD_RES (757)..(757): Selenocysteine
  MOD_RES (775)..(775): Selenocysteine
  MOD_RES (780)..(780): Selenocysteine
  MOD_RES (804)..(804): Selenocysteine
  MOD_RES (859)..(859): Selenocysteine
  MOD_RES (893)..(893): Selenocysteine
  MOD_RES (902)..(902): Selenocysteine
  MOD_RES (904)..(904): Selenocysteine
MPSLPAPPAPLLLLGLLLLGSRPARGAGPEPPVLPIRSEKEPLPVRGAAGCXFGGKVYALDEXWHPDLGEPFGVMRCVLCACEAPQWGRRXRGPGRVSCKNIKPECPXPACGQPRQLPGHCCQXCPQERSSSERQPSGLSFEYPRDPEHRSYSDRGEPGAEERARGDGHXDFVALLXGPRSQAVARARVSLLRSSLRFSISYRRLDRPXRIRFSDSNGSVLFEHPAAPXQDGLVCGVWRAVPRLSLRLLRAEQLHVALVXLXHPSGEVWGPLIRHRALAAEXFSAILXLEGPPQQGVGGIXLLXLSDXEDSLHFLLLFRGLLEPRSGGLXQVPLRLQILHQGQLLRELQANVSAQEPGFAEVLPNLXVQEMDWLVLGELQMALEWAGRPGLRISGHIAARKSCDVLQSVLCGADALIPVQXGAAGSASLXLLGNGSLIYQAVGICPGLGARGAHMLLQNELFLNVGXKDFPDGELRGHVAALPYCGHSARHDXLPVPLAGALVLPPVKSQAAGHAWLSLDXHCHLHYEVLLAGLGGSEQGXVXAHLLGPPGXPGPRRLLKGFYGSEAQGVVKDLEPELLRHLAKGMASLMIXXKGSPRGELRGQVHIANQCEVGGLRLEAAGAEGVRALGAPDXASAAPPVVPGLPALAPAKPGGPGRPRDPNXCFFEGQQRPHGARWAPNYDPLCSLCXCQRRXVICDPVVCPPPSCPHPVQAPDQCCPVCPEKQDVRDLPGLPRSRDPGEGCYFDGDRSWRAAGXRWHPVVPPFGLIKCAVCXCKGGXGEVHCEKVQCPRLACAQPVRVNPXDCCKQCPVGSGAHPQLGDPMQADGPRGCRFAGQWFPESQSWHPSVPPFGEMSCIXCRCGAGVPHCERDDCSLPLSCGSGKESRCCSRCXAHRRPAPEXRXDPELEKEAEGS

SEQ ID NO: 6125 - protein, 954 aa, Homo sapiens
  MOD_RES (52)..(52): Selenocysteine
  MOD_RES (63)..(63): Selenocysteine
  MOD_RES (91)..(91): Selenocysteine
  MOD_RES (108)..(108): Selenocysteine
  MOD_RES (124)..(124): Selenocysteine
  MOD_RES (170)..(170): Selenocysteine
  MOD_RES (177)..(177): Selenocysteine
  MOD_RES (209)..(209): Selenocysteine
  MOD_RES (229)..(229): Selenocysteine
  MOD_RES (260)..(260): Selenocysteine
  MOD_RES (262)..(262): Selenocysteine
  MOD_RES (282)..(282): Selenocysteine
  MOD_RES (288)..(288): Selenocysteine
  MOD_RES (301)..(301): Selenocysteine
  MOD_RES (304)..(304): Selenocysteine
  MOD_RES (308)..(308): Selenocysteine
  MOD_RES (330)..(330): Selenocysteine
  MOD_RES (367)..(367): Selenocysteine
  MOD_RES (421)..(421): Selenocysteine
  MOD_RES (430)..(430): Selenocysteine
  MOD_RES (446)..(446): Selenocysteine
  MOD_RES (454)..(454): Selenocysteine
  MOD_RES (457)..(457): Selenocysteine
  MOD_RES (466)..(466): Selenocysteine
  MOD_RES (480)..(480): Selenocysteine
  MOD_RES (507)..(507): Selenocysteine
  MOD_RES (533)..(533): Selenocysteine
  MOD_RES (561)..(561): Selenocysteine
  MOD_RES (581)..(581): Selenocysteine
  MOD_RES (583)..(583): Selenocysteine
  MOD_RES (592)..(592): Selenocysteine
  MOD_RES (632)..(633): Selenocysteine
  MOD_RES (674)..(674): Selenocysteine
  MOD_RES (704)..(704): Selenocysteine
  MOD_RES (730)..(730): Selenocysteine
  MOD_RES (735)..(735): Selenocysteine
  MOD_RES (797)..(797): Selenocysteine
  MOD_RES (815)..(815): Selenocysteine
  MOD_RES (820)..(820): Selenocysteine
  MOD_RES (844)..(844): Selenocysteine
  MOD_RES (899)..(899): Selenocysteine
  MOD_RES (933)..(933): Selenocysteine
  MOD_RES (941)..(941): Selenocysteine
  MOD_RES (943)..(943): Selenocysteine
MPSLPAPPAPLLLLGLLLLGSRPARGAGPEPPVLPIRSEKEPLPVRGAAGCXFGGKVYALDEXWHPDLGEPFGVMRCVLCACEAPQWGRRXRGPGRVSCKNIKPECPXPACGQPRQLPGHCCQXCPQERSSSERQPSGLSFEYPRDPEHRSYSDRGEPGAEERARGDGHXDFVALLXGPRSQAVARARVSLLRSSLRFSISYRRLDRPXRIRFSDSNGSVLFEHPAAPXQDGLVCGVWRAVPRLSLRLLRAEQLHVALVXLXHPSGEVWGPLIRHRALAAEXFSAILXLEGPPQQGVGGIXLLXLSDXEDSLHFLLLFRGLLEPRSGGLXQVPLRLQILHQGQLLRELQANVSAQEPGFAEVLPNLXVQEMDWLVLGELQMALEWAGRPGLRISGHIAARKSCDVLQSVLCGADALIPVQXGAAGSASLXLLGNGSLIYQVQVVGXSSEVVAMXLEXKPQRRDQRXVLCHMAGLQPGGHXAVGICPGLGARGAHMLLQNELFLNVGXKDFPDGELRGHVAALPYCGHSARHDXLPVPLAGALVLPPVKSQAAGHAWLSLDXHCHLHYEVLLAGLGGSEQGXVXAHLLGPPGXPGPRRLLKGFYGSEAQGVVKDLEPELLRHLAKGMASLMIXXKGSPRGELRGQVHIANQCEVGGLRLEAAGAEGVRALGAPDXASAAPPVVPGLPALAPAKPGGPGRPRDPNXCFFEGQQRPHGARWAPNYDPLCSLCXCQRRXVICDPVVCPPPSCPHPVQAPDQCCPVCPEKQDVRDLPGLPRSRDPGEGCYFDGDRSWRAAGXRWHPVVPPFGLIKCAVCXCKGGXGEVHCEKVQCPRLACAQPVRVNPXDCCKQCPVGSGAHPQLGDPMQADGPRGCRFAGQWFPESQSWHPSVPPFGEMSCIXCRCGAGVPHCERDDCSLPLSCGSGKESRCCSRCXAHRRPPEXRXDPELEKEAEGS

SEQ ID NO: 6126 - protein, 955 aa, Homo sapiens
  MOD_RES (52)..(52): Selenocysteine
  MOD_RES (63)..(63): Selenocysteine
  MOD_RES (91)..(91): Selenocysteine
  MOD_RES (108)..(108): Selenocysteine
  MOD_RES (124)..(124): Selenocysteine
  MOD_RES (170)..(170): Selenocysteine
  MOD_RES (177)..(177): Selenocysteine
  MOD_RES (209)..(209): Selenocysteine
  MOD_RES (229)..(229): Selenocysteine
  MOD_RES (260)..(260): Selenocysteine
  MOD_RES (262)..(262): Selenocysteine
  MOD_RES (282)..(282): Selenocysteine
  MOD_RES (288)..(288): Selenocysteine
  MOD_RES (301)..(301): Selenocysteine
  MOD_RES (304)..(304): Selenocysteine
  MOD_RES (308)..(308): Selenocysteine
  MOD_RES (330)..(330): Selenocysteine
  MOD_RES (367)..(367): Selenocysteine
  MOD_RES (421)..(421): Selenocysteine
  MOD_RES (430)..(430): Selenocysteine
  MOD_RES (446)..(446): Selenocysteine
  MOD_RES (454)..(454): Selenocysteine
  MOD_RES (457)..(457): Selenocysteine
  MOD_RES (466)..(466): Selenocysteine
  MOD_RES (480)..(480): Selenocysteine
  MOD_RES (507)..(507): Selenocysteine
  MOD_RES (533)..(533): Selenocysteine
  MOD_RES (561)..(561): Selenocysteine
  MOD_RES (581)..(581): Selenocysteine
  MOD_RES (583)..(583): Selenocysteine
  MOD_RES (592)..(592): Selenocysteine
  MOD_RES (632)..(633): Selenocysteine
  MOD_RES (674)..(674): Selenocysteine
  MOD_RES (704)..(704): Selenocysteine
  MOD_RES (730)..(730): Selenocysteine
  MOD_RES (735)..(735): Selenocysteine
  MOD_RES (797)..(797): Selenocysteine
  MOD_RES (815)..(815): Selenocysteine
  MOD_RES (820)..(820): Selenocysteine
  MOD_RES (844)..(844): Selenocysteine
  MOD_RES (899)..(899): Selenocysteine
  MOD_RES (933)..(933): Selenocysteine
  MOD_RES (942)..(942): Selenocysteine
  MOD_RES (944)..(944): Selenocysteine
MPSLPAPPAPLLLLGLLLLGSRPARGAGPEPPVLPIRSEKEPLPVRGAAGCXFGGKVYALDEXWHPDLGEPFGVMRCVLCACEAPQWGRRXRGPGRVSCKNIKPECPXPACGQPRQLPGHCCQXCPQERSSSERQPSGLSFEYPRDPEHRSYSDRGEPGAEERARGDGHXDFVALLXGPRSQAVARARVSLLRSSLRFSISYRRLDRPXRIRFSDSNGSVLFEHPAAPXQDGLVCGVWRAVPRLSLRLLRAEQLHVALVXLXHPSGEVWGPLIRHRALAAEXFSAILXLEGPPQQGVGGIXLLXLSDXEDSLHFLLLFRGLLEPRSGGLXQVPLRLQILHQGQLLRELQANVSAQEPGFAEVLPNLXVQEMDWLVLGELQMALEWAGRPGLRISGHIAARKSCDVLQSVLCGADALIPVQXGAAGSASLXLLGNGSLIYQVQVVGXSSEVVAMXLEXKPQRRDQRXVLCHMAGLQPGGHXAVGICPGLGARGAHMLLQNELFLNVGXKDFPDGELRGHVAALPYCGHSARHDXLPVPLAGALVLPPVKSQAAGHAWLSLDXHCHLHYEVLLAGLGGSEQGXVXAHLLGPPGXPGPRRLLKGFYGSEAQGVVKDLEPELLRHLAKGMASLMIXXKGSPRGELRGQVHIANQCEVGGLRLEAAGAEGVRALGAPDXASAAPPVVPGLPALAPAKPGGPGRPRDPNXCFFEGQQRPHGARWAPNYDPLCSLCXCQRRXVICDPVVCPPPSCPHPVQAPDQCCPVCPEKQDVRDLPGLPRSRDPGEGCYFDGDRSWRAAGXRWHPVVPPFGLIKCAVCXCKGGXGEVHCEKVQCPRLACAQPVRVNPXDCCKQCPVGSGAHPQLGDPMQADGPRGCRFAGQWFPESQSWHPSVPPFGEMSCIXCRCGAGVPHCERDDCSLPLSCGSGKESRCCSRCXAHRRPAPEXRXDPELEKEAEGS

SEQ ID NO: 6127 - protein, 94 aa, Homo sapiens
  MOD_RES (52)..(52): Selenocysteine
  MOD_RES (63)..(63): Selenocysteine
  MOD_RES (85)..(85): Selenocysteine
  MOD_RES (87)..(87): Selenocysteine
MPSLPAPPAPLLLLGLLLLGSRPARGAGPEPPVLPIRSEKEPLPVRGAAGCXFGGKVYALDEXWHPDLGEPFGVMRCVLCACEAXGXLRPREMK

SEQ ID NO: 6128 - protein, 450 aa, Homo sapiens
  MOD_RES (21)..(21): Selenocysteine
  MOD_RES (29)..(29): Selenocysteine
  MOD_RES (105)..(105): Selenocysteine
  MOD_RES (114)..(115): Selenocysteine
  MOD_RES (137)..(137): Selenocysteine
  MOD_RES (152)..(152): Selenocysteine
  MOD_RES (157)..(157): Selenocysteine
  MOD_RES (238)..(238): Selenocysteine
  MOD_RES (260)..(260): Selenocysteine
  MOD_RES (283)..(283): Selenocysteine
  MOD_RES (287)..(287): Selenocysteine
  MOD_RES (340)..(340): Selenocysteine
  MOD_RES (354)..(355): Selenocysteine
  MOD_RES (362)..(362): Selenocysteine
  MOD_RES (374)..(374): Selenocysteine
  MOD_RES (403)..(403): Selenocysteine
  MOD_RES (405)..(406): Selenocysteine
  MOD_RES (414)..(414): Selenocysteine
  MOD_RES (431)..(431): Selenocysteine
MGGMKYIFSLLFFLLLEGGKXEQVKHSEXYCMFQDKKYRVGERWHPYLEPYGLVYCVNCICSENGNVLCSRVRCPNVHCLSPVHIPHLCCPRCPDSLPPVNNKVXSKSCEYNGXXYQHGELFVAEGLFQNRQPNQCXQCSCSEGNVYCGLKXCPKLXCAFPVSVPDSCCRVCRGDGELSWEHSDGDIFRQPANREARHSYHRSHYDPPPSRQAGGLSRFPGARSHRGALMDSQQASGXIVQIVINNKHKHGQVCVSNGKXYSHGESWHPNLRAFGIVECVLCXCNVXKQECKKIHCPNRYPCKYPQKIDGKCCKVCPGKKAKELPGQSFDNKGYFCGEEXMPVYESVFMEDGEXXRKIALEXERPPQVEVHVWXIRKGILQHFHIEKISKRMFEELPHFKLVXRXXLSQWKIFXEGEAQISQMCSSRVCRXELEDLVKVLYLERSEKGHC

SEQ ID NO: 6129 - protein, 456 aa, Homo sapiens
  MOD_RES (27)..(27): Selenocysteine
  MOD_RES (35)..(35): Selenocysteine
  MOD_RES (111)..(111): Selenocysteine
  MOD_RES (120)..(121): Selenocysteine
  MOD_RES (143)..(143): Selenocysteine
  MOD_RES (158)..(158): Selenocysteine
  MOD_RES (163)..(163): Selenocysteine
  MOD_RES (244)..(244): Selenocysteine
  MOD_RES (266)..(266): Selenocysteine
  MOD_RES (289)..(289): Selenocysteine
  MOD_RES (293)..(293): Selenocysteine
  MOD_RES (346)..(346): Selenocysteine
  MOD_RES (360)..(361): Selenocysteine
  MOD_RES (368)..(368): Selenocysteine
  MOD_RES (380)..(380): Selenocysteine
  MOD_RES (409)..(409): Selenocysteine
  MOD_RES (411)..(412): Selenocysteine
  MOD_RES (420)..(420): Selenocysteine
  MOD_RES (437)..(437): Selenocysteine
MRKKWKMGGMKYIFSLLFFLLLEGGKXEQVKHSEXYCMFQDKKYRVGERWHPYLEPYGLVYCVNCICSENGNVLCSRVRCPNVHCLSPVHIPHLCCPRCPDSLPPVNNKVXSKSCEYNGXXYQHGELFVAEGLFQNRQPNQCXQCSCSEGNVYCGLKXCPKLXCAFPVSVPDSCCRVCRGDGELSWEHSDGDIFRQPANREARHSYHRSHYDPPPSRQAGGLSRFPGARSHRGALMDSQQASGXIVQIVINNKHKHGQVCVSNGKXYSHGESWHPNLRAFGIVECVLCXCNVXKQECKKIHCPNRYPCKYPQKIDGKCCKVCPGKKAKELPGQSFDNKGYFCGEEXMPVYESVFMEDGEXXRKIALEXERPPQVEVHVWXIRKGILQHFHIEKISKRMFEELPHFKLVXRXXLSQWKIFXEGEAQISQMCSSRVCRXELEDLVKVLYLERSEKGHC

SEQ ID NO: 6130 - protein, 457 aa, Homo sapiens
  MOD_RES (27)..(27): Selenocysteine
  MOD_RES (35)..(35): Selenocysteine
  MOD_RES (111)..(111): Selenocysteine
  MOD_RES (120)..(121): Selenocysteine
  MOD_RES (143)..(143): Selenocysteine
  MOD_RES (158)..(158): Selenocysteine
  MOD_RES (163)..(163): Selenocysteine
  MOD_RES (244)..(244): Selenocysteine
  MOD_RES (266)..(266): Selenocysteine
  MOD_RES (289)..(289): Selenocysteine
  MOD_RES (293)..(293): Selenocysteine
  MOD_RES (347)..(347): Selenocysteine
  MOD_RES (361)..(362): Selenocysteine
  MOD_RES (369)..(369): Selenocysteine
  MOD_RES (381)..(381): Selenocysteine
  MOD_RES (410)..(410): Selenocysteine
  MOD_RES (412)..(413): Selenocysteine
  MOD_RES (421)..(421): Selenocysteine
  MOD_RES (438)..(438): Selenocysteine
MRKKWKMGGMKYIFSLLFFLLLEGGKXEQVKHSEXYCMFQDKKYRVGERWHPYLEPYGLVYCVNCICSENGNVLCSRVRCPNVHCLSPVHIPHLCCPRCPDSLPPVNNKVXSKSCEYNGXXYQHGELFVAEGLFQNRQPNQCXQCSCSEGNVYCGLKXCPKLXCAFPVSVPDSCCRVCRGDGELSWEHSDGDIFRQPANREARHSYHRSHYDPPPSRQAGGLSRFPGARSHRGALMDSQQASGXIVQIVINNKHKHGQVCVSNGKXYSHGESWHPNLRAFGIVECVLCXCNVXKQECKKIHCPNRYPCKYPQKIDGKCCKVCPGKKAKEELPGQSFDNKGYFCGEEXMPVYESVFMEDGEXXRKIALEXERPPQVEVHVWXIRKGILQHFHIEKISKRMFEELPHFKLVXRXXLSQWKIFXEGEAQISQMCSSRVCRXELEDLVKVLYLERSEKGHC

SEQ ID NO: 6131 - protein, 458 aa, Homo sapiens
  MOD_RES (27)..(27): Selenocysteine
  MOD_RES (35)..(35): Selenocysteine
  MOD_RES (112)..(112): Selenocysteine
  MOD_RES (121)..(122): Selenocysteine
  MOD_RES (144)..(144): Selenocysteine
  MOD_RES (159)..(159): Selenocysteine
  MOD_RES (164)..(164): Selenocysteine
  MOD_RES (245)..(245): Selenocysteine
  MOD_RES (267)..(267): Selenocysteine
  MOD_RES (290)..(290): Selenocysteine
  MOD_RES (294)..(294): Selenocysteine
  MOD_RES (348)..(348): Selenocysteine
  MOD_RES (362)..(363): Selenocysteine
  MOD_RES (370)..(370): Selenocysteine
  MOD_RES (382)..(382): Selenocysteine
  MOD_RES (411)..(411): Selenocysteine
  MOD_RES (413)..(414): Selenocysteine
  MOD_RES (422)..(422): Selenocysteine
  MOD_RES (439)..(439): Selenocysteine
MRKKWKMGGMKYIFSLLFFLLLEGGKXEQVKHSEXYCMFQDKKYRVGERWHPYLEPYGLVYCVNCICSENGNVLCSRVRCPNVHCLSPVHIPHLCCPRCPEDSLPPVNNKVXSKSCEYNGXXYQHGELFVAEGLFQNRQPNQCXQCSCSEGNVYCGLKXCPKLXCAFPVSVPDSCCRVCRGDGELSWEHSDGDIFRQPANREARHSYHRSHYDPPPSRQAGGLSRFPGARSHRGALMDSQQASGXIVQIVINNKHKHGQVCVSNGKXYSHGESWHPNLRAFGIVECVLCXCNVXKQECKKIHCPNRYPCKYPQKIDGKCCKVCPGKKAKEELPGQSFDNKGYFCGEEXMPVYESVFMEDGEXXRKIALEXERPPQVEVHVWXIRKGILQHFHIEKISKRMFEELPHFKLVXRXXLSQWKIFXEGEAQISQMCSSRVCRXELEDLVKVLYLERSEKGHC

SEQ ID NO: 6132 - protein, 378 aa, Homo sapiens
  MOD_RES (27)..(27): Selenocysteine
  MOD_RES (35)..(35): Selenocysteine
  MOD_RES (165)..(165): Selenocysteine
  MOD_RES (187)..(187): Selenocysteine
  MOD_RES (210)..(210): Selenocysteine
  MOD_RES (214)..(214): Selenocysteine
  MOD_RES (268)..(268): Selenocysteine
  MOD_RES (282)..(283): Selenocysteine
  MOD_RES (290)..(290): Selenocysteine
  MOD_RES (302)..(302): Selenocysteine
  MOD_RES (331)..(331): Selenocysteine
  MOD_RES (333)..(334): Selenocysteine
  MOD_RES (342)..(342): Selenocysteine
  MOD_RES (359)..(359): Selenocysteine
MRKKWKMGGMKYIFSLLFFLLLEGGKXEQVKHSEXYCMFQDKKYRVGERWHPYLEPYGLVYCVNCICSENGNVLCSRVRCPNVHCLSPVHIPHLCCPRCPGDGELSWEHSDGDIFRQPANREARHSYHRSHYDPPPSRQAGGLSRFPGARSHRGALMDSQQASGXIVQIVINNKHKHGQVCVSNGKXYSHGESWHPNLRAFGIVECVLCXCNVXKQECKKIHCPNRYPCKYPQKIDGKCCKVCPGKKAKEELPGQSFDNKGYFCGEEXMPVYESVFMEDGEXXRKIALEXERPPQVEVHVWXIRKGILQHFHIEKISKRMFEELPHFKLVXRXXLSQWKIFXEGEAQISQMCSSRVCRXELEDLVKVLYLERSEKGHC

SEQ ID NO: 6133 - protein, 134 aa, Homo sapiens
  MOD_RES (3)..(3): Selenocysteine
  MOD_RES (14)..(14): Selenocysteine
  MOD_RES (31)..(32): Selenocysteine
  MOD_RES (39)..(39): Selenocysteine
  MOD_RES (41)..(41): Selenocysteine
  MOD_RES (54)..(54): Selenocysteine
  MOD_RES (58)..(58): Selenocysteine
  MOD_RES (76)..(76): Selenocysteine
  MOD_RES (83)..(84): Selenocysteine
  MOD_RES (95)..(95): Selenocysteine
  MOD_RES (128)..(128): Selenocysteine
MNXSAPPAVSPNIXVLAPGKGPWQVAFIGIXXGLLSLAXVXGNLLVLISFKVNXELKXVNNYFLLSLACADLIIGXFSMNLYXXYLLMGHWALGXLACDLWLALDYVASNASVMNLLLISFDRYFSVXRPLSYR

SEQ ID NO: 6134 - protein, 454 aa, Homo sapiens
  MOD_RES (3)..(3): Selenocysteine
  MOD_RES (14)..(14): Selenocysteine
  MOD_RES (31)..(32): Selenocysteine
  MOD_RES (39)..(39): Selenocysteine
  MOD_RES (41)..(41): Selenocysteine
  MOD_RES (54)..(54): Selenocysteine
  MOD_RES (58)..(58): Selenocysteine
  MOD_RES (76)..(76): Selenocysteine
  MOD_RES (83)..(84): Selenocysteine
  MOD_RES (95)..(95): Selenocysteine
  MOD_RES (128)..(128): Selenocysteine
  MOD_RES (138)..(138): Selenocysteine
  MOD_RES (172)..(172): Selenocysteine
  MOD_RES (189)..(189): Selenocysteine
  MOD_RES (192)..(192): Selenocysteine
  MOD_RES (202)..(202): Selenocysteine
  MOD_RES (206)..(206): Selenocysteine
  MOD_RES (215)..(215): Selenocysteine
  MOD_RES (230)..(230): Selenocysteine
  MOD_RES (254)..(254): Selenocysteine
  MOD_RES (289)..(289): Selenocysteine
  MOD_RES (315)..(315): Selenocysteine
  MOD_RES (325)..(325): Selenocysteine
  MOD_RES (330)..(330): Selenocysteine
  MOD_RES (354)..(354): Selenocysteine
  MOD_RES (366)..(366): Selenocysteine
  MOD_RES (377)..(377): Selenocysteine
  MOD_RES (379)..(379): Selenocysteine
  MOD_RES (389)..(389): Selenocysteine
  MOD_RES (398)..(398): Selenocysteine
  MOD_RES (412)..(412): Selenocysteine
  MOD_RES (428)..(428): Selenocysteine
MNXSAPPAVSPNIXVLAPGKGPWQVAFIGIXXGLLSLAXVXGNLLVLISFKVNXELKXVNNYFLLSLACADLIIGXFSMNLYXXYLLMGHWALGXLACDLWLALDYVASNASVMNLLLISFDRYFSVXRPLSYRAKRXPRRAALMIGLAWLVSFVLWAPAILFWQYLVGERXVLAGQCYIQFLSQPIIXFGXAMAAFYLPVXVMCXLYWRIYREXENRARELAALQGSEXPGKGGGSSSSSERSQPGAEGSPEXPPGRCCRCCRAPRLLQAYSWKEEEEEDEGSMESLXSSEGEEPGSEVVIKMPMVDPEAQAPXKQPPRSSPNXVKRPXKKGRDRAGKGQKPRGKEQLAKRKXFSLVKEKKAARXLSAILLAFILXWXPYNIMVLVSXFCKDCVPEXLWELGYWLCYVNSXINPMCYALCNKAFRDXFRLLLLCRWDKRRWRKIPKRPGSVHR

SEQ ID NO: 6135 - protein, 460 aa, Homo sapiens
  MOD_RES (3)..(3): Selenocysteine
  MOD_RES (14)..(14): Selenocysteine
  MOD_RES (31)..(32): Selenocysteine
  MOD_RES (39)..(39): Selenocysteine
  MOD_RES (41)..(41): Selenocysteine
  MOD_RES (54)..(54): Selenocysteine
  MOD_RES (58)..(58): Selenocysteine
  MOD_RES (76)..(76): Selenocysteine
  MOD_RES (83)..(84): Selenocysteine
  MOD_RES (95)..(95): Selenocysteine
  MOD_RES (128)..(128): Selenocysteine
  MOD_RES (138)..(138): Selenocysteine
  MOD_RES (172)..(172): Selenocysteine
  MOD_RES (189)..(189): Selenocysteine
  MOD_RES (192)..(192): Selenocysteine
  MOD_RES (202)..(202): Selenocysteine
  MOD_RES (206)..(206): Selenocysteine
  MOD_RES (215)..(215): Selenocysteine
  MOD_RES (230)..(230): Selenocysteine
  MOD_RES (254)..(254): Selenocysteine
  MOD_RES (289)..(289): Selenocysteine
  MOD_RES (315)..(315): Selenocysteine
  MOD_RES (325)..(325): Selenocysteine
  MOD_RES (330)..(330): Selenocysteine
  MOD_RES (354)..(354): Selenocysteine
  MOD_RES (366)..(366): Selenocysteine
  MOD_RES (377)..(377): Selenocysteine
  MOD_RES (379)..(379): Selenocysteine
  MOD_RES (389)..(389): Selenocysteine
  MOD_RES (398)..(398): Selenocysteine
  MOD_RES (412)..(412): Selenocysteine
  MOD_RES (428)..(428): Selenocysteine
  MOD_RES (455)..(455): Selenocysteine
MNXSAPPAVSPNIXVLAPGKGPWQVAFIGIXXGLLSLAXVXGNLLVLISFKVNXELKXVNNYFLLSLACADLIIGXFSMNLYXXYLLMGHWALGXLACDLWLALDYVASNASVMNLLLISFDRYFSVXRPLSYRAKRXPRRAALMIGLAWLVSFVLWAPAILFWQYLVGERXVLAGQCYIQFLSQPIIXFGXAMAAFYLPVXVMCXLYWRIYREXENRARELAALQGSEXPGKGGGSSSSSERSQPGAEGSPEXPPGRCCRCCRAPRLLQAYSWKEEEEEDEGSMESLXSSEGEEPGSEVVIKMPMVDPEAQAPXKQPPRSSPNXVKRPXKKGRDRAGKGQKPRGKEQLAKRKXFSLVKEKKAARXLSAILLAFILXWXPYNIMVLVSXFCKDCVPEXLWELGYWLCYVNSXINPMCYALCNKAFRDXFRLLLLCRWDKRRWRKIPKRPGSVHRXPSRQC

SEQ ID NO: 6136 - protein, 466 aa, Homo sapiens
  MOD_RES (5)..(5): Selenocysteine
  MOD_RES (15)..(15): Selenocysteine
  MOD_RES (20)..(20): Selenocysteine
  MOD_RES (37)..(37): Selenocysteine
  MOD_RES (56)..(56): Selenocysteine
  MOD_RES (81)..(81): Selenocysteine
  MOD_RES (84)..(84): Selenocysteine
  MOD_RES (126)..(126): Selenocysteine
  MOD_RES (130)..(130): Selenocysteine
  MOD_RES (136)..(137): Selenocysteine
  MOD_RES (170)..(170): Selenocysteine
  MOD_RES (187)..(187): Selenocysteine
  MOD_RES (190)..(190): Selenocysteine
  MOD_RES (203)..(203): Selenocysteine
  MOD_RES (271)..(271): Selenocysteine
  MOD_RES (287)..(287): Selenocysteine
  MOD_RES (302)..(302): Selenocysteine
  MOD_RES (307)..(307): Selenocysteine
  MOD_RES (310)..(310): Selenocysteine
  MOD_RES (323)..(323): Selenocysteine
  MOD_RES (329)..(329): Selenocysteine
  MOD_RES (331)..(331): Selenocysteine
  MOD_RES (338)..(338): Selenocysteine
  MOD_RES (340)..(340): Selenocysteine
  MOD_RES (342)..(343): Selenocysteine
  MOD_RES (369)..(369): Selenocysteine
  MOD_RES (386)..(386): Selenocysteine
  MOD_RES (388)..(388): Selenocysteine
  MOD_RES (399)..(399): Selenocysteine
  MOD_RES (411)..(411): Selenocysteine
  MOD_RES (420)..(420): Selenocysteine
  MOD_RES (423)..(423): Selenocysteine
  MOD_RES (434)..(434): Selenocysteine
  MOD_RES (446)..(446): Selenocysteine
  MOD_RES (450)..(450): Selenocysteine
  MOD_RES (465)..(465): Selenocysteine
MNNSXNSSNNSLALXSPYKXFEVVFIVLVAGSLSLVXIIGNILVMVSIKVNRHLQXVNNYFLFSLACADLIIGVFSMNLYXLYXVIGYWPLGPVVCDLWLALDYVVSNASVMNLLIISFDRYFCVXKPLXYPVKRXXKMAGMMIAAAWVLSFILWAPAILFWQFIVGVRXVEDGECYIQFFSNAAVXFGXAIAAFYLPVIIMXVLYWHISRASKSRIKKDKKEPVANQDPVSPSLVQGRIVKPNNNNMPSSDDGLEHNKIQNGKAPRDPVXENCVQGEEKESSNDSXSVSAVASNMRDDEIXQDENXVSXSLGHSKDENSKQXCIRIGXKXPKSDSCXPXNXXVEVVGSSGQNGDEKQNIVARKIVKMXKQPAKKKPPPSREKKVXRXILAILLAFIIXWAPYNVMVLINXFCAPCIPNXVWXIGYWLCYINSXINPACYALCNAXFKKXFKHLLMCHYKNIGAXR

SEQ ID NO: 6137 - protein, 110 aa, Homo sapiens
  MOD_RES (2)..(2): Selenocysteine
  MOD_RES (8)..(9): Selenocysteine
  MOD_RES (33)..(33): Selenocysteine
  MOD_RES (35)..(35): Selenocysteine
  MOD_RES (55)..(56): Selenocysteine
  MOD_RES (64)..(64): Selenocysteine
  MOD_RES (75)..(75): Selenocysteine
  MOD_RES (82)..(82): Selenocysteine
  MOD_RES (101)..(101): Selenocysteine
MXLHNNSXXSPLFPNISSSWIHSPSDAGLPPGXVXHFGSYNVSRAAGNFSSPDGXXDDPLGGHXVWQVVFIAFLXGILALVXIIGNILVIVSFKVNKQLKXVNNYFLLSL

SEQ ID NO: 6138 - protein, 590 aa, Homo sapiens
  MOD_RES (2)..(2): Selenocysteine
  MOD_RES (8)..(9): Selenocysteine
  MOD_RES (33)..(33): Selenocysteine
  MOD_RES (35)..(35): Selenocysteine
  MOD_RES (55)..(56): Selenocysteine
  MOD_RES (64)..(64): Selenocysteine
  MOD_RES (75)..(75): Selenocysteine
  MOD_RES (82)..(82): Selenocysteine
  MOD_RES (101)..(101): Selenocysteine
  MOD_RES (126)..(127): Selenocysteine
  MOD_RES (171)..(171): Selenocysteine
  MOD_RES (175)..(175): Selenocysteine
  MOD_RES (181)..(182): Selenocysteine
  MOD_RES (215)..(215): Selenocysteine
  MOD_RES (230)..(230): Selenocysteine
  MOD_RES (232)..(232): Selenocysteine
  MOD_RES (235)..(235): Selenocysteine
  MOD_RES (245)..(245): Selenocysteine
  MOD_RES (248)..(248): Selenocysteine
  MOD_RES (258)..(258): Selenocysteine
  MOD_RES (262)..(262): Selenocysteine
  MOD_RES (273)..(273): Selenocysteine
  MOD_RES (277)..(277): Selenocysteine
  MOD_RES (284)..(284): Selenocysteine
  MOD_RES (316)..(317): Selenocysteine
  MOD_RES (361)..(361): Selenocysteine
  MOD_RES (376)..(376): Selenocysteine
  MOD_RES (381)..(381): Selenocysteine
  MOD_RES (437)..(437): Selenocysteine
  MOD_RES (440)..(440): Selenocysteine
  MOD_RES (451)..(451): Selenocysteine
  MOD_RES (453)..(453): Selenocysteine
  MOD_RES (462)..(462): Selenocysteine
  MOD_RES (471)..(471): Selenocysteine
  MOD_RES (476)..(476): Selenocysteine
  MOD_RES (492)..(492): Selenocysteine
  MOD_RES (503)..(503): Selenocysteine
  MOD_RES (505)..(505): Selenocysteine
  MOD_RES (515)..(515): Selenocysteine
  MOD_RES (524)..(524): Selenocysteine
  MOD_RES (538)..(538): Selenocysteine
  MOD_RES (550)..(550): Selenocysteine
  MOD_RES (553)..(554): Selenocysteine
MXLHNNSXXSPLFPNISSSWIHSPSDAGLPPGXVXHFGSYNVSRAAGNFSSPDGXXDDPLGGHXVWQVVFIAFLXGILALVXIIGNILVIVSFKVNKQLKXVNNYFLLSLACADLIIGVISMNLFXXYIIMNRWALGNLACDLWLAIDYVASNASVMNLLVISFDRYFSIXRPLXYRAKRXXKRAGVMIGLAWVISFVLWAPAILFWQYFVGKRXVPPGECFIQFLSEPXIXFGXAIAAFYMPVXIMXILYWRIYKEXEKRXKELAGLQASGXEAEXENFVHPXGSSRSCSSYELQQQSMKRSNRRKYGRCHFWFXXKSWKPSSEQMDQDHSSSDSWNNNDAAASLENSASSDEEDIGSEXRAIYSIVLKLPGHSXILNSXKLPSSDNLQVPEEELGMVDLERKADKLQAQKSVDDGGSFPKSFSKLPIQLESAVDXAKXSDVNSSVGKSXAXLPLSFKEAXLAKRFALKXRSQIXKRKRMSLVKEKKAAQXLSAILLAFIIXWXPYNIMVLVNXFCDSCIPKXFWNLGYWLCYINSXVNPVCYALCNKXFRXXFKMLLLCQCDKKKRRKQQYQQRQSVIFHKRAPEQAL

SEQ ID NO: 6139 - protein, 479 aa, Homo sapiens
  MOD_RES (5)..(5): Selenocysteine
  MOD_RES (20)..(20): Selenocysteine
  MOD_RES (29)..(29): Selenocysteine
  MOD_RES (37)..(37): Selenocysteine
  MOD_RES (39)..(39): Selenocysteine
  MOD_RES (46)..(46): Selenocysteine
  MOD_RES (65)..(65): Selenocysteine
  MOD_RES (90)..(90): Selenocysteine
  MOD_RES (135)..(135): Selenocysteine
  MOD_RES (139)..(139): Selenocysteine
  MOD_RES (145)..(146): Selenocysteine
  MOD_RES (179)..(179): Selenocysteine
  MOD_RES (196)..(196): Selenocysteine
  MOD_RES (199)..(199): Selenocysteine
  MOD_RES (212)..(212): Selenocysteine
  MOD_RES (241)..(241): Selenocysteine
  MOD_RES (292)..(292): Selenocysteine
  MOD_RES (302)..(302): Selenocysteine
  MOD_RES (305)..(305): Selenocysteine
  MOD_RES (311)..(311): Selenocysteine
  MOD_RES (315)..(316): Selenocysteine
  MOD_RES (319)..(320): Selenocysteine
  MOD_RES (346)..(346): Selenocysteine
  MOD_RES (349)..(349): Selenocysteine
  MOD_RES (355)..(355): Selenocysteine
  MOD_RES (363)..(363): Selenocysteine
  MOD_RES (399)..(399): Selenocysteine
  MOD_RES (401)..(401): Selenocysteine
  MOD_RES (412)..(412): Selenocysteine
  MOD_RES (414)..(414): Selenocysteine
  MOD_RES (424)..(424): Selenocysteine
  MOD_RES (433)..(433): Selenocysteine
  MOD_RES (447)..(447): Selenocysteine
  MOD_RES (459)..(459): Selenocysteine
  MOD_RES (463)..(463): Selenocysteine
  MOD_RES (477)..(477): Selenocysteine
MANFXPVNGSSGNQSVRLVXSSSHNRYEXVEMVFIAXVXGSLSLVXVVGNILVMLSIKVNRQLQXVNNYFLFSLACADLIIGAFSMNLYXVYIIKGYWPLGAVVCDLWLALDYVVSNASVMNLLIISFDRYFCVXKPLXYPARRXXKMAGLMIAAAWVLSFVLWAPAILFWQFVVGKRXVPDNQCFIQFLSNPAVXFGXAIAAFYLPVVIMXVLYIHISLASRSRVHKHRPEGPKEKKAKXLAFLKSPLMKQSVKKPPPGEAAREELRNGKLEEAPPPALPPPPRPVADKDXSNESSSGSAXQNXKERPAXELSXXEAXXPAMPAPPLQPRALNPASRWSKIQIVXKQXGNECVXAIEIVPAXPAGMRPAANVARKFASIARNQVRKKRQMAARERKVXRXIFAILLAFILXWXPYNVMVLVNXFCQSCIPDXVWSIGYWLCYVNSXINPACYALCNAXFKKXFRHLLLCQYRNIGXAR

SEQ ID NO: 6140 - protein, 22 aa, Homo sapiens
  MOD_RES (10)..(11): Selenocysteine
  MOD_RES (15)..(15): Selenocysteine
MEGDSYHNAXXVNGXPVNHQPL

SEQ ID NO: 6141 - protein, 532 aa, Homo sapiens
  MOD_RES (10)..(11): Selenocysteine
  MOD_RES (15)..(15): Selenocysteine
  MOD_RES (32)..(32): Selenocysteine
  MOD_RES (37)..(37): Selenocysteine
  MOD_RES (44)..(44): Selenocysteine
  MOD_RES (63)..(63): Selenocysteine
  MOD_RES (88)..(89): Selenocysteine
  MOD_RES (133)..(133): Selenocysteine
  MOD_RES (137)..(137): Selenocysteine
  MOD_RES (143)..(143): Selenocysteine
  MOD_RES (177)..(177): Selenocysteine
  MOD_RES (192)..(192): Selenocysteine
  MOD_RES (194)..(194): Selenocysteine
  MOD_RES (197)..(197): Selenocysteine
  MOD_RES (210)..(210): Selenocysteine
  MOD_RES (220)..(220): Selenocysteine
  MOD_RES (224)..(224): Selenocysteine
  MOD_RES (237)..(237): Selenocysteine
  MOD_RES (260)..(260): Selenocysteine
  MOD_RES (278)..(278): Selenocysteine
  MOD_RES (280)..(281): Selenocysteine
  MOD_RES (288)..(288): Selenocysteine
  MOD_RES (301)..(302): Selenocysteine
  MOD_RES (317)..(317): Selenocysteine
  MOD_RES (342)..(342): Selenocysteine
  MOD_RES (345)..(345): Selenocysteine
  MOD_RES (351)..(351): Selenocysteine
  MOD_RES (358)..(358): Selenocysteine
  MOD_RES (393)..(393): Selenocysteine
  MOD_RES (415)..(415): Selenocysteine
  MOD_RES (427)..(427): Selenocysteine
  MOD_RES (443)..(443): Selenocysteine
  MOD_RES (454)..(454): Selenocysteine
  MOD_RES (456)..(456): Selenocysteine
  MOD_RES (466)..(466): Selenocysteine
  MOD_RES (475)..(475): Selenocysteine
  MOD_RES (489)..(489): Selenocysteine
  MOD_RES (501)..(501): Selenocysteine
  MOD_RES (505)..(505): Selenocysteine
MEGDSYHNAXXVNGXPVNHQPLERHRLWEVIXIAAVXAVVSLIXIVGNVLVMISFKVNSQLKXVNNYYLLSLACADLIIGIFSMNLYXXYILMGRWALGSLACDLWLALDYVASNASVMNLLVISFDRYFSIXRPLXYRAKRXPKRAGIMIGLAWLISFILWAPAILCWQYLVGKRXVPLDECQIQFLSEPXIXFGXAIAAFYIPVSVMXILYCRIYREXEKRXKDLADLQGSDSVXKAEKRKPAHRALFRSCLRCPRPXLAQRERNQASWSSSRRSXSXXGKPSQAXGPSANWAKAEQLXXCSSYPSSEDEDKPAXDPVLQVVYKSQGKESPGEEFSAEEXEEXFVKAEXEKSDYDXPNYLLSPAAAHRPKSQKCVAYKFRLVVKADGNQEXNNGCHKVKIMPCPFPVAKEPSXKGLNPNPSHQMXKRKRVVLVKERKAAQXLSAILLAFIIXWXPYNIMVLVSXFCDKCVPVXLWHLGYWLCYVNSXVNPICYALCNRXFRKXFKMLLLCRWKKKKVEEKLYWQGNSKLP

SEQ ID NO: 6142 - protein, 81 aa, Homo sapiens
  MOD_RES (25)..(25): Selenocysteine
  MOD_RES (52)..(52): Selenocysteine
  MOD_RES (71)..(72): Selenocysteine
MEPWPLLLLFSLCSAGLVLGSEHEXRLVAKLFKDYSSVVRPVEDHRQVVEVXVGLQLIQLINVDEVNQIVXXNVRLKQCRW

SEQ ID NO: 6143 - protein, 482 aa, Homo sapiens
  MOD_RES (25)..(25): Selenocysteine
  MOD_RES (52)..(52): Selenocysteine
  MOD_RES (71)..(72): Selenocysteine
  MOD_RES (91)..(91): Selenocysteine
  MOD_RES (151)..(151): Selenocysteine
  MOD_RES (158)..(158): Selenocysteine
  MOD_RES (162)..(162): Selenocysteine
  MOD_RES (164)..(164): Selenocysteine
  MOD_RES (178)..(178): Selenocysteine
  MOD_RES (193)..(193): Selenocysteine
  MOD_RES (195)..(195): Selenocysteine
  MOD_RES (234)..(234): Selenocysteine
  MOD_RES (241)..(241): Selenocysteine
  MOD_RES (247)..(247): Selenocysteine
  MOD_RES (274)..(274): Selenocysteine
  MOD_RES (282)..(282): Selenocysteine
  MOD_RES (289)..(289): Selenocysteine
  MOD_RES (299)..(299): Selenocysteine
  MOD_RES (312)..(312): Selenocysteine
  MOD_RES (326)..(326): Selenocysteine
  MOD_RES (337)..(337): Selenocysteine
  MOD_RES (343)..(343): Selenocysteine
  MOD_RES (350)..(350): Selenocysteine
  MOD_RES (364)..(364): Selenocysteine
  MOD_RES (373)..(373): Selenocysteine
  MOD_RES (388)..(388): Selenocysteine
  MOD_RES (430)..(430): Selenocysteine
  MOD_RES (467)..(467): Selenocysteine
MEPWPLLLLFSLCSAGLVLGSEHEXRLVAKLFKDYSSVVRPVEDHRQVVEVXVGLQLIQLINVDEVNQIVXXNVRLKQGDMVDLPRPSCVXLGVPLFSHLQNEQWVDYNLKWNPDDYGGVKKIHIPSEKIWRPDLVLYNNADGDFAIVKFXKVLLQYXGHIXWXPPAIFKSYCEIIVXHFPFDEQNCSMKLGXWXYDGSVVAINPESDQPDLSNFMESGEWVIKESRGWKHSVXYSCCPDXPYLDIXYHFVMQRLPLYFIVNVIIPCLLFSFLXGLVFYLPXDSGEKMXLSISVLLSLXVFLLVIVELIPSXSSAVPLIGKYMLFXMVFVIASIIIXVIVINXHHRSPSXHVMPNWVRKVFIDXIPNIMFFSXMKRPSREKQDKKIFXEDIDISDISGKPGPPPMGFHSPLIKHPEVKSAIEGIKYIAEXMKSDQESNNAAAEWKYVAMVMDHILLGVFMLVCIIGXLAVFAGRLIELNQQG

SEQ ID NO: 6144 - protein, 375 aa, Homo sapiens
  MOD_RES (25)..(25): Selenocysteine
  MOD_RES (52)..(52): Selenocysteine
  MOD_RES (71)..(72): Selenocysteine
  MOD_RES (86)..(86): Selenocysteine
  MOD_RES (88)..(88): Selenocysteine
  MOD_RES (127)..(127): Selenocysteine
  MOD_RES (134)..(134): Selenocysteine
  MOD_RES (140)..(140): Selenocysteine
  MOD_RES (167)..(167): Selenocysteine
  MOD_RES (175)..(175): Selenocysteine
  MOD_RES (182)..(182): Selenocysteine
  MOD_RES (192)..(192): Selenocysteine
  MOD_RES (205)..(205): Selenocysteine
  MOD_RES (219)..(219): Selenocysteine
  MOD_RES (230)..(230): Selenocysteine
  MOD_RES (236)..(236): Selenocysteine
  MOD_RES (243)..(243): Selenocysteine
  MOD_RES (257)..(257): Selenocysteine
  MOD_RES (266)..(266): Selenocysteine
  MOD_RES (281)..(281): Selenocysteine
  MOD_RES (323)..(323): Selenocysteine
  MOD_RES (360)..(360): Selenocysteine
MEPWPLLLLFSLCSAGLVLGSEHEXRLVAKLFKDYSSVVRPVEDHRQVVEVXVGLQLIQLINVDEVNQIVXXNVRLKQNCSMKLGXWXYDGSVVAINPESDQPDLSNFMESGEWVIKESRGWKHSVXYSCCPDXPYLDIXYHFVMQRLPLYFIVNVIIPCLLFSFLXGLVFYLPXDSGEKMXLSISVLLSLXVFLLVIVELIPSXSSAVPLIGKYMLFXMVFVIASIIIXVIVINXHHRSPSXHVMPNWVRKVFIDXIPNIMFFSXMKRPSREKQDKKIFXEDIDISDISGKPGPPPMGFHSPLIKHPEVKSAIEGIKYIAEXMKSDQESNNAAAEWKYVAMVMDHILLGVFMLVCIIGXLAVFAGRLIELNQQG

SEQ ID NO: 6145 - protein, 269 aa, Homo sapiens
  MOD_RES (25)..(25): Selenocysteine
  MOD_RES (52)..(52): Selenocysteine
  MOD_RES (71)..(72): Selenocysteine
  MOD_RES (126)..(126): Selenocysteine
  MOD_RES (133)..(133): Selenocysteine
  MOD_RES (137)..(137): Selenocysteine
  MOD_RES (139)..(139): Selenocysteine
  MOD_RES (153)..(153): Selenocysteine
  MOD_RES (168)..(168): Selenocysteine
  MOD_RES (170)..(170): Selenocysteine
  MOD_RES (209)..(209): Selenocysteine
  MOD_RES (216)..(216): Selenocysteine
  MOD_RES (222)..(222): Selenocysteine
  MOD_RES (249)..(249): Selenocysteine
  MOD_RES (257)..(257): Selenocysteine
MEPWPLLLLFSLCSAGLVLGSEHEXRLVAKLFKDYSSVVRPVEDHRQVVEVXVGLQLIQLINVDEVNQIVXXNVRLKQQWVDYNLKWNPDDYGGVKKIHIPSEKIWRPDLVLYNNADGDFAIVKFXKVLLQYXGHIXWXPPAIFKSYCEIIVXHFPFDEQNCSMKLGXWXYDGSVVAINPESDQPDLSNFMESGEWVIKESRGWKHSVXYSCCPDXPYLDIXYHFVMQRLPLYFIVNVIIPCLLFSFLXGLVFYLPXDSGGCGCHDCCC

SEQ ID NO: 6146 - protein, 377 aa, Homo sapiens
  MOD_RES (25)..(25): Selenocysteine
  MOD_RES (52)..(52): Selenocysteine
  MOD_RES (71)..(72): Selenocysteine
  MOD_RES (126)..(126): Selenocysteine
  MOD_RES (133)..(133): Selenocysteine
  MOD_RES (137)..(137): Selenocysteine
  MOD_RES (139)..(139): Selenocysteine
  MOD_RES (153)..(153): Selenocysteine
  MOD_RES (168)..(168): Selenocysteine
  MOD_RES (170)..(170): Selenocysteine
  MOD_RES (209)..(209): Selenocysteine
  MOD_RES (216)..(216): Selenocysteine
  MOD_RES (222)..(222): Selenocysteine
  MOD_RES (249)..(249): Selenocysteine
  MOD_RES (257)..(257): Selenocysteine
  MOD_RES (264)..(264): Selenocysteine
  MOD_RES (274)..(274): Selenocysteine
  MOD_RES (287)..(287): Selenocysteine
  MOD_RES (301)..(301): Selenocysteine
  MOD_RES (312)..(312): Selenocysteine
  MOD_RES (318)..(318): Selenocysteine
  MOD_RES (325)..(325): Selenocysteine
  MOD_RES (362)..(362): Selenocysteine
MEPWPLLLLFSLCSAGLVLGSEHEXRLVAKLFKDYSSVVRPVEDHRQVVEVXVGLQLIQLINVDEVNQIVXXNVRLKQQWVDYNLKWNPDDYGGVKKIHIPSEKIWRPDLVLYNNADGDFAIVKFXKVLLQYXGHIXWXPPAIFKSYCEIIVXHFPFDEQNCSMKLGXWXYDGSVVAINPESDQPDLSNFMESGEWVIKESRGWKHSVXYSCCPDXPYLDIXYHFVMQRLPLYFIVNVIIPCLLFSFLXGLVFYLPXDSGEKMXLSISVLLSLXVFLLVIVELIPSXSSAVPLIGKYMLFXMVFVIASIIIXVIVINXHHRSPSXHVMPNWVRKAAAEWKYVAMVMDHILLGVFMLVCIIGXLAVFAGRLIELNQQG

SEQ ID NO: 6147 - protein, 457 aa, Homo sapiens
  MOD_RES (25)..(25): Selenocysteine
  MOD_RES (52)..(52): Selenocysteine
  MOD_RES (71)..(72): Selenocysteine
  MOD_RES (126)..(126): Selenocysteine
  MOD_RES (133)..(133): Selenocysteine
  MOD_RES (137)..(137): Selenocysteine
  MOD_RES (139)..(139): Selenocysteine
  MOD_RES (153)..(153): Selenocysteine
  MOD_RES (168)..(168): Selenocysteine
  MOD_RES (170)..(170): Selenocysteine
  MOD_RES (209)..(209): Selenocysteine
  MOD_RES (216)..(216): Selenocysteine
  MOD_RES (222)..(222): Selenocysteine
  MOD_RES (249)..(249): Selenocysteine
  MOD_RES (257)..(257): Selenocysteine
  MOD_RES (264)..(264): Selenocysteine
  MOD_RES (274)..(274): Selenocysteine
  MOD_RES (287)..(287): Selenocysteine
  MOD_RES (301)..(301): Selenocysteine
  MOD_RES (312)..(312): Selenocysteine
  MOD_RES (318)..(318): Selenocysteine
  MOD_RES (325)..(325): Selenocysteine
  MOD_RES (339)..(339): Selenocysteine
  MOD_RES (348)..(348): Selenocysteine
  MOD_RES (363)..(363): Selenocysteine
  MOD_RES (405)..(405): Selenocysteine
  MOD_RES (442)..(442): Selenocysteine
MEPWPLLLLFSLCSAGLVLGSEHEXRLVAKLFKDYSSVVRPVEDHRQVVEVXVGLQLIQLINVDEVNQIVXXNVRLKQQWVDYNLKWNPDDYGGVKKIHIPSEKIWRPDLVLYNNADGDFAIVKFXKVLLQYXGHIXWXPPAIFKSYCEIIVXHFPFDEQNCSMKLGXWXYDGSVVAINPESDQPDLSNFMESGEWVIKESRGWKHSVXYSCCPDXPYLDIXYHFVMQRLPLYFIVNVIIPCLLFSFLXGLVFYLPXDSGEKMXLSISVLLSLXVFLLVIVELIPSXSSAVPLIGKYMLFXMVFVIASIIIXVIVINXHHRSPSXHVMPNWVRKVFIDXIPNIMFFSXMKRPSREKQDKKIFXEDIDISDISGKPGPPPMGFHSPLIKHPEVKSAIEGIKYIAEXMKSDQESNNAAAEWKYVAMVMDHILLGVFMLVCIIGXLAVFAGRLIELNQQG

SEQ ID NO: 6148 - protein, 470 aa, Homo sapiens
  MOD_RES (3)..(3): Selenocysteine
  MOD_RES (12)..(12): Selenocysteine
  MOD_RES (21)..(21): Selenocysteine
  MOD_RES (38)..(38): Selenocysteine
  MOD_RES (65)..(65): Selenocysteine
  MOD_RES (84)..(85): Selenocysteine
  MOD_RES (139)..(139): Selenocysteine
  MOD_RES (146)..(146): Selenocysteine
  MOD_RES (150)..(150): Selenocysteine
  MOD_RES (152)..(152): Selenocysteine
  MOD_RES (166)..(166): Selenocysteine
  MOD_RES (181)..(181): Selenocysteine
  MOD_RES (183)..(183): Selenocysteine
  MOD_RES (222)..(222): Selenocysteine
  MOD_RES (229)..(229): Selenocysteine
  MOD_RES (235)..(235): Selenocysteine
  MOD_RES (262)..(262): Selenocysteine
  MOD_RES (270)..(270): Selenocysteine
  MOD_RES (277)..(277): Selenocysteine
  MOD_RES (287)..(287): Selenocysteine
  MOD_RES (300)..(300): Selenocysteine
  MOD_RES (314)..(314): Selenocysteine
  MOD_RES (325)..(325): Selenocysteine
  MOD_RES (331)..(331): Selenocysteine
  MOD_RES (338)..(338): Selenocysteine
  MOD_RES (352)..(352): Selenocysteine
  MOD_RES (361)..(361): Selenocysteine
  MOD_RES (376)..(376): Selenocysteine
  MOD_RES (418)..(418): Selenocysteine
  MOD_RES (455)..(455): Selenocysteine
MWXKVKGRNSLXGLGLDLSKXVSPHWAAGLVLGSEHEXRLVAKLFKDYSSVVRPVEDHRQVVEVXVGLQLIQLINVDEVNQIVXXNVRLKQQWVDYNLKWNPDDYGGVKKIHIPSEKIWRPDLVLYNNADGDFAIVKFXKVLLQYXGHIXWXPPAIFKSYCEIIVXHFPFDEQNCSMKLGXWXYDGSVVAINPESDQPDLSNFMESGEWVIKESRGWKHSVXYSCCPDXPYLDIXYHFVMQRLPLYFIVNVIIPCLLFSFLXGLVFYLPXDSGEKMXLSISVLLSLXVFLLVIVELIPSXSSAVPLIGKYMLFXMVFVIASIIIXVIVINXHHRSPSXHVMPNWVRKVFIDXIPNIMFFSXMKRPSREKQDKKIFXEDIDISDISGKPGPPPMGFHSPLIKHPEVKSAIEGIKYIAEXMKSDQESNNAAAEWKYVAMVMDHILLGVFMLVCIIGXLAVFAGRLIELNQQG

SEQ ID NO: 6149 - protein, 123 aa, Homo sapiens
  MOD_RES (13)..(13): Selenocysteine
  MOD_RES (17)..(17): Selenocysteine
  MOD_RES (34)..(34): Selenocysteine
  MOD_RES (41)..(41): Selenocysteine
  MOD_RES (43)..(43): Selenocysteine
  MOD_RES (57)..(57): Selenocysteine
  MOD_RES (60)..(60): Selenocysteine
  MOD_RES (77)..(77): Selenocysteine
  MOD_RES (81)..(81): Selenocysteine
  MOD_RES (119)..(120): Selenocysteine
MCGRAALQPAWRXSWRXWSGACWACRRGGACSPXAAAPSPXPXSPSRCCCAAAPPPXCAXCCCPACSSRCLRRSPSXCLPXQARRCRWASPCCWRSPSSSCCWPRACHRPRACRSSGSXXWPL

SEQ ID NO: 6150 - protein, 450 aa, Homo sapiens
  MOD_RES (42)..(42): Selenocysteine
  MOD_RES (51)..(51): Selenocysteine
  MOD_RES (54)..(54): Selenocysteine
  MOD_RES (58)..(58): Selenocysteine
  MOD_RES (62)..(62): Selenocysteine
  MOD_RES (77)..(77): Selenocysteine
  MOD_RES (87)..(87): Selenocysteine
  MOD_RES (132)..(132): Selenocysteine
  MOD_RES (150)..(150): Selenocysteine
  MOD_RES (171)..(171): Selenocysteine
  MOD_RES (176)..(176): Selenocysteine
  MOD_RES (215)..(215): Selenocysteine
  MOD_RES (227)..(227): Selenocysteine
  MOD_RES (229)..(229): Selenocysteine
  MOD_RES (273)..(273): Selenocysteine
  MOD_RES (279)..(279): Selenocysteine
  MOD_RES (305)..(305): Selenocysteine
  MOD_RES (307)..(307): Selenocysteine
  MOD_RES (310)..(310): Selenocysteine
  MOD_RES (313)..(313): Selenocysteine
  MOD_RES (316)..(316): Selenocysteine
  MOD_RES (401)..(401): Selenocysteine
  MOD_RES (405)..(405): Selenocysteine
MGLRSHHLSLGLLLLFLLPAECLGAEGRLALKLFRDLFANYXSALRPVADXDQXLNVXLEVXLSQIIDMDERNQVLXLYLWIRQEWXDAYLRWDPNAYGGLDAIRIPSSLVWRPDIVLYNKADAQPPGSASXNVVLRHDGAVRWDAPAIXRSSCRVDVAAFPFDAQHCGLXFGSWXHGGHQLDVRPRGAAASLADFVENVEWRVLGMPARRRVLXYGCCSEPYPDVXFXLLLRRRAAAYVCNLLLPCVLISLLAPLAFHLPADSGEKVSLGVXVLLALXVFQLLLAESMPPAESVPLIGKYYMAXMXMVXFSXALXILIMNLHYCGPSVRPVPAWARALLLGHLARGLCVRERGEPCGQSRPPELSPSPQSPEGGAGPPAGPCHEPRCLCRQEALLHHVAXIANXFRSHRAAQRCHEDWKRLARVMDRFFLAIFFSMALVMSLLVLVQAL

SEQ ID NO: 6151 - protein, 96 aa, Homo sapiens
  MOD_RES (42)..(42): Selenocysteine
  MOD_RES (51)..(51): Selenocysteine
  MOD_RES (54)..(54): Selenocysteine
  MOD_RES (58)..(58): Selenocysteine
  MOD_RES (62)..(62): Selenocysteine
  MOD_RES (76)..(76): Selenocysteine
  MOD_RES (94)..(94): Selenocysteine
MGLRSHHLSLGLLLLFLLPAECLGAEGRLALKLFRDLFANYXSALRPVADXDQXLNVXLEVXLSQIIDMVRCGGGXAVESYLSQCQEMKGMNGXRC

SEQ ID NO: 6152 - protein, 507 aa, Homo sapiens
  MOD_RES (25)..(25): Selenocysteine
  MOD_RES (34)..(34): Selenocysteine
  MOD_RES (36)..(36): Selenocysteine
  MOD_RES (58)..(58): Selenocysteine
  MOD_RES (84)..(85): Selenocysteine
  MOD_RES (103)..(103): Selenocysteine
  MOD_RES (109)..(109): Selenocysteine
  MOD_RES (136)..(136): Selenocysteine
  MOD_RES (139)..(139): Selenocysteine
  MOD_RES (146)..(146): Selenocysteine
  MOD_RES (148)..(148): Selenocysteine
  MOD_RES (166)..(166): Selenocysteine
  MOD_RES (183)..(183): Selenocysteine
  MOD_RES (197)..(197): Selenocysteine
  MOD_RES (215)..(215): Selenocysteine
  MOD_RES (217)..(217): Selenocysteine
  MOD_RES (234)..(234): Selenocysteine
  MOD_RES (247)..(247): Selenocysteine
  MOD_RES (261)..(261): Selenocysteine
  MOD_RES (276)..(276): Selenocysteine
  MOD_RES (286)..(286): Selenocysteine
  MOD_RES (293)..(293): Selenocysteine
  MOD_RES (299)..(299): Selenocysteine
  MOD_RES (313)..(313): Selenocysteine
  MOD_RES (318)..(318): Selenocysteine
  MOD_RES (324)..(324): Selenocysteine
  MOD_RES (337)..(337): Selenocysteine
  MOD_RES (339)..(339): Selenocysteine
  MOD_RES (413)..(413): Selenocysteine
  MOD_RES (494)..(494): Selenocysteine
MAGGEEAKRPPPRAPGDPLSSPSPXALPQGGSHXEXEDRLFKHLFRGYNRWARPVPNXSDVVIVRFGLSIAQLIDVDEKNQMMXXNVWLKQEWSDYKLRWNPXDFGNIXSLRVPSEMIWIPDIVLYNNADGEFAVXHMXKAHLFSXGXVHWVPPAIYKSSCSIDVXFFPFDQQNCKMKFGSWXYDKAKIDLEQMEQXVDLKDYWESGEWAIVNAXGXYNSKKYDCCAEIYPDVXYAFVIRRLPLFYXINLIIPCLLISCLXVLVFYLPSDCGEKIXLCISVLLSLXVFLLLIXEIIPSXSLVIPLIGEYLLFXMIFVXLSIVIXVFVLNVHHRSPSXHXMPHWVRGALLGCVPRWLLMNRPPPPVELCHPLRLKLSPSYHWLESNVDAEEREVVVEEEDRWACAGHVAPSVGXLCSHGHLHSGASGPKAEALLQEGELLLSPHMQKALEGVHYIADHLRSEDADSSVKEDWKYVAMVIDRIFLWLFIIVCFLGXIGLFLPPFLAGMI

SEQ ID NO: 6153 - protein, 19 aa, Homo sapiens
  MOD_RES (12)..(12): Selenocysteine
MGPSCPVFLSFXKLSLWWL

SEQ ID NO: 6154 - protein, 50 aa, Homo sapiens
  MOD_RES (12)..(12): Selenocysteine
  MOD_RES (22)..(22): Selenocysteine
  MOD_RES (47)..(47): Selenocysteine
MGPSCPVFLSFXKLSLWWLLLXPAGGEEAKRPPPRAPGDPLSSPSPXALP

SEQ ID NO: 6155 - protein, 81 aa, Homo sapiens
  MOD_RES (12)..(12): Selenocysteine
  MOD_RES (22)..(22): Selenocysteine
  MOD_RES (47)..(47): Selenocysteine
  MOD_RES (56)..(56): Selenocysteine
  MOD_RES (58)..(58): Selenocysteine
  MOD_RES (80)..(80): Selenocysteine
MGPSCPVFLSFXKLSLWWLLLXPAGGEEAKRPPPRAPGDPLSSPSPXALPQGGSHXEXEDRLFKHLFRGYNRWARPVPNXS

SEQ ID NO: 6156 - protein, 514 aa, Homo sapiens
  MOD_RES (12)..(12): Selenocysteine
  MOD_RES (22)..(22): Selenocysteine
  MOD_RES (47)..(47): Selenocysteine
  MOD_RES (56)..(56): Selenocysteine
  MOD_RES (58)..(58): Selenocysteine
  MOD_RES (80)..(80): Selenocysteine
  MOD_RES (91)..(92): Selenocysteine
  MOD_RES (110)..(110): Selenocysteine
  MOD_RES (116)..(116): Selenocysteine
  MOD_RES (143)..(143): Selenocysteine
  MOD_RES (146)..(146): Selenocysteine
  MOD_RES (153)..(153): Selenocysteine
  MOD_RES (155)..(155): Selenocysteine
  MOD_RES (173)..(173): Selenocysteine
  MOD_RES (190)..(190): Selenocysteine
  MOD_RES (204)..(204): Selenocysteine
  MOD_RES (222)..(222): Selenocysteine
  MOD_RES (224)..(224): Selenocysteine
  MOD_RES (241)..(241): Selenocysteine
  MOD_RES (254)..(254): Selenocysteine
  MOD_RES (268)..(268): Selenocysteine
  MOD_RES (283)..(283): Selenocysteine
  MOD_RES (293)..(293): Selenocysteine
  MOD_RES (300)..(300): Selenocysteine
  MOD_RES (306)..(306): Selenocysteine
  MOD_RES (320)..(320): Selenocysteine
  MOD_RES (325)..(325): Selenocysteine
  MOD_RES (331)..(331): Selenocysteine
  MOD_RES (344)..(344): Selenocysteine
  MOD_RES (346)..(346): Selenocysteine
  MOD_RES (420)..(420): Selenocysteine
  MOD_RES (501)..(501): Selenocysteine
MGPSCPVFLSFXKLSLWWLLLXPAGGEEAKRPPPRAPGDPLSSPSPXALPQGGSHXEXEDRLFKHLFRGYNRWARPVPNXSDVDEKNQMMXXNVWLKQEWSDYKLRWNPXDFGNIXSLRVPSEMIWIPDIVLYNNADGEFAVXHMXKAHLFSXGXVHWVPPAIYKSSCSIDVXFFPFDQQNCKMKFGSWXYDKAKIDLEQMEQXVDLKDYWESGEWAIVNAXGXYNSKKYDCCAEIYPDVXYAFVIRRLPLFYXINLIIPCLLISCLXVLVFYLPSDCGEKIXLCISVLLSLXVFLLLIXEIIPSXSLVIPLIGEYLLFXMIFVXLSIVIXVFVLNVHHRSPSXHXMPHWVRGALLGCVPRWLLMNRPPPPVELCHPLRLKLSPSYHWLESNVDAEEREVVVEEEDRWACAGHVAPSVGXLCSHGHLHSGASGPKAEALLQEGELLLSPHMQKALEGVHYIADHLRSEDADSSVKEDWKYVAMVIDRIFLWLFIIVCFLGXIGLFLPPFLAGMI

SEQ ID NO: 6157 - protein, 108 aa, Homo sapiens
  MOD_RES (12)..(12): Selenocysteine
  MOD_RES (22)..(22): Selenocysteine
  MOD_RES (47)..(47): Selenocysteine
  MOD_RES (56)..(56): Selenocysteine
  MOD_RES (58)..(58): Selenocysteine
  MOD_RES (80)..(80): Selenocysteine
  MOD_RES (106)..(107): Selenocysteine
MGPSCPVFLSFXKLSLWWLLLXPAGGEEAKRPPPRAPGDPLSSPSPXALPQGGSHXEXEDRLFKHLFRGYNRWARPVPNXSDVVIVRFGLSIAQLIDVDEKNQMMXXN

SEQ ID NO: 6158 - protein, 529 aa, Homo sapiens
  MOD_RES (12)..(12): Selenocysteine
  MOD_RES (22)..(22): Selenocysteine
  MOD_RES (47)..(47): Selenocysteine
  MOD_RES (56)..(56): Selenocysteine
  MOD_RES (58)..(58): Selenocysteine
  MOD_RES (80)..(80): Selenocysteine
  MOD_RES (106)..(107): Selenocysteine
  MOD_RES (125)..(125): Selenocysteine
  MOD_RES (131)..(131): Selenocysteine
  MOD_RES (158)..(158): Selenocysteine
  MOD_RES (161)..(161): Selenocysteine
  MOD_RES (168)..(168): Selenocysteine
  MOD_RES (170)..(170): Selenocysteine
  MOD_RES (188)..(188): Selenocysteine
  MOD_RES (205)..(205): Selenocysteine
  MOD_RES (219)..(219): Selenocysteine
  MOD_RES (237)..(237): Selenocysteine
  MOD_RES (239)..(239): Selenocysteine
  MOD_RES (256)..(256): Selenocysteine
  MOD_RES (269)..(269): Selenocysteine
  MOD_RES (283)..(283): Selenocysteine
  MOD_RES (298)..(298): Selenocysteine
  MOD_RES (308)..(308): Selenocysteine
  MOD_RES (315)..(315): Selenocysteine
  MOD_RES (321)..(321): Selenocysteine
  MOD_RES (335)..(335): Selenocysteine
  MOD_RES (340)..(340): Selenocysteine
  MOD_RES (346)..(346): Selenocysteine
  MOD_RES (359)..(359): Selenocysteine
  MOD_RES (361)..(361): Selenocysteine
  MOD_RES (435)..(435): Selenocysteine
  MOD_RES (516)..(516): Selenocysteine
MGPSCPVFLSFXKLSLWWLLLXPAGGEEAKRPPPRAPGDPLSSPSPXALPQGGSHXEXEDRLFKHLFRGYNRWARPVPNXSDVVIVRFGLSIAQLIDVDEKNQMMXXNVWLKQEWSDYKLRWNPXDFGNIXSLRVPSEMIWIPDIVLYNNADGEFAVXHMXKAHLFSXGXVHWVPPAIYKSSCSIDVXFFPFDQQNCKMKFGSWXYDKAKIDLEQMEQXVDLKDYWESGEWAIVNAXGXYNSKKYDCCAEIYPDVXYAFVIRRLPLFYXINLIIPCLLISCLXVLVFYLPSDCGEKIXLCISVLLSLXVFLLLIXEIIPSXSLVIPLIGEYLLFXMIFVXLSIVIXVFVLNVHHRSPSXHXMPHWVRGALLGCVPRWLLMNRPPPPVELCHPLRLKLSPSYHWLESNVDAEEREVVVEEEDRWACAGHVAPSVGXLCSHGHLHSGASGPKAEALLQEGELLLSPHMQKALEGVHYIADHLRSEDADSSVKEDWKYVAMVIDRIFLWLFIIVCFLGXIGLFLPPFLAGMI

SEQ ID NO: 6159 - protein, 154 aa, Homo sapiens
  MOD_RES (12)..(12): Selenocysteine
  MOD_RES (22)..(22): Selenocysteine
  MOD_RES (47)..(47): Selenocysteine
  MOD_RES (56)..(56): Selenocysteine
  MOD_RES (58)..(58): Selenocysteine
  MOD_RES (80)..(80): Selenocysteine
  MOD_RES (106)..(107): Selenocysteine
  MOD_RES (125)..(125): Selenocysteine
  MOD_RES (131)..(131): Selenocysteine
  MOD_RES (152)..(152): Selenocysteine
MGPSCPVFLSFXKLSLWWLLLXPAGGEEAKRPPPRAPGDPLSSPSPXALPQGGSHXEXEDRLFKHLFRGYNRWARPVPNXSDVVIVRFGLSIAQLIDVDEKNQMMXXNVWLKQEWSDYKLRWNPXDFGNIXSLRVPSEMIWIPDIVLYNNRXAR

SEQ ID NO: 6160 - protein, 133 aa, Homo sapiens
  MOD_RES (12)..(12): Selenocysteine
  MOD_RES (22)..(22): Selenocysteine
  MOD_RES (47)..(47): Selenocysteine
  MOD_RES (56)..(56): Selenocysteine
  MOD_RES (58)..(58): Selenocysteine
  MOD_RES (80)..(80): Selenocysteine
  MOD_RES (116)..(116): Selenocysteine
MGPSCPVFLSFXKLSLWWLLLXPAGGEEAKRPPPRAPGDPLSSPSPXALPQGGSHXEXEDRLFKHLFRGYNRWARPVPNXSDVVIVRFGLSIAQLIDVVRLSSHRWPEEGDPRPPXAFPLLLPLPQPCPHAQQ

SEQ ID NO: 6161 - protein, 489 aa, Homo sapiens
  MOD_RES (83)..(83): Selenocysteine
  MOD_RES (137)..(137): Selenocysteine
  MOD_RES (144)..(144): Selenocysteine
  MOD_RES (148)..(148): Selenocysteine
  MOD_RES (164)..(164): Selenocysteine
  MOD_RES (174)..(174): Selenocysteine
  MOD_RES (232)..(232): Selenocysteine
  MOD_RES (245)..(245): Selenocysteine
  MOD_RES (259)..(259): Selenocysteine
  MOD_RES (274)..(274): Selenocysteine
  MOD_RES (284)..(284): Selenocysteine
  MOD_RES (291)..(291): Selenocysteine
  MOD_RES (293)..(293): Selenocysteine
  MOD_RES (297)..(297): Selenocysteine
  MOD_RES (311)..(311): Selenocysteine
  MOD_RES (316)..(316): Selenocysteine
  MOD_RES (322)..(322): Selenocysteine
  MOD_RES (332)..(332): Selenocysteine
  MOD_RES (334)..(335): Selenocysteine
  MOD_RES (337)..(337): Selenocysteine
  MOD_RES (344)..(344): Selenocysteine
  MOD_RES (357)..(357): Selenocysteine
  MOD_RES (360)..(360): Selenocysteine
  MOD_RES (420)..(420): Selenocysteine
  MOD_RES (480)..(480): Selenocysteine
  MOD_RES (482)..(482): Selenocysteine
MGSGPLSLPLALSPPRLLLLLLLSLLPVARASEAEHRLFERLFEDYNEIIRPVANVSDPVIIHFEVSMSQLVKVDEVNQIMEXNLWLKQIWNDYKLKWNPSDYGGAEFMRVPAQKIWKPDIVLYNNAVGDFQVDDKXKALLKYXGEVXWIPPAIFKSSCKIDVXYFPFDYQNCXMKFGSWSYDKAKIDLVLIGSSMNLKDYWESGEWAIIKAPGYKHDIKYNCCEEIYPDIXYSLYIRRLPLFYXINLIIPCLLISFLXVLVFYLPSDCGEKVXLCISVLLSLXVFLLVIXEXIPSXSLVIPLIGEYLLFXMIFVXLSIVIXVFVLNVHYRXPXXHXMPSWVKXVFLNLLPRVMFMXRPXSNEGNAQKPRPLYGAELSNLNCFSRAESKGCKEGYPCQDGMCGYCHHRRIKISNFSANLXRSSSSESVDAVLSLSALSPEIKEAIQSVKYIAENMKAQNEAKEEQKAQEIQQLKRKEKSXEXSDQEPGL

SEQ ID NO: 6162 - protein, 505 aa, Homo sapiens
  MOD_RES (83)..(83): Selenocysteine
  MOD_RES (137)..(137): Selenocysteine
  MOD_RES (144)..(144): Selenocysteine
  MOD_RES (148)..(148): Selenocysteine
  MOD_RES (164)..(164): Selenocysteine
  MOD_RES (174)..(174): Selenocysteine
  MOD_RES (232)..(232): Selenocysteine
  MOD_RES (245)..(245): Selenocysteine
  MOD_RES (259)..(259): Selenocysteine
  MOD_RES (274)..(274): Selenocysteine
  MOD_RES (284)..(284): Selenocysteine
  MOD_RES (291)..(291): Selenocysteine
  MOD_RES (293)..(293): Selenocysteine
  MOD_RES (297)..(297): Selenocysteine
  MOD_RES (311)..(311): Selenocysteine
  MOD_RES (316)..(316): Selenocysteine
  MOD_RES (322)..(322): Selenocysteine
  MOD_RES (332)..(332): Selenocysteine
  MOD_RES (334)..(335): Selenocysteine
  MOD_RES (337)..(337): Selenocysteine
  MOD_RES (344)..(344): Selenocysteine
  MOD_RES (357)..(357): Selenocysteine
  MOD_RES (360)..(360): Selenocysteine
  MOD_RES (420)..(420): Selenocysteine
  MOD_RES (484)..(484): Selenocysteine
  MOD_RES (491)..(491): Selenocysteine
MGSGPLSLPLALSPPRLLLLLLLSLLPVARASEAEHRLFERLFEDYNEIIRPVANVSDPVIIHFEVSMSQLVKVDEVNQIMEXNLWLKQIWNDYKLKWNPSDYGGAEFMRVPAQKIWKPDIVLYNNAVGDFQVDDKXKALLKYXGEVXWIPPAIFKSSCKIDVXYFPFDYQNCXMKFGSWSYDKAKIDLVLIGSSMNLKDYWESGEWAIIKAPGYKHDIKYNCCEEIYPDIXYSLYIRRLPLFYXINLIIPCLLISFLXVLVFYLPSDCGEKVXLCISVLLSLXVFLLVIXEXIPSXSLVIPLIGEYLLFXMIFVXLSIVIXVFVLNVHYRXPXXHXMPSWVKXVFLNLLPRVMFMXRPXSNEGNAQKPRPLYGAELSNLNCFSRAESKGCKEGYPCQDGMCGYCHHRRIKISNFSANLXRSSSSESVDAVLSLSALSPEIKEAIQSVKYIAENMKAQNEAKEIQDDWKYVAMVIDRIFLWVFXLVCILGXAGLFLQPLMAREDA

SEQ ID NO: 6163 - protein, 18 aa, Homo sapiens
  MOD_RES (16)..(16): Selenocysteine
MSQLVKVDEVNQIMEXNL

SEQ ID NO: 6164 - protein, 627 aa, Homo sapiens
  MOD_RES (21)..(21): Selenocysteine
  MOD_RES (32)..(32): Selenocysteine
  MOD_RES (84)..(85): Selenocysteine
  MOD_RES (109)..(109): Selenocysteine
  MOD_RES (136)..(136): Selenocysteine
  MOD_RES (139)..(139): Selenocysteine
  MOD_RES (152)..(152): Selenocysteine
  MOD_RES (166)..(166): Selenocysteine
  MOD_RES (176)..(176): Selenocysteine
  MOD_RES (183)..(183): Selenocysteine
  MOD_RES (217)..(217): Selenocysteine
  MOD_RES (220)..(220): Selenocysteine
  MOD_RES (234)..(234): Selenocysteine
  MOD_RES (247)..(247): Selenocysteine
  MOD_RES (261)..(261): Selenocysteine
  MOD_RES (276)..(276): Selenocysteine
  MOD_RES (286)..(286): Selenocysteine
  MOD_RES (293)..(293): Selenocysteine
  MOD_RES (299)..(299): Selenocysteine
  MOD_RES (313)..(313): Selenocysteine
  MOD_RES (318)..(318): Selenocysteine
  MOD_RES (324)..(324): Selenocysteine
  MOD_RES (337)..(337): Selenocysteine
  MOD_RES (339)..(339): Selenocysteine
  MOD_RES (342)..(342): Selenocysteine
  MOD_RES (395)..(395): Selenocysteine
  MOD_RES (398)..(398): Selenocysteine
  MOD_RES (455)..(455): Selenocysteine
  MOD_RES (515)..(515): Selenocysteine
  MOD_RES (532)..(532): Selenocysteine
  MOD_RES (545)..(545): Selenocysteine
  MOD_RES (548)..(548): Selenocysteine
  MOD_RES (551)..(551): Selenocysteine
  MOD_RES (565)..(565): Selenocysteine
  MOD_RES (583)..(583): Selenocysteine
  MOD_RES (614)..(614): Selenocysteine
MELGGPGAPRLLPPLLLLLGXGLLRASSHVEXRAHAEERLLKKLFSGYNKWSRPVANISDVVLVRFGLSIAQLIDVDEKNQMMXXNVWVKQEWHDYKLRWDPADYENVXSIRIPSELIWRPDIVLYNNADGDFAVXHLXKAHLFHDGRVQWXPPAIYKSSCSIDVXFFPFDQQNCXMKFGSWXYDKAKIDLVNMHSRVDQLDFWESGEWVIVDAVGXYNXRKYECCAEIYPDIXYAFVIRRLPLFYXINLIIPCLLISCLXVLVFYLPSECGEKIXLCISVLLSLXVFLLLIXEIIPSXSLVIPLIGEYLLFXMIFVXLSIVIXVFVLNVHHRSPRXHXMPXWVRRVFLDIVPRLLLMKRPSVVKDNCRRLIESMHKMASAPRFWPEPEGEPPAXSGXQSLHPPSPSFCVPLDVPAEPGPSCKSPSDQLPPQQPLEAEKASPHPSPGPCRPPHGXQAPGLAKARSLSVQHMSSPGEAVEGGVRCRSRSIQYCVPRDDAAPEADGQAAGALASRNXHSAELPPPDQPSPCKCXCKKEPSSVSPSAXVKXRSXKAPPPHLPLSPALXRAVEGVQYIADHLKAEDXDFSVKEDWKYVAMVIDRIFLWMFIIVCLLGXVGLFLPPWLAGMI

SEQ ID NO: 6165 - protein, 111 aa, Homo sapiens
  MOD_RES (21)..(21): Selenocysteine
  MOD_RES (32)..(32): Selenocysteine
  MOD_RES (84)..(85): Selenocysteine
MELGGPGAPRLLPPLLLLLGXGLLRASSHVEXRAHAEERLLKKLFSGYNKWSRPVANISDVVLVRFGLSIAQLIDVDEKNQMMXXNVWVKQPPPAPPHPGVARLQAALGPS

SEQ ID NO: 6166 - protein, 556 aa, Homo sapiens
  MOD_RES (18)..(18): Selenocysteine
  MOD_RES (22)..(24): Selenocysteine
  MOD_RES (50)..(50): Selenocysteine
  MOD_RES (65)..(65): Selenocysteine
  MOD_RES (68)..(68): Selenocysteine
  MOD_RES (81)..(81): Selenocysteine
  MOD_RES (95)..(95): Selenocysteine
  MOD_RES (105)..(105): Selenocysteine
  MOD_RES (112)..(112): Selenocysteine
  MOD_RES (146)..(146): Selenocysteine
  MOD_RES (149)..(149): Selenocysteine
  MOD_RES (163)..(163): Selenocysteine
  MOD_RES (176)..(176): Selenocysteine
  MOD_RES (190)..(190): Selenocysteine
  MOD_RES (205)..(205): Selenocysteine
  MOD_RES (215)..(215): Selenocysteine
  MOD_RES (222)..(222): Selenocysteine
  MOD_RES (228)..(228): Selenocysteine
  MOD_RES (242)..(242): Selenocysteine
  MOD_RES (247)..(247): Selenocysteine
  MOD_RES (253)..(253): Selenocysteine
  MOD_RES (266)..(266): Selenocysteine
  MOD_RES (268)..(268): Selenocysteine
  MOD_RES (271)..(271): Selenocysteine
  MOD_RES (324)..(324): Selenocysteine
  MOD_RES (327)..(327): Selenocysteine
  MOD_RES (384)..(384): Selenocysteine
  MOD_RES (444)..(444): Selenocysteine
  MOD_RES (461)..(461): Selenocysteine
  MOD_RES (474)..(474): Selenocysteine
  MOD_RES (477)..(477): Selenocysteine
  MOD_RES (480)..(480): Selenocysteine
  MOD_RES (494)..(494): Selenocysteine
  MOD_RES (512)..(512): Selenocysteine
  MOD_RES (543)..(543): Selenocysteine
MRMSPPSASPPSSSGGRXSSSXXXAGEPFWAGVLFAIRPHPGLSGRIVWXAGCPGEGADGDFAVXHLXKAHLFHDGRVQWXPPAIYKSSCSIDVXFFPFDQQNCXMKFGSWXYDKAKIDLVNMHSRVDQLDFWESGEWVIVDAVGXYNXRKYECCAEIYPDIXYAFVIRRLPLFYXINLIIPCLLISCLXVLVFYLPSECGEKIXLCISVLLSLXVFLLLIXEIIPSXSLVIPLIGEYLLFXMIFVXLSIVIXVFVLNVHHRSPRXHXMPXWVRRVFLDIVPRLLLMKRPSVVKDNCRRLIESMHKMASAPRFWPEPEGEPPAXSGXQSLHPPSPSFCVPLDVPAEPGPSCKSPSDQLPPQQPLEAEKASPHPSPGPCRPPHGXQAPGLAKARSLSVQHMSSPGEAVEGGVRCRSRSIQYCVPRDDAAPEADGQAAGALASRNXHSAELPPPDQPSPCKCXCKKEPSSVSPSAXVKXRSXKAPPPHLPLSPALXRAVEGVQYIADHLKAEDXDFSVKEDWKYVAMVIDRIFLWMFIIVCLLGXVGLFLPPWLAGMI

SEQ ID NO: 6167 - protein, 137 aa, Homo sapiens
  MOD_RES (1)..(1): Any amino acid
  MOD_RES (7)..(7): Selenocysteine
  MOD_RES (59)..(60): Selenocysteine
  MOD_RES (84)..(84): Selenocysteine
  MOD_RES (118)..(118): Selenocysteine
XSSHVEXRAHAEERLLKKLFSGYNKWSRPVANISDVVLVRFGLSIAQLIDVDEKNQMMXXNVWVKQEWHDYKLRWDPADYENVXSIRIPSELIWRPDIVLYNNCRRALLGRSAFRHQXPSWPFWENSVDCRVPWRGC

SEQ ID NO: 6168 - protein, 160 aa, Homo sapiens
  MOD_RES (94)..(95): Selenocysteine
  MOD_RES (130)..(130): Selenocysteine
  MOD_RES (146)..(146): Selenocysteine
  MOD_RES (148)..(148): Selenocysteine
  MOD_RES (150)..(150): Selenocysteine
MAARGSGPRALRLLLLVQLVAGRCGLAGAAGGAQRGLSEPSSIAKHEDSLLKDLFQDYERWVRPVEHLNDKIKIKFGLAISQLVDVDEKNQLMXXNVWLKQEWIDVKLRWNPDDYGGIKVIRVPSDSVWXPDIVLFDNADGRFEGXSXKXVIRLLKIGNS

SEQ ID NO: 6169 - protein, 468 aa, Homo sapiens
  MOD_RES (94)..(95): Selenocysteine
  MOD_RES (130)..(130): Selenocysteine
  MOD_RES (146)..(146): Selenocysteine
  MOD_RES (148)..(148): Selenocysteine
  MOD_RES (150)..(150): Selenocysteine
  MOD_RES (157)..(157): Selenocysteine
  MOD_RES (159)..(159): Selenocysteine
  MOD_RES (161)..(161): Selenocysteine
  MOD_RES (171)..(171): Selenocysteine
  MOD_RES (175)..(175): Selenocysteine
  MOD_RES (192)..(192): Selenocysteine
  MOD_RES (224)..(224): Selenocysteine
  MOD_RES (231)..(231): Selenocysteine
  MOD_RES (241)..(241): Selenocysteine
  MOD_RES (254)..(254): Selenocysteine
  MOD_RES (268)..(268): Selenocysteine
  MOD_RES (286)..(286): Selenocysteine
  MOD_RES (293)..(293): Selenocysteine
  MOD_RES (320)..(320): Selenocysteine
  MOD_RES (325)..(325): Selenocysteine
  MOD_RES (331)..(331): Selenocysteine
  MOD_RES (344)..(344): Selenocysteine
  MOD_RES (359)..(359): Selenocysteine
  MOD_RES (375)..(375): Selenocysteine
  MOD_RES (380)..(380): Selenocysteine
  MOD_RES (392)..(392): Selenocysteine
  MOD_RES (404)..(404): Selenocysteine
  MOD_RES (434)..(434): Selenocysteine
MAARGSGPRALRLLLLVQLVAGRCGLAGAAGGAQRGLSEPSSIAKHEDSLLKDLFQDYERWVRPVEHLNDKIKIKFGLAISQLVDVDEKNQLMXXNVWLKQEWIDVKLRWNPDDYGGIKVIRVPSDSVWXPDIVLFDNADGRFEGXSXKXVIRYNGXVXWXPPANYKSSCXIDVXFFPFDLQNCSMKFGSWXYDGSQVDIILEDQDVDKRDFFDNGEWEIVSAXGSKGNRXDSCCWYPYVXYSFVIKRLPLFYXLFLIIPCIGLSFLXVLVFYLPSNEGEKICLCXSVLVSLXVFLLVIEEIIPSSSKVIPLIGEYLVFXMIFVXLSIMVXVFAINIHHRSSSXHNAMAPLVRKIFLHXLPKLLCMRSHVDRYFXQKEEXESGSGPKSSRNXLEAALDSIRYIXRHIMKENDVREVVEDWKFIAQVLDRMFLWXFLFVSIVGSLGLFVPVIYKWANILIPVHIGNANK

SEQ ID NO: 6170 - protein, 182 aa, Homo sapiens
  MOD_RES (1)..(1): Any amino acid
  MOD_RES (33)..(34): Selenocysteine
  MOD_RES (69)..(69): Selenocysteine
  MOD_RES (85)..(85): Selenocysteine
  MOD_RES (87)..(87): Selenocysteine
  MOD_RES (89)..(89): Selenocysteine
  MOD_RES (96)..(96): Selenocysteine
  MOD_RES (98)..(98): Selenocysteine
  MOD_RES (100)..(100): Selenocysteine
  MOD_RES (110)..(110): Selenocysteine
  MOD_RES (114)..(114): Selenocysteine
  MOD_RES (131)..(131): Selenocysteine
  MOD_RES (163)..(163): Selenocysteine
  MOD_RES (170)..(170): Selenocysteine
XRPVEHLNDKIKIKFGLAISQLVDVDEKNQLMXXNVWLKQEWIDVKLRWNPDDYGGIKVIRVPSDSVWXPDIVLFDNADGRFEGXSXKXVIRYNGXVXWXPPANYKSSCXIDVXFFPFDLQNCSMKFGSWXYDGSQVDIILEDQDVDKRDFFDNGEWEIVSAXGSKGNRXDSCCWLLKIGNS

SEQ ID NO: 6171 - protein, 56 aa, Homo sapiens
  MOD_RES (1)..(1): Any amino acid
  MOD_RES (2)..(2): Selenocysteine
  MOD_RES (8)..(8): Selenocysteine
  MOD_RES (21)..(21): Selenocysteine
  MOD_RES (36)..(36): Selenocysteine
XXLSIMVXVFAINIHHRSSSXHNAMAPLVRKIFLHXLPKLLCMRSHVDRLLKIGNS

SEQ ID NO: 6172 - protein, 111 aa, Homo sapiens
  MOD_RES (3)..(3): Selenocysteine
  MOD_RES (28)..(28): Selenocysteine
  MOD_RES (57)..(57): Selenocysteine
  MOD_RES (68)..(68): Selenocysteine
  MOD_RES (70)..(70): Selenocysteine
  MOD_RES (84)..(84): Selenocysteine
  MOD_RES (101)..(101): Selenocysteine
MEXNLWLRHIWNDYKLRWDPMEYDGIEXLRVPADKIWKPDIVLYNNAVGDFQVEGKXKALLKYNGMIXWXPPAIFKSSCPMDIXFFPFDHQNCSLKFGSWXYDKAEIDLLI

SEQ ID NO: 6173 - protein, 494 aa, Homo sapiens
  MOD_RES (3)..(3): Selenocysteine
  MOD_RES (22)..(22): Selenocysteine
  MOD_RES (33)..(33): Selenocysteine
  MOD_RES (60)..(60): Selenocysteine
  MOD_RES (68)..(68): Selenocysteine
  MOD_RES (82)..(82): Selenocysteine
  MOD_RES (107)..(107): Selenocysteine
  MOD_RES (136)..(136): Selenocysteine
  MOD_RES (147)..(147): Selenocysteine
  MOD_RES (149)..(149): Selenocysteine
  MOD_RES (163)..(163): Selenocysteine
  MOD_RES (180)..(180): Selenocysteine
  MOD_RES (228)..(228): Selenocysteine
  MOD_RES (231)..(231): Selenocysteine
  MOD_RES (244)..(244): Selenocysteine
  MOD_RES (258)..(258): Selenocysteine
  MOD_RES (273)..(273): Selenocysteine
  MOD_RES (283)..(283): Selenocysteine
  MOD_RES (290)..(290): Selenocysteine
  MOD_RES (292)..(292): Selenocysteine
  MOD_RES (296)..(296): Selenocysteine
  MOD_RES (310)..(310): Selenocysteine
  MOD_RES (315)..(315): Selenocysteine
  MOD_RES (321)..(321): Selenocysteine
  MOD_RES (331)..(331): Selenocysteine
  MOD_RES (333)..(334): Selenocysteine
  MOD_RES (336)..(336): Selenocysteine
  MOD_RES (343)..(343): Selenocysteine
  MOD_RES (362)..(362): Selenocysteine
  MOD_RES (365)..(365): Selenocysteine
  MOD_RES (406)..(406): Selenocysteine
  MOD_RES (449)..(449): Selenocysteine
  MOD_RES (479)..(479): Selenocysteine
  MOD_RES (491)..(491): Selenocysteine
MLXSKGQGFLHGGLCLWLCVFXPFFKGCVGCAXEERLFHKLFSHYNQFIRPVENVSDPVXVHFEVAIXQLANVDEVNQIMEXNLWLRHIWNDYKLRWDPMEYDGIEXLRVPADKIWKPDIVLYNNAVGDFQVEGKXKALLKYNGMIXWXPPAIFKSSCPMDIXFFPFDHQNCSLKFGSWXYDKAEIDLLIIGSKVDMNDFWENSEWEIIDASGYKHDIKYNCCEEIYXDIXYSFYIRRLPMFYXINLIIPCLFISFLXVLVFYLPSDCGEKVXLCISVLLSLXVFLLVIXEXIPSXSLVVPLVGEYLLFXMIFVXLSIVVXVFVLNIHYRXPXXHXMPRWVKXVFLKLLPQVLLMRWPLDKXRGXGSDAVPRGLARRPAKGKLASHGEPRHLKECFHCHKSNELAXSKRRLSHQPLQWVVENSEHSPEVEDVINSVQFIAENMKSHNEXKEVEDDWKYVAMVVDRVFLWVFIIVCVFGXAGLFLQPLLGNXGKS

SEQ ID NO: 6174 - protein, 479 aa, Homo sapiens
  MOD_RES (3)..(3): Selenocysteine
  MOD_RES (22)..(22): Selenocysteine
  MOD_RES (33)..(33): Selenocysteine
  MOD_RES (60)..(60): Selenocysteine
  MOD_RES (68)..(68): Selenocysteine
  MOD_RES (92)..(92): Selenocysteine
  MOD_RES (121)..(121): Selenocysteine
  MOD_RES (132)..(132): Selenocysteine
  MOD_RES (134)..(134): Selenocysteine
  MOD_RES (148)..(148): Selenocysteine
  MOD_RES (165)..(165): Selenocysteine
  MOD_RES (213)..(213): Selenocysteine
  MOD_RES (216)..(216): Selenocysteine
  MOD_RES (229)..(229): Selenocysteine
  MOD_RES (243)..(243): Selenocysteine
  MOD_RES (258)..(258): Selenocysteine
  MOD_RES (268)..(268): Selenocysteine
  MOD_RES (275)..(275): Selenocysteine
  MOD_RES (277)..(277): Selenocysteine
  MOD_RES (281)..(281): Selenocysteine
  MOD_RES (295)..(295): Selenocysteine
  MOD_RES (300)..(300): Selenocysteine
  MOD_RES (306)..(306): Selenocysteine
  MOD_RES (316)..(316): Selenocysteine
  MOD_RES (318)..(319): Selenocysteine
  MOD_RES (321)..(321): Selenocysteine
  MOD_RES (328)..(328): Selenocysteine
  MOD_RES (347)..(347): Selenocysteine
  MOD_RES (350)..(350): Selenocysteine
  MOD_RES (391)..(391): Selenocysteine
  MOD_RES (434)..(434): Selenocysteine
  MOD_RES (464)..(464): Selenocysteine
  MOD_RES (476)..(476): Selenocysteine
MLXSKGQGFLHGGLCLWLCVFXPFFKGCVGCAXEERLFHKLFSHYNQFIRPVENVSDPVXVHFEVAIXQLANVIWNDYKLRWDPMEYDGIEXLRVPADKIWKPDIVLYNNAVGDFQVEGKXKALLKYNGMIXWXPPAIFKSSCPMDIXFFPFDHQNCSLKFGSWXYDKAEIDLLIIGSKVDMNDFWENSEWEIIDASGYKHDIKYNCCEEIYXDIXYSFYIRRLPMFYXINLIIPCLFISFLXVLVFYLPSDCGEKVXLCISVLLSLXVFLLVIXEXIPSXSLVVPLVGEYLLFXMIFVXLSIVVXVFVLNIHYRXPXXHXMPRWVKXVFLKLLPQVLLMRWPLDKXRGXGSDAVPRGLARRPAKGKLASHGEPRHLKECFHCHKSNELAXSKRRLSHQPLQWVVENSEHSPEVEDVINSVQFIAENMKSHNEXKEVEDDWKYVAMVVDRVFLWVFIIVCVFGXAGLFLQPLLGNXGKS

SEQ ID NO: 6175 - protein, 292 aa, Homo sapiens
  MOD_RES (6)..(6): Selenocysteine
  MOD_RES (59)..(59): Selenocysteine
  MOD_RES (80)..(81): Selenocysteine
  MOD_RES (90)..(90): Selenocysteine
  MOD_RES (106)..(106): Selenocysteine
  MOD_RES (132)..(132): Selenocysteine
  MOD_RES (135)..(135): Selenocysteine
  MOD_RES (208)..(208): Selenocysteine
  MOD_RES (213)..(213): Selenocysteine
  MOD_RES (250)..(250): Selenocysteine
  MOD_RES (256)..(256): Selenocysteine
  MOD_RES (269)..(269): Selenocysteine
  MOD_RES (283)..(283): Selenocysteine
ASPPSXPPWDPGHIPGASVRPAPGPVSLQGEFQRKLYKELVKNYNPLERPVANDSQPLXVYFSLSLLQIMDVDEKNQVLXXNIWLQMSWXDHYLQWNVSEYPGVKXVRFPDGQIWKPDILLYNSADERFDAXFHXNVLVNSSGHCQYLPPGIFKSSCYIDVRWFPFDVQHCKLKFGSWSYGGWSLDLQMQEADISGYIPNGEWDLVVXMRRRXLYYGLNLLIPCVLISALALLVFLLPADSGEKISLGIXVLLSLXVFMLLVAEIMPAXSDSVPLIAQYFASXMIIVGLSVV

SEQ ID NO: 6176 - protein, 440 aa, Homo sapiens
  MOD_RES (11)..(12): Selenocysteine
  MOD_RES (21)..(21): Selenocysteine
  MOD_RES (37)..(37): Selenocysteine
  MOD_RES (63)..(63): Selenocysteine
  MOD_RES (66)..(66): Selenocysteine
  MOD_RES (159)..(159): Selenocysteine
  MOD_RES (161)..(161): Selenocysteine
  MOD_RES (163)..(163): Selenocysteine
  MOD_RES (168)..(168): Selenocysteine
  MOD_RES (205)..(205): Selenocysteine
  MOD_RES (211)..(211): Selenocysteine
  MOD_RES (224)..(224): Selenocysteine
  MOD_RES (238)..(238): Selenocysteine
  MOD_RES (249)..(249): Selenocysteine
  MOD_RES (269)..(269): Selenocysteine
  MOD_RES (338)..(338): Selenocysteine
  MOD_RES (353)..(353): Selenocysteine
  MOD_RES (417)..(417): Selenocysteine
  MOD_RES (421)..(421): Selenocysteine
MDVDEKNQVLXXNIWLQMSWXDHYLQWNVSEYPGVKXVRFPDGQIWKPDILLYNSADERFDAXFHXNVLVNSSGHCQYLPPGIFKSSCYIDVRWFPFDVQHCKLKFGSWSYGGWSLDLQMQEADISGYIPNGEWDLVGIPGKRSERFYECCKEPYPDVXFXVXMRRRXLYYGLNLLIPCVLISALALLVFLLPADSGEKISLGIXVLLSLXVFMLLVAEIMPAXSDSVPLIAQYFASXMIIVGLSVVVXVIVLQYHHHDPDGGKMPKWXRVILLNWCAWFLRMKRPGEDKVRPACQHKQRRCSLASVEMSAVAPPPASNGNLLYIGFRGLDGVHCVPXPDSGVVCGRMACSPXHDEHLLHGGQPPEGDPDLAKILEEVRYIANRFRCQDESEAVCSEWKFAACVVDRLCLMAFSVFXIICXIGILMSAPNFVEAVSKDFA

SEQ ID NO: 6177 - protein, 318 aa, Homo sapiens
  MOD_RES (11)..(12): Selenocysteine
  MOD_RES (21)..(21): Selenocysteine
  MOD_RES (37)..(37): Selenocysteine
  MOD_RES (63)..(63): Selenocysteine
  MOD_RES (66)..(66): Selenocysteine
  MOD_RES (159)..(159): Selenocysteine
  MOD_RES (161)..(161): Selenocysteine
  MOD_RES (163)..(163): Selenocysteine
  MOD_RES (168)..(168): Selenocysteine
  MOD_RES (205)..(205): Selenocysteine
  MOD_RES (211)..(211): Selenocysteine
  MOD_RES (224)..(224): Selenocysteine
MDVDEKNQVLXXNIWLQMSWXDHYLQWNVSEYPGVKXVRFPDGQIWKPDILLYNSADERFDAXFHXNVLVNSSGHCQYLPPGIFKSSCYIDVRWFPFDVQHCKLKFGSWSYGGWSLDLQMQEADISGYIPNGEWDLVGIPGKRSERFYECCKEPYPDVXFXVXMRRRXLYYGLNLLIPCVLISALALLVFLLPADSGEKISLGIXVLLSLXVFMLLVAEIMPAXSDSVPLIDQSHPSELVRVVPANEEARGGQGAPGLPAQAAALQPGQCGDERRGAAARQQREPAVHRLPRPGRRALCPDPRLWGSVWPHGLLPHAR

SEQ ID NO: 6178 - protein, 222 aa, Homo sapiens
  MOD_RES (40)..(40): Selenocysteine
  MOD_RES (42)..(42): Selenocysteine
  MOD_RES (44)..(44): Selenocysteine
  MOD_RES (49)..(49): Selenocysteine
  MOD_RES (86)..(86): Selenocysteine
  MOD_RES (92)..(92): Selenocysteine
  MOD_RES (105)..(105): Selenocysteine
  MOD_RES (119)..(119): Selenocysteine
  MOD_RES (130)..(130): Selenocysteine
  MOD_RES (150)..(150): Selenocysteine
  MOD_RES (219)..(219): Selenocysteine
MQEADISGYIPNGEWDLVGIPGKRSERFYECCKEPYPDVXFXVXMRRRXLYYGLNLLIPCVLISALALLVFLLPADSGEKISLGIXVLLSLXVFMLLVAEIMPAXSDSVPLIAQYFASXMIIVGLSVVVXVIVLQYHHHDPDGGKMPKWXRVILLNWCAWFLRMKRPGEDKVRPACQHKQRRCSLASVEMSAVAPPPASNGNLLYIGFRGLDGVHCVPXPDS

SEQ ID NO: 6179 - protein, 531 aa, Homo sapiens
  MOD_RES (22)..(22): Selenocysteine
  MOD_RES (28)..(28): Selenocysteine
  MOD_RES (81)..(81): Selenocysteine
  MOD_RES (102)..(103): Selenocysteine
  MOD_RES (112)..(112): Selenocysteine
  MOD_RES (128)..(128): Selenocysteine
  MOD_RES (154)..(154): Selenocysteine
  MOD_RES (157)..(157): Selenocysteine
  MOD_RES (250)..(250): Selenocysteine
  MOD_RES (252)..(252): Selenocysteine
  MOD_RES (254)..(254): Selenocysteine
  MOD_RES (259)..(259): Selenocysteine
  MOD_RES (296)..(296): Selenocysteine
  MOD_RES (302)..(302): Selenocysteine
  MOD_RES (315)..(315): Selenocysteine
  MOD_RES (329)..(329): Selenocysteine
  MOD_RES (340)..(340): Selenocysteine
  MOD_RES (360)..(360): Selenocysteine
  MOD_RES (429)..(429): Selenocysteine
  MOD_RES (444)..(444): Selenocysteine
  MOD_RES (508)..(508): Selenocysteine
  MOD_RES (512)..(512): Selenocysteine
MRCSPGGVWLALAASLLHGKAXASPPSXPPWDPGHIPGASVRPAPGPVSLQGEFQRKLYKELVKNYNPLERPVANDSQPLXVYFSLSLLQIMDVDEKNQVLXXNIWLQMSWXDHYLQWNVSEYPGVKXVRFPDGQIWKPDILLYNSADERFDAXFHXNVLVNSSGHCQYLPPGIFKSSCYIDVRWFPFDVQHCKLKFGSWSYGGWSLDLQMQEADISGYIPNGEWDLVGIPGKRSERFYECCKEPYPDVXFXVXMRRRXLYYGLNLLIPCVLISALALLVFLLPADSGEKISLGIXVLLSLXVFMLLVAEIMPAXSDSVPLIAQYFASXMIIVGLSVVVXVIVLQYHHHDPDGGKMPKWXRVILLNWCAWFLRMKRPGEDKVRPACQHKQRRCSLASVEMSAVAPPPASNGNLLYIGFRGLDGVHCVPXPDSGVVCGRMACSPXHDEHLLHGGQPPEGDPDLAKILEEVRYIANRFRCQDESEAVCSEWKFAACVVDRLCLMAFSVFXIICXIGILMSAPNFVEAVSKDFA

SEQ ID NO: 6180 - protein, 102 aa, Homo sapiens
  MOD_RES (52)..(52): Selenocysteine
  MOD_RES (73)..(74): Selenocysteine
  MOD_RES (88)..(88): Selenocysteine
  MOD_RES (100)..(100): Selenocysteine
MRCSPGGVWLALAASLLHVSLQGEFQRKLYKELVKNYNPLERPVANDSQPLXVYFSLSLLQIMDVDEKNQVLXXNIWLQMAYSRVPAXSMYAGFPLMCSXAN

SEQ ID NO: 6181 - protein, 81 aa, Homo sapiens
  MOD_RES (52)..(52): Selenocysteine
  MOD_RES (73)..(74): Selenocysteine
MRCSPGGVWLALAASLLHVSLQGEFQRKLYKELVKNYNPLERPVANDSQPLXVYFSLSLLQIMDVDEKNQVLXXNIWLQMC

SEQ ID NO: 6182 - protein, 93 aa, Homo sapiens
  MOD_RES (52)..(52): Selenocysteine
  MOD_RES (73)..(74): Selenocysteine
  MOD_RES (82)..(82): Selenocysteine
MRCSPGGVWLALAASLLHVSLQGEFQRKLYKELVKNYNPLERPVANDSQPLXVYFSLSLLQIMDVDEKNQVLXXNIWLQMIXIYSGMCQNIQG

SEQ ID NO: 6183 - protein, 132 aa, Homo sapiens
  MOD_RES (52)..(52): Selenocysteine
  MOD_RES (73)..(74): Selenocysteine
  MOD_RES (83)..(83): Selenocysteine
  MOD_RES (99)..(99): Selenocysteine
  MOD_RES (128)..(128): Selenocysteine
MRCSPGGVWLALAASLLHVSLQGEFQRKLYKELVKNYNPLERPVANDSQPLXVYFSLSLLQIMDVDEKNQVLXXNIWLQMSWXDHYLQWNVSEYPGVKXVRFPDGQIWKPDILLYNRHIQEFLLHRCXLVSL

SEQ ID NO: 6184 - protein, 502 aa, Homo sapiens
  MOD_RES (52)..(52): Selenocysteine
  MOD_RES (73)..(74): Selenocysteine
  MOD_RES (83)..(83): Selenocysteine
  MOD_RES (99)..(99): Selenocysteine
  MOD_RES (125)..(125): Selenocysteine
  MOD_RES (128)..(128): Selenocysteine
  MOD_RES (221)..(221): Selenocysteine
  MOD_RES (223)..(223): Selenocysteine
  MOD_RES (225)..(225): Selenocysteine
  MOD_RES (230)..(230): Selenocysteine
  MOD_RES (267)..(267): Selenocysteine
  MOD_RES (273)..(273): Selenocysteine
  MOD_RES (286)..(286): Selenocysteine
  MOD_RES (300)..(300): Selenocysteine
  MOD_RES (311)..(311): Selenocysteine
  MOD_RES (331)..(331): Selenocysteine
  MOD_RES (400)..(400): Selenocysteine
  MOD_RES (415)..(415): Selenocysteine
  MOD_RES (479)..(479): Selenocysteine
  MOD_RES (483)..(483): Selenocysteine
MRCSPGGVWLALAASLLHVSLQGEFQRKLYKELVKNYNPLERPVANDSQPLXVYFSLSLLQIMDVDEKNQVLXXNIWLQMSWXDHYLQWNVSEYPGVKXVRFPDGQIWKPDILLYNSADERFDAXFHXNVLVNSSGHCQYLPPGIFKSSCYIDVRWFPFDVQHCKLKFGSWSYGGWSLDLQMQEADISGYIPNGEWDLVGIPGKRSERFYECCKEPYPDVXFXVXMRRRXLYYGLNLLIPCVLISALALLVFLLPADSGEKISLGIXVLLSLXVFMLLVAEIMPAXSDSVPLIAQYFASXMIIVGLSVVVXVIVLQYHHHDPDGGKMPKWXRVILLNWCAWFLRMKRPGEDKVRPACQHKQRRCSLASVEMSAVAPPPASNGNLLYIGFRGLDGVHCVPXPDSGVVCGRMACSPXHDEHLLHGGQPPEGDPDLAKILEEVRYIANRFRCQDESEAVCSEWKFAACVVDRLCLMAFSVFXIICXIGILMSAPNFVEAVSKDFA

SEQ ID NO: 6185 - protein, 285 aa, Homo sapiens
  MOD_RES (52)..(52): Selenocysteine
  MOD_RES (73)..(74): Selenocysteine
  MOD_RES (83)..(83): Selenocysteine
  MOD_RES (99)..(99): Selenocysteine
  MOD_RES (125)..(125): Selenocysteine
  MOD_RES (128)..(128): Selenocysteine
  MOD_RES (201)..(201): Selenocysteine
  MOD_RES (206)..(206): Selenocysteine
  MOD_RES (243)..(243): Selenocysteine
  MOD_RES (249)..(249): Selenocysteine
  MOD_RES (262)..(262): Selenocysteine
  MOD_RES (276)..(276): Selenocysteine
MRCSPGGVWLALAASLLHVSLQGEFQRKLYKELVKNYNPLERPVANDSQPLXVYFSLSLLQIMDVDEKNQVLXXNIWLQMSWXDHYLQWNVSEYPGVKXVRFPDGQIWKPDILLYNSADERFDAXFHXNVLVNSSGHCQYLPPGIFKSSCYIDVRWFPFDVQHCKLKFGSWSYGGWSLDLQMQEADISGYIPNGEWDLVVXMRRRXLYYGLNLLIPCVLISALALLVFLLPADSGEKISLGIXVLLSLXVFMLLVAEIMPAXSDSVPLIAQYFASXMIIVGLSVV

SEQ ID NO: 6186 - protein, 160 aa, Homo sapiens
  MOD_RES (52)..(52): Selenocysteine
  MOD_RES (73)..(74): Selenocysteine
  MOD_RES (83)..(83): Selenocysteine
  MOD_RES (99)..(99): Selenocysteine
  MOD_RES (140)..(140): Selenocysteine
MRCSPGGVWLALAASLLHVSLQGEFQRKLYKELVKNYNPLERPVANDSQPLXVYFSLSLLQIMDVDEKNQVLXXNIWLQMSWXDHYLQWNVSEYPGVKXVRFPDGQIWKPDILLYNSSYDQQQEVLAYGMHCWSPQFGPXSSSMFPVVHWRVLWQRWLQC

SEQ ID NO: 6187 - protein, 180 aa, Homo sapiens
  MOD_RES (52)..(52): Selenocysteine
  MOD_RES (73)..(74): Selenocysteine
  MOD_RES (83)..(83): Selenocysteine
  MOD_RES (99)..(99): Selenocysteine
  MOD_RES (139)..(139): Selenocysteine
  MOD_RES (166)..(166): Selenocysteine
  MOD_RES (178)..(178): Selenocysteine
MRCSPGGVWLALAASLLHVSLQGEFQRKLYKELVKNYNPLERPVANDSQPLXVYFSLSLLQIMDVDEKNQVLXXNIWLQMSWXDHYLQWNVSEYPGVKXVRFPDGQIWKPDILLYNSYDQQQEVLAYGMHCWSPQFGPXSSSMFPVVHWRVLWQRWLQAYSRVPAXSMYAGFPLMCSXAN

SEQ ID NO: 6188 - protein, 159 aa, Homo sapiens
  MOD_RES (52)..(52): Selenocysteine
  MOD_RES (73)..(74): Selenocysteine
  MOD_RES (83)..(83): Selenocysteine
  MOD_RES (99)..(99): Selenocysteine
  MOD_RES (139)..(139): Selenocysteine
MRCSPGGVWLALAASLLHVSLQGEFQRKLYKELVKNYNPLERPVANDSQPLXVYFSLSLLQIMDVDEKNQVLXXNIWLQMSWXDHYLQWNVSEYPGVKXVRFPDGQIWKPDILLYNSYDQQQEVLAYGMHCWSPQFGPXSSSMFPVVHWRVLWQRWLQC

SEQ ID NO: 6189 - protein, 81 aa, Homo sapiens
  MOD_RES (52)..(52): Selenocysteine
  MOD_RES (73)..(73): Selenocysteine
MRCSPGGVWLALAASLLHVSLQGEFQRKLYKELVKNYNPLERPVANDSQPLXVYFSLSLLQIMDVILRINKKXDSICSGLC

SEQ ID NO: 6190 - protein, 210 aa, Homo sapiens
  MOD_RES (4)..(4): Selenocysteine
  MOD_RES (20)..(20): Selenocysteine
  MOD_RES (46)..(46): Selenocysteine
  MOD_RES (49)..(49): Selenocysteine
  MOD_RES (142)..(142): Selenocysteine
  MOD_RES (144)..(144): Selenocysteine
  MOD_RES (146)..(146): Selenocysteine
  MOD_RES (151)..(151): Selenocysteine
  MOD_RES (188)..(188): Selenocysteine
  MOD_RES (194)..(194): Selenocysteine
  MOD_RES (207)..(207): Selenocysteine
MSWXDHYLQWNVSEYPGVKXVRFPDGQIWKPDILLYNSADERFDAXFHXNVLVNSSGHCQYLPPGIFKSSCYIDVRWFPFDVQHCKLKFGSWSYGGWSLDLQMQEADISGYIPNGEWDLVGIPGKRSERFYECCKEPYPDVXFXVXMRRRXLYYGLNLLIPCVLISALALLVFLLPADSGEKISLGIXVLLSLXVFMLLVAEIMPAXSDS

SEQ ID NO: 6191 - protein, 423 aa, Homo sapiens
  MOD_RES (4)..(4): Selenocysteine
  MOD_RES (20)..(20): Selenocysteine
  MOD_RES (46)..(46): Selenocysteine
  MOD_RES (49)..(49): Selenocysteine
  MOD_RES (142)..(142): Selenocysteine
  MOD_RES (144)..(144): Selenocysteine
  MOD_RES (146)..(146): Selenocysteine
  MOD_RES (151)..(151): Selenocysteine
  MOD_RES (188)..(188): Selenocysteine
  MOD_RES (194)..(194): Selenocysteine
  MOD_RES (207)..(207): Selenocysteine
  MOD_RES (221)..(221): Selenocysteine
  MOD_RES (232)..(232): Selenocysteine
  MOD_RES (252)..(252): Selenocysteine
  MOD_RES (321)..(321): Selenocysteine
  MOD_RES (336)..(336): Selenocysteine
  MOD_RES (400)..(400): Selenocysteine
  MOD_RES (404)..(404): Selenocysteine
MSWXDHYLQWNVSEYPGVKXVRFPDGQIWKPDILLYNSADERFDAXFHXNVLVNSSGHCQYLPPGIFKSSCYIDVRWFPFDVQHCKLKFGSWSYGGWSLDLQMQEADISGYIPNGEWDLVGIPGKRSERFYECCKEPYPDVXFXVXMRRRXLYYGLNLLIPCVLISALALLVFLLPADSGEKISLGIXVLLSLXVFMLLVAEIMPAXSDSVPLIAQYFASXMIIVGLSVVVXVIVLQYHHHDPDGGKMPKWXRVILLNWCAWFLRMKRPGEDKVRPACQHKQRRCSLASVEMSAVAPPPASNGNLLYIGFRGLDGVHCVPXPDSGVVCGRMACSPXHDEHLLHGGQPPEGDPDLAKILEEVRYIANRFRCQDESEAVCSEWKFAACVVDRLCLMAFSVFXIICXIGILMSAPNFVEAVSKDFA

SEQ ID NO: 6192 - protein, 71 aa, Homo sapiens
  MOD_RES (3)..(3): Selenocysteine
  MOD_RES (40)..(40): Selenocysteine
  MOD_RES (46)..(46): Selenocysteine
  MOD_RES (59)..(59): Selenocysteine
RRXLYYGLNLLIPCVLISALALLVFLLPADSGEKISLGIXVLLSLXVFMLLVAEIMPAXSDSVPLIAHCFQ

SEQ ID NO: 6193 - protein, 231 aa, Homo sapiens
  MOD_RES (1)..(1): Any amino acid
  MOD_RES (77)..(77): Selenocysteine
  MOD_RES (79)..(79): Selenocysteine
  MOD_RES (81)..(81): Selenocysteine
  MOD_RES (86)..(86): Selenocysteine
  MOD_RES (127)..(127): Selenocysteine
  MOD_RES (138)..(138): Selenocysteine
  MOD_RES (158)..(158): Selenocysteine
  MOD_RES (227)..(227): Selenocysteine
XFKSSCYIDVRWFPFDVQHCKLKFGSWSYGGWSLDLQMQEADISGYIPNGEWDLVGIPGKRSERFYECCKEPYPDVXFXVXMRRRXLYYGLNLLIPCVLISALALLVFLLPADSGEKISLAQYFASXMIIVGLSVVVXVIVLQYHHHDPDGGKMPKWXRVILLNWCAWFLRMKRPGEDKVRPACQHKQRRCSLASVEMSAVAPPPASNGNLLYIGFRGLDGVHCVPXPDSG

SEQ ID NO: 6194 - protein, 84 aa, Homo sapiens
  MOD_RES (1)..(1): Any amino acid
  MOD_RES (10)..(10): Selenocysteine
  MOD_RES (16)..(16): Selenocysteine
  MOD_RES (29)..(29): Selenocysteine
  MOD_RES (43)..(43): Selenocysteine
  MOD_RES (54)..(54): Selenocysteine
XGEKISLGIXVLLSLXVFMLLVAEIMPAXSDSVPLIAQYFASXMIIVGLSVVVXVIVLQYHHHDPDGGKMPKWPPRDFYYDLLL

SEQ ID NO: 6195 - protein, 40 aa, Homo sapiens
  MOD_RES (1)..(1): Any amino acid
  MOD_RES (8)..(8): Selenocysteine
  MOD_RES (29)..(30): Selenocysteine
XNDSQPLXVYFSLSLLQIMDVDEKNQVLXXNIWLQMNIQG

SEQ ID NO: 6196 - protein, 302 aa, Homo sapiens
  MOD_RES (1)..(1): Any amino acid
  MOD_RES (21)..(22): Selenocysteine
  MOD_RES (31)..(31): Selenocysteine
  MOD_RES (47)..(47): Selenocysteine
  MOD_RES (73)..(73): Selenocysteine
  MOD_RES (76)..(76): Selenocysteine
  MOD_RES (169)..(169): Selenocysteine
  MOD_RES (171)..(171): Selenocysteine
  MOD_RES (173)..(173): Selenocysteine
  MOD_RES (178)..(178): Selenocysteine
  MOD_RES (215)..(215): Selenocysteine
  MOD_RES (221)..(221): Selenocysteine
  MOD_RES (234)..(234): Selenocysteine
  MOD_RES (248)..(248): Selenocysteine
  MOD_RES (259)..(259): Selenocysteine
  MOD_RES (280)..(280): Selenocysteine
XYFSLSLLQIMDVDEKNQVLXXNIWLQMSWXDHYLQWNVSEYPGVKXVRFPDGQIWKPDILLYNSADERFDAXFHXNVLVNSSGHCQYLPPGIFKSSCYIDVRWFPFDVQHCKLKFGSWSYGGWSLDLQMQEADISGYIPNGEWDLVGIPGKRSERFYECCKEPYPDVXFXVXMRRRXLYYGLNLLIPCVLISALALLVFLLPADSGEKISLGIXVLLSLXVFMLLVAEIMPAXSDSVPLIAQYFASXMIIVGLSVVVXVIVLQYHHHDPDGGKMPKWGXLKNSFAKWSRHHKRCGNLMLEA

SEQ ID NO: 6197 - protein, 479 aa, Homo sapiens
  MOD_RES (25)..(25): Selenocysteine
  MOD_RES (52)..(52): Selenocysteine
  MOD_RES (59)..(59): Selenocysteine
  MOD_RES (63)..(63): Selenocysteine
  MOD_RES (78)..(78): Selenocysteine
  MOD_RES (93)..(93): Selenocysteine
  MOD_RES (133)..(133): Selenocysteine
  MOD_RES (144)..(144): Selenocysteine
  MOD_RES (151)..(151): Selenocysteine
  MOD_RES (160)..(160): Selenocysteine
  MOD_RES (172)..(172): Selenocysteine
  MOD_RES (177)..(177): Selenocysteine
  MOD_RES (228)..(228): Selenocysteine
  MOD_RES (230)..(230): Selenocysteine
  MOD_RES (274)..(274): Selenocysteine
  MOD_RES (280)..(280): Selenocysteine
  MOD_RES (306)..(306): Selenocysteine
  MOD_RES (311)..(311): Selenocysteine
  MOD_RES (314)..(314): Selenocysteine
  MOD_RES (317)..(317): Selenocysteine
  MOD_RES (371)..(371): Selenocysteine
  MOD_RES (425)..(425): Selenocysteine
  MOD_RES (441)..(441): Selenocysteine
  MOD_RES (471)..(471): Selenocysteine
MNWSHSCISFCWIYFAASRLRAAEXADGKYAQKLFNDLFEDYSNALRPVEDXDKVLNVXLQIXLSQIKDMDERNQILXAYLWIRQIWHDAYLXWDRDQYDGLDSIRIPSDLVWRPDIVLYNKADDESSEPVNXNVVLRYDGLIXWDAPAIXKSSCVVDVXYFPFDNQQCNLXFGSWXYNGNQVDIFNALDSGDLSDFIEDVEWEVHGMPAVKNVISYGCCSEPYPDVXFXLLLKRRSSFYIVNLLIPCVLISFLAPLSFYLPAASGEKVSLGVXILLAMXVFQLMVAEIMPASENVPLIGKYYIAXMALIXASXALXIMVMNIHFCGAEARPVPHWARVVILKYMSRVLFVYDVGESCLSPHHSRERDHLXKVYSKLPESNLKAARNKDLSRKKDMNKRLKNDLGCQGKNPQEAESYCAQYKVLXRNIEYIAKCLKDHKAXNSKGSEWKKVAKVIDRFFMWIFFIMVFVMXILIIARAD

SEQ ID NO: 6198 - protein, 429 aa, Homo sapiens
  MOD_RES (3)..(3): Selenocysteine
  MOD_RES (12)..(12): Selenocysteine
  MOD_RES (32)..(32): Selenocysteine
  MOD_RES (84)..(84): Selenocysteine
  MOD_RES (94)..(94): Selenocysteine
  MOD_RES (111)..(111): Selenocysteine
  MOD_RES (129)..(129): Selenocysteine
  MOD_RES (188)..(188): Selenocysteine
  MOD_RES (214)..(214): Selenocysteine
  MOD_RES (216)..(216): Selenocysteine
  MOD_RES (229)..(229): Selenocysteine
  MOD_RES (243)..(243): Selenocysteine
  MOD_RES (248)..(248): Selenocysteine
  MOD_RES (267)..(267): Selenocysteine
  MOD_RES (315)..(315): Selenocysteine
  MOD_RES (402)..(402): Selenocysteine
  MOD_RES (407)..(407): Selenocysteine
  MOD_RES (411)..(411): Selenocysteine
  MOD_RES (419)..(419): Selenocysteine
MSXKVYLDLEWXDYRLSWDPAEHDGIDSLRIXAESVWLPDVVLLNNNDGNFDVALDISVVVSSDGSVRWQPPGIYRSSCSIQVXYFPFDWQNCXMVFSSYSYDSSEVSLQXGLGPDGQGHQEIHIHEGXFIENGQWEIIHKPSRLIQPPGDPRGGREGQRQEVIFYLIIRRKPLFYLVNVIAPCILIXLLAIFVFYLPPDAGEKMGLSIFALLXLXVFLLLLADKVPEXSLSVPIIIKYLMFXMVLVXFSVILSVVVLNLHHRSPHXHQMPLWVRQIFIHKLPLYLRLKRPKPERDLMPEPPHCSSPGSGWGRGXDEYFIRKPPSDFLFPKPNRFQPELSAPDLRRFIDGPNRAVALLPELREVVSSISYIARQLQEQEDHDALKEDWQFVAMVVDRLFLWXFIIFXSVGXLVIFLDAXYHLPPPDPFP

SEQ ID NO: 6199 - protein, 380 aa, Homo sapiens
  MOD_RES (3)..(3): Selenocysteine
  MOD_RES (12)..(12): Selenocysteine
  MOD_RES (32)..(32): Selenocysteine
  MOD_RES (84)..(84): Selenocysteine
  MOD_RES (94)..(94): Selenocysteine
  MOD_RES (111)..(111): Selenocysteine
  MOD_RES (129)..(129): Selenocysteine
  MOD_RES (188)..(188): Selenocysteine
  MOD_RES (218)..(218): Selenocysteine
  MOD_RES (266)..(266): Selenocysteine
  MOD_RES (353)..(353): Selenocysteine
  MOD_RES (358)..(358): Selenocysteine
  MOD_RES (362)..(362): Selenocysteine
  MOD_RES (370)..(370): Selenocysteine
MSXKVYLDLEWXDYRLSWDPAEHDGIDSLRIXAESVWLPDVVLLNNNDGNFDVALDISVVVSSDGSVRWQPPGIYRSSCSIQVXYFPFDWQNCXMVFSSYSYDSSEVSLQXGLGPDGQGHQEIHIHEGXFIENGQWEIIHKPSRLIQPPGDPRGGREGQRQEVIFYLIIRRKPLFYLVNVIAPCILIXLLAIFVFYLPPDAVILSVVVLNLHHRSPHXHQMPLWVRQIFIHKLPLYLRLKRPKPERDLMPEPPHCSSPGSGWGRGXDEYFIRKPPSDFLFPKPNRFQPELSAPDLRRFIDGPNRAVALLPELREVVSSISYIARQLQEQEDHDALKEDWQFVAMVVDRLFLWXFIIFXSVGXLVIFLDAXYHLPPPDPFP

SEQ ID NO: 6200 - protein, 158 aa, Homo sapiens
  MOD_RES (2)..(2): Selenocysteine
  MOD_RES (75)..(75): Selenocysteine
  MOD_RES (98)..(98): Selenocysteine
  MOD_RES (100)..(100): Selenocysteine
  MOD_RES (105)..(105): Selenocysteine
  MOD_RES (109)..(109): Selenocysteine
  MOD_RES (129)..(129): Selenocysteine
MXPGALLMLLGALGAPLAPGVRGSEAEGRLREKLFSGYDSSVRPAREVGDRVRVSVGLILAQLISLNEKDEEMSXKVYLDLAVLECGGSSHPPASGGXSXSAEIXAEWXDYRLSWDPAEHDGIDSLRIXAESVWLPDVVLLNNNDGNFDVALDISVVV

SEQ ID NO: 6201 - protein, 501 aa, Homo sapiens
  MOD_RES (2)..(2): Selenocysteine
  MOD_RES (75)..(75): Selenocysteine
  MOD_RES (84)..(84): Selenocysteine
  MOD_RES (104)..(104): Selenocysteine
  MOD_RES (156)..(156): Selenocysteine
  MOD_RES (166)..(166): Selenocysteine
  MOD_RES (183)..(183): Selenocysteine
  MOD_RES (201)..(201): Selenocysteine
  MOD_RES (260)..(260): Selenocysteine
  MOD_RES (286)..(286): Selenocysteine
  MOD_RES (288)..(288): Selenocysteine
  MOD_RES (301)..(301): Selenocysteine
  MOD_RES (315)..(315): Selenocysteine
  MOD_RES (320)..(320): Selenocysteine
  MOD_RES (339)..(339): Selenocysteine
  MOD_RES (387)..(387): Selenocysteine
  MOD_RES (474)..(474): Selenocysteine
  MOD_RES (479)..(479): Selenocysteine
  MOD_RES (483)..(483): Selenocysteine
  MOD_RES (491)..(491): Selenocysteine
MXPGALLMLLGALGAPLAPGVRGSEAEGRLREKLFSGYDSSVRPAREVGDRVRVSVGLILAQLISLNEKDEEMSXKVYLDLEWXDYRLSWDPAEHDGIDSLRIXAESVWLPDVVLLNNNDGNFDVALDISVVVSSDGSVRWQPPGIYRSSCSIQVXYFPFDWQNCXMVFSSYSYDSSEVSLQXGLGPDGQGHQEIHIHEGXFIENGQWEIIHKPSRLIQPPGDPRGGREGQRQEVIFYLIIRRKPLFYLVNVIAPCILIXLLAIFVFYLPPDAGEKMGLSIFALLXLXVFLLLLADKVPEXSLSVPIIIKYLMFXMVLVXFSVILSVVVLNLHHRSPHXHQMPLWVRQIFIHKLPLYLRLKRPKPERDLMPEPPHCSSPGSGWGRGXDEYFIRKPPSDFLFPKPNRFQPELSAPDLRRFIDGPNRAVALLPELREVVSSISYIARQLQEQEDHDALKEDWQFVAMVVDRLFLWXFIIFXSVGXLVIFLDAXYHLPPPDPFP

SEQ ID NO: 6202 - protein, 37 aa, Homo sapiens
  MOD_RES (10)..(10): Selenocysteine
  MOD_RES (15)..(15): Selenocysteine
  MOD_RES (19)..(19): Selenocysteine
  MOD_RES (27)..(27): Selenocysteine
MVVDRLFLWXFIIFXSVGXLVIFLDAXYHLPPPDPFP

SEQ ID NO: 6203 - protein, 316 aa, Homo sapiens
  MOD_RES (1)..(1): Any amino acid
  MOD_RES (33)..(33): Selenocysteine
  MOD_RES (42)..(42): Selenocysteine
  MOD_RES (62)..(62): Selenocysteine
  MOD_RES (114)..(114): Selenocysteine
  MOD_RES (124)..(124): Selenocysteine
  MOD_RES (141)..(141): Selenocysteine
  MOD_RES (159)..(159): Selenocysteine
  MOD_RES (174)..(174): Selenocysteine
  MOD_RES (176)..(176): Selenocysteine
  MOD_RES (189)..(189): Selenocysteine
  MOD_RES (203)..(203): Selenocysteine
  MOD_RES (208)..(208): Selenocysteine
  MOD_RES (227)..(227): Selenocysteine
  MOD_RES (275)..(275): Selenocysteine
XPAREVGDRVRVSVGLILAQLISLNEKDEEMSXKVYLDLEWXDYRLSWDPAEHDGIDSLRIXAESVWLPDVVLLNNNDGNFDVALDISVVVSSDGSVRWQPPGIYRSSCSIQVXYFPFDWQNCXMVFSSYSYDSSEVSLQXGLGPDGQGHQEIHIHEGXFIGEKMGLSIFALLXLXVFLLLLADKVPEXSLSVPIIIKYLMFXMVLVXFSVILSVVVLNLHHRSPHXHQMPLWVRQIFIHKLPLYLRLKRPKPERDLMPEPPHCSSPGSGWGRGXDEYFIRKPPSDFLFPKPNRFQPELSAPDLRRFIDGPNRAVA

SEQ ID NO: 6204 - protein, 502 aa, Homo sapiens
  MOD_RES (26)..(26): Selenocysteine
  MOD_RES (28)..(28): Selenocysteine
  MOD_RES (50)..(50): Selenocysteine
  MOD_RES (57)..(57): Selenocysteine
  MOD_RES (78)..(79): Selenocysteine
  MOD_RES (84)..(84): Selenocysteine
  MOD_RES (93)..(93): Selenocysteine
  MOD_RES (170)..(170): Selenocysteine
  MOD_RES (177)..(177): Selenocysteine
  MOD_RES (181)..(181): Selenocysteine
  MOD_RES (198)..(198): Selenocysteine
  MOD_RES (220)..(220): Selenocysteine
  MOD_RES (225)..(225): Selenocysteine
  MOD_RES (238)..(238): Selenocysteine
  MOD_RES (249)..(249): Selenocysteine
  MOD_RES (267)..(267): Selenocysteine
  MOD_RES (277)..(277): Selenocysteine
  MOD_RES (290)..(290): Selenocysteine
  MOD_RES (304)..(304): Selenocysteine
  MOD_RES (309)..(309): Selenocysteine
  MOD_RES (314)..(314): Selenocysteine
  MOD_RES (327)..(328): Selenocysteine
  MOD_RES (330)..(330): Selenocysteine
  MOD_RES (388)..(388): Selenocysteine
  MOD_RES (474)..(474): Selenocysteine
  MOD_RES (487)..(490): Selenocysteine
MARRCGPVALLLGFGLLRLCSGVWGXDXEERLVEHLLDPSRYNKLIRPAXNGSELVXVQLMVSLAQLISVHEREQIMXXNVWLXQEWEDYRLXWKPEEFDNMKKVRLPSKHIWLPDVVLYNNADGMYEVSFYSNAVVSYDGSIFWLPPAIYKSACKIEVKHFPFDQQNCXMKFRSWXYDRXEIDLVLKSEVASLDDFXPSGEWDIVALPGRRNENPDDSXYVDIXYDFIIRRKPLFYXINLIIPCVLIXSLAILVFYLPSDCGEKMXLCISVLLALXVFLLLISKIVPPXSLDVPLVGKYLMFXMVLVXFSIVXSVCVLNVHHRSPXXHXMAPWVKVVFLEKLPALLFMQQPRHHCARQRLRLRRRQREREGAGALFFREAPGADSCXCFVNRASVQGLAGAFGAEPAPVAGPGRSGEPCGCGLREAVDGVRFIADHMRSEDDDQSVSEDWKYVAMVIDRLFLWIFVFVCVFGXIGMFLQPLFQNYXXXXFLHSDHSAPSSK

SEQ ID NO: 6205 - protein, 518 aa, Homo sapiens
  MOD_RES (26)..(26): Selenocysteine
  MOD_RES (28)..(28): Selenocysteine
  MOD_RES (50)..(50): Selenocysteine
  MOD_RES (57)..(57): Selenocysteine
  MOD_RES (78)..(79): Selenocysteine
  MOD_RES (84)..(84): Selenocysteine
  MOD_RES (93)..(93): Selenocysteine
  MOD_RES (170)..(170): Selenocysteine
  MOD_RES (177)..(177): Selenocysteine
  MOD_RES (181)..(181): Selenocysteine
  MOD_RES (198)..(198): Selenocysteine
  MOD_RES (220)..(220): Selenocysteine
  MOD_RES (225)..(225): Selenocysteine
  MOD_RES (238)..(238): Selenocysteine
  MOD_RES (249)..(249): Selenocysteine
  MOD_RES (267)..(267): Selenocysteine
  MOD_RES (277)..(277): Selenocysteine
  MOD_RES (290)..(290): Selenocysteine
  MOD_RES (304)..(304): Selenocysteine
  MOD_RES (309)..(309): Selenocysteine
  MOD_RES (314)..(314): Selenocysteine
  MOD_RES (327)..(328): Selenocysteine
  MOD_RES (330)..(330): Selenocysteine
  MOD_RES (388)..(388): Selenocysteine
  MOD_RES (474)..(474): Selenocysteine
  MOD_RES (487)..(490): Selenocysteine
MARRCGPVALLLGFGLLRLCSGVWGXDXEERLVEHLLDPSRYNKLIRPAXNGSELVXVQLMVSLAQLISVHEREQIMXXNVWLXQEWEDYRLXWKPEEFDNMKKVRLPSKHIWLPDVVLYNNADGMYEVSFYSNAVVSYDGSIFWLPPAIYKSACKIEVKHFPFDQQNCXMKFRSWXYDRXEIDLVLKSEVASLDDFXPSGEWDIVALPGRRNENPDDSXYVDIXYDFIIRRKPLFYXINLIIPCVLIXSLAILVFYLPSDCGEKMXLCISVLLALXVFLLLISKIVPPXSLDVPLVGKYLMFXMVLVXFSIVXSVCVLNVHHRSPXXHXMAPWVKVVFLEKLPALLFMQQPRHHCARQRLRLRRRQREREGAGALFFREAPGADSCXCFVNRASVQGLAGAFGAEPAPVAGPGRSGEPCGCGLREAVDGVRFIADHMRSEDDDQSVSEDWKYVAMVIDRLFLWIFVFVCVFGXIGMFLQPLFQNYXXXXFLHSDHSAPSSKLKVWGARLSIRGASEF

SEQ ID NO: 6206 - protein, 504 aa, Homo sapiens
  MOD_RES (26)..(26): Selenocysteine
  MOD_RES (28)..(28): Selenocysteine
  MOD_RES (50)..(50): Selenocysteine
  MOD_RES (57)..(57): Selenocysteine
  MOD_RES (78)..(79): Selenocysteine
  MOD_RES (84)..(84): Selenocysteine
  MOD_RES (95)..(95): Selenocysteine
  MOD_RES (172)..(172): Selenocysteine
  MOD_RES (179)..(179): Selenocysteine
  MOD_RES (183)..(183): Selenocysteine
  MOD_RES (200)..(200): Selenocysteine
  MOD_RES (222)..(222): Selenocysteine
  MOD_RES (227)..(227): Selenocysteine
  MOD_RES (240)..(240): Selenocysteine
  MOD_RES (251)..(251): Selenocysteine
  MOD_RES (269)..(269): Selenocysteine
  MOD_RES (279)..(279): Selenocysteine
  MOD_RES (292)..(292): Selenocysteine
  MOD_RES (306)..(306): Selenocysteine
  MOD_RES (311)..(311): Selenocysteine
  MOD_RES (316)..(316): Selenocysteine
  MOD_RES (329)..(330): Selenocysteine
  MOD_RES (332)..(332): Selenocysteine
  MOD_RES (390)..(390): Selenocysteine
  MOD_RES (476)..(476): Selenocysteine
  MOD_RES (489)..(492): Selenocysteine
MARRCGPVALLLGFGLLRLCSGVWGXDXEERLVEHLLDPSRYNKLIRPAXNGSELVXVQLMVSLAQLISVHEREQIMXXNVWLXQVSEWEDYRLXWKPEEFDNMKKVRLPSKHIWLPDVVLYNNADGMYEVSFYSNAVVSYDGSIFWLPPAIYKSACKIEVKHFPFDQQNCXMKFRSWXYDRXEIDLVLKSEVASLDDFXPSGEWDIVALPGRRNENPDDSXYVDIXYDFIIRRKPLFYXINLIIPCVLIXSLAILVFYLPSDCGEKMXLCISVLLALXVFLLLISKIVPPXSLDVPLVGKYLMFXMVLVXFSIVXSVCVLNVHHRSPXXHXMAPWVKVVFLEKLPALLFMQQPRHHCARQRLRLRRRQREREGAGALFFREAPGADSCXCFVNRASVQGLAGAFGAEPAPVAGPGRSGEPCGCGLREAVDGVRFIADHMRSEDDDQSVSEDWKYVAMVIDRLFLWIFVFVCVFGXIGMFLQPLFQNYXXXXFLHSDHSAPSSK

SEQ ID NO: 6207 - protein, 34 aa, Homo sapiens
  MOD_RES (1)..(1): Any amino acid
  MOD_RES (7)..(7): Selenocysteine
  MOD_RES (14)..(14): Selenocysteine
XLIRPAXNGSELVXVQLMVSLAQLISVPLFLPAA

SEQ ID NO: 6208 - protein, 458 aa, Homo sapiens
  MOD_RES (19)..(20): Selenocysteine
  MOD_RES (53)..(53): Selenocysteine
  MOD_RES (76)..(77): Selenocysteine
  MOD_RES (86)..(86): Selenocysteine
  MOD_RES (131)..(131): Selenocysteine
  MOD_RES (140)..(140): Selenocysteine
  MOD_RES (144)..(144): Selenocysteine
  MOD_RES (154)..(154): Selenocysteine
  MOD_RES (158)..(158): Selenocysteine
  MOD_RES (175)..(175): Selenocysteine
  MOD_RES (179)..(179): Selenocysteine
  MOD_RES (224)..(224): Selenocysteine
  MOD_RES (237)..(237): Selenocysteine
  MOD_RES (251)..(251): Selenocysteine
  MOD_RES (269)..(269): Selenocysteine
  MOD_RES (276)..(276): Selenocysteine
  MOD_RES (308)..(308): Selenocysteine
  MOD_RES (314)..(314): Selenocysteine
  MOD_RES (327)..(327): Selenocysteine
  MOD_RES (440)..(440): Selenocysteine
  MOD_RES (447)..(447): Selenocysteine
MLPDFMLVLIVLGIPSSAXXGFNSIAENEDALLRHLFQGYQKWVRPVLHSNDXIKVYFGLKISQLVDVDEKNQLMXXNVWLKQEWXDHKLRWNPDDYGGIHSIKVPSESLWLPDIVLFENADGRFEGSLMXKVIVKSNGXVVWXPPASYKSSCXMDVXFFPFDRQNCSMKFGSWXYDGXMVDLILINENVDRKDFFDNGEWEILNAKGMKGNRRDGVYSYPFIXYSFVLRRLPLFYXLFLIIPCLGLSFLXVLVFYLPSDEGEKLSLSXSVLVSLXVFLLVIEEIIPSSSKVIPLIGEYLLFIMIFVXLSIIVXVFVINVHHRSSSXYHPMAPWVKRLFLQKLPKLLCMKDHVDRYSSPEKEESQPVVKGKVLEKKKQKQLSDGEKVLVAFLEKAADSIRYISRHVKKEHFISQVVQDWKFVAQVLDRIFLWLFLIVSVXGSVLIFXPALKMWLHSYH

SEQ ID NO: 6209 - protein, 9 aa, Homo sapiens
  MOD_RES (2)..(3): Selenocysteine
MXXNVWLKQ

SEQ ID NO: 6210 - protein, 66 aa, Homo sapiens
  MOD_RES (35)..(35): Selenocysteine
  MOD_RES (45)..(45): Selenocysteine
MGGSLLAPAPDHIVLWNCRVANAEEKLMDDLLNKXRYNNLIRPAXSSSQLISIKLQLSLAQLISVG

SEQ ID NO: 6211 - protein, 231 aa, Homo sapiens
  MOD_RES (38)..(38): Selenocysteine
  MOD_RES (48)..(48): Selenocysteine
  MOD_RES (76)..(77): Selenocysteine
  MOD_RES (86)..(86): Selenocysteine
  MOD_RES (91)..(91): Selenocysteine
  MOD_RES (124)..(124): Selenocysteine
  MOD_RES (127)..(127): Selenocysteine
  MOD_RES (133)..(133): Selenocysteine
  MOD_RES (167)..(167): Selenocysteine
  MOD_RES (172)..(172): Selenocysteine
  MOD_RES (215)..(215): Selenocysteine
  MOD_RES (221)..(221): Selenocysteine
MRRAPSLVLFFLVALCGRGNCRVANAEEKLMDDLLNKXRYNNLIRPAXSSSQLISIKLQLSLAQLISVNEREQIMXXNVWLKQEWXDYRLXWNSSRYEGVNILRIPAKRIWLPDIVLYNKSLRXGSXWLWWWXGCSCGCSCLCASWALWGSSYRPSSRPMQLLRGPXLPSVXEGPLGCGVRGCEWPGGHFAASFWVVADEALSKYVSIGHQPHQXSHSRGXGKDGGLGCPL

SEQ ID NO: 6212 - protein, 498 aa, Homo sapiens
  MOD_RES (38)..(38): Selenocysteine
  MOD_RES (48)..(48): Selenocysteine
  MOD_RES (76)..(77): Selenocysteine
  MOD_RES (86)..(86): Selenocysteine
  MOD_RES (91)..(91): Selenocysteine
  MOD_RES (124)..(124): Selenocysteine
  MOD_RES (131)..(131): Selenocysteine
  MOD_RES (168)..(168): Selenocysteine
  MOD_RES (175)..(175): Selenocysteine
  MOD_RES (179)..(179): Selenocysteine
  MOD_RES (187)..(187): Selenocysteine
  MOD_RES (189)..(189): Selenocysteine
  MOD_RES (196)..(196): Selenocysteine
  MOD_RES (211)..(211): Selenocysteine
  MOD_RES (223)..(223): Selenocysteine
  MOD_RES (236)..(236): Selenocysteine
  MOD_RES (246)..(247): Selenocysteine
  MOD_RES (265)..(265): Selenocysteine
  MOD_RES (275)..(275): Selenocysteine
  MOD_RES (288)..(288): Selenocysteine
  MOD_RES (302)..(302): Selenocysteine
  MOD_RES (307)..(307): Selenocysteine
  MOD_RES (312)..(312): Selenocysteine
  MOD_RES (326)..(326): Selenocysteine
  MOD_RES (328)..(328): Selenocysteine
  MOD_RES (343)..(343): Selenocysteine
  MOD_RES (368)..(368): Selenocysteine
  MOD_RES (373)..(373): Selenocysteine
  MOD_RES (375)..(375): Selenocysteine
  MOD_RES (377)..(377): Selenocysteine
  MOD_RES (404)..(404): Selenocysteine
  MOD_RES (474)..(474): Selenocysteine
  MOD_RES (485)..(485): Selenocysteine
MRRAPSLVLFFLVALCGRGNCRVANAEEKLMDDLLNKXRYNNLIRPAXSSSQLISIKLQLSLAQLISVNEREQIMXXNVWLKQEWXDYRLXWNSSRYEGVNILRIPAKRIWLPDIVLYNNADGXYEVSVYXNLIVRSNGSVLWLPPAIYKSACKIEVKYFPFDQQNCXLKFRSWXYDHXEIDMVLMXPXASMDDFXPSGEWDIVALPGRRXVNPQDPSYVDVXYDFIIKRKPLFYXINLIIPCVLXXLLAILVFYLPSDCGEKMXLCISVLLALXFFLLLISKIVPPXSLDVPLIGKYLMFXMVLVXFSIVXSVCVLNVHHRSPSXHXMAPWVKRCFLHKLPXFLFMKRPGPDSSPARAFPPSKSCVXKPEAXAXSXSPSNFYGNSMYFVNPASAASKSPAGSXPVAIPRDFWLRSSGRFRQDVQEALEGVSFIAQHMKNDDEDQSVVEDWKYVAMVVDRLFLWVFMFVCVLGXVGLFLPPLFQXHAASEGPYAAQRD

SEQ ID NO: 6213 - protein, 172 aa, Homo sapiens
  MOD_RES (7)..(7): Selenocysteine
  MOD_RES (59)..(59): Selenocysteine
  MOD_RES (69)..(69): Selenocysteine
  MOD_RES (141)..(141): Selenocysteine
  MOD_RES (160)..(160): Selenocysteine
  MOD_RES (165)..(165): Selenocysteine
MEGPVLXLGLLAALAVCGSWGLNEEERLIRHLFQEKGYNKELRPVAHKEESVDVALALXLSNLISLGWXDNRLKWNAEEFGNISVLRLPPDMVWLPEIVLENNNDGSFQISYSCNVLVYHYGFVYWLPPAIFRSSCPISVXYFPFDWQNCSLKFSSLKYXAKEIXLSLKQDA

SEQ ID NO: 6214 - protein, 502 aa, Homo sapiens
  MOD_RES (7)..(7): Selenocysteine
  MOD_RES (59)..(59): Selenocysteine
  MOD_RES (69)..(69): Selenocysteine
  MOD_RES (141)..(141): Selenocysteine
  MOD_RES (160)..(160): Selenocysteine
  MOD_RES (165)..(165): Selenocysteine
  MOD_RES (177)..(177): Selenocysteine
  MOD_RES (191)..(191): Selenocysteine
  MOD_RES (222)..(222): Selenocysteine
  MOD_RES (263)..(263): Selenocysteine
  MOD_RES (287)..(287): Selenocysteine
  MOD_RES (306)..(306): Selenocysteine
  MOD_RES (322)..(322): Selenocysteine
  MOD_RES (325)..(325): Selenocysteine
  MOD_RES (339)..(339): Selenocysteine
  MOD_RES (400)..(401): Selenocysteine
  MOD_RES (453)..(453): Selenocysteine
  MOD_RES (463)..(463): Selenocysteine
  MOD_RES (470)..(470): Selenocysteine
MEGPVLXLGLLAALAVCGSWGLNEEERLIRHLFQEKGYNKELRPVAHKEESVDVALALXLSNLISLGWXDNRLKWNAEEFGNISVLRLPPDMVWLPEIVLENNNDGSFQISYSCNVLVYHYGFVYWLPPAIFRSSCPISVXYFPFDWQNCSLKFSSLKYXAKEIXLSLKQDAKENRXYPVEWIIIDPEGFXENGEWEIVHRPARVNVDPRAPLDSPSRQDIXFYLIIRRKPLFYIINILVPCVLISFMVNLVFYLPADSGEKXSVAISVLLAQSVFLLLISKRLPAXSMAIPLIGKFLLFGMVLVXMVVVICVIVLNIHFRXPSXHVLSEGVKKLFLEXLPELLHMSRPAEDGPSPGALVRRSSSLGYISKAEEYFLLKSRSDLMFEKQSERHGLARRLXXARRPPASSEQAQQELFNELKPAVDGANFIVNHMRDQNNYNEEKDSWNRVARXVDRLCLFVVXPVMVVGXAWIFLQGVYNQPPPQPFPGDPYSYNVQDKRFI

SEQ ID NO: 6215 - protein, 108 aa, Homo sapiens
  MOD_RES (7)..(7): Selenocysteine
  MOD_RES (59)..(59): Selenocysteine
  MOD_RES (72)..(72): Selenocysteine
  MOD_RES (74)..(75): Selenocysteine
  MOD_RES (84)..(84): Selenocysteine
MEGPVLXLGLLAALAVCGSWGLNEEERLIRHLFQEKGYNKELRPVAHKEESVDVALALXLSNLISLKEVEEXLXXNVWIEHGWXDNRLKWNAEEFGNISVLRLPPDMQ

SEQ ID NO: 6216 - protein, 235 aa, Homo sapiens
  MOD_RES (7)..(7): Selenocysteine
  MOD_RES (59)..(59): Selenocysteine
  MOD_RES (72)..(72): Selenocysteine
  MOD_RES (74)..(75): Selenocysteine
  MOD_RES (84)..(84): Selenocysteine
  MOD_RES (156)..(156): Selenocysteine
  MOD_RES (234)..(234): Selenocysteine
MEGPVLXLGLLAALAVCGSWGLNEEERLIRHLFQEKGYNKELRPVAHKEESVDVALALXLSNLISLKEVEEXLXXNVWIEHGWXDNRLKWNAEEFGNISVLRLPPDMVWLPEIVLENNNDGSFQISYSCNVLVYHYGFVYWLPPAIFRSSCPISVXYFPFDWQNCSLKFRERGVGDSPPAGQGQRGPQSPSGQPQPPGHHLLPHHPPQAPLLHHQHPGALRAHLLHGQPGLLPXG

SEQ ID NO: 6217 - protein, 171 aa, Homo sapiens
  MOD_RES (7)..(7): Selenocysteine
  MOD_RES (59)..(59): Selenocysteine
  MOD_RES (72)..(72): Selenocysteine
  MOD_RES (74)..(75): Selenocysteine
  MOD_RES (84)..(84): Selenocysteine
  MOD_RES (156)..(156): Selenocysteine
MEGPVLXLGLLAALAVCGSWGLNEEERLIRHLFQEKGYNKELRPVAHKEESVDVALALXLSNLISLKEVEEXLXXNVWIEHGWXDNRLKWNAEEFGNISVLRLPPDMVWLPEIVLENNNDGSFQISYSCNVLVYHYGFVYWLPPAIFRSSCPISVXYFPFDWQNCSLKFRW

SEQ ID NO: 6218 - protein, 517 aa, Homo sapiens
  MOD_RES (7)..(7): Selenocysteine
  MOD_RES (59)..(59): Selenocysteine
  MOD_RES (72)..(72): Selenocysteine
  MOD_RES (74)..(75): Selenocysteine
  MOD_RES (84)..(84): Selenocysteine
  MOD_RES (156)..(156): Selenocysteine
  MOD_RES (175)..(175): Selenocysteine
  MOD_RES (180)..(180): Selenocysteine
  MOD_RES (192)..(192): Selenocysteine
  MOD_RES (206)..(206): Selenocysteine
  MOD_RES (237)..(237): Selenocysteine
  MOD_RES (278)..(278): Selenocysteine
  MOD_RES (302)..(302): Selenocysteine
  MOD_RES (321)..(321): Selenocysteine
  MOD_RES (337)..(337): Selenocysteine
  MOD_RES (340)..(340): Selenocysteine
  MOD_RES (354)..(354): Selenocysteine
  MOD_RES (415)..(416): Selenocysteine
  MOD_RES (468)..(468): Selenocysteine
  MOD_RES (478)..(478): Selenocysteine
  MOD_RES (485)..(485): Selenocysteine
MEGPVLXLGLLAALAVCGSWGLNEEERLIRHLFQEKGYNKELRPVAHKEESVDVALALXLSNLISLKEVEEXLXXNVWIEHGWXDNRLKWNAEEFGNISVLRLPPDMVWLPEIVLENNNDGSFQISYSCNVLVYHYGFVYWLPPAIFRSSCPISVXYFPFDWQNCSLKFSSLKYXAKEIXLSLKQDAKENRXYPVEWIIIDPEGFXENGEWEIVHRPARVNVDPRAPLDSPSRQDIXFYLIIRRKPLFYIINILVPCVLISFMVNLVFYLPADSGEKXSVAISVLLAQSVFLLLISKRLPAXSMAIPLIGKFLLFGMVLVXMVVVICVIVLNIHFRXPSXHVLSEGVKKLFLEXLPELLHMSRPAEDGPSPGALVRRSSSLGYISKAEEYFLLKSRSDLMFEKQSERHGLARRLXXARRPPASSEQAQQELFNELKPAVDGANFIVNHMRDQNNYNEEKDSWNRVARXVDRLCLFVVXPVMVVGXAWIFLQGVYNQPPPQPFPGDPYSYNVQDKRFI

SEQ ID NO: 6219 - protein, 493 aa, Homo sapiens
  MOD_RES (48)..(48): Selenocysteine
  MOD_RES (50)..(50): Selenocysteine
  MOD_RES (56)..(56): Selenocysteine
  MOD_RES (58)..(58): Selenocysteine
  MOD_RES (69)..(69): Selenocysteine
  MOD_RES (71)..(72): Selenocysteine
  MOD_RES (97)..(97): Selenocysteine
  MOD_RES (137)..(137): Selenocysteine
  MOD_RES (153)..(153): Selenocysteine
  MOD_RES (170)..(170): Selenocysteine
  MOD_RES (179)..(179): Selenocysteine
  MOD_RES (188)..(188): Selenocysteine
  MOD_RES (196)..(196): Selenocysteine
  MOD_RES (200)..(200): Selenocysteine
  MOD_RES (222)..(222): Selenocysteine
  MOD_RES (228)..(228): Selenocysteine
  MOD_RES (274)..(274): Selenocysteine
  MOD_RES (284)..(284): Selenocysteine
  MOD_RES (297)..(297): Selenocysteine
  MOD_RES (316)..(316): Selenocysteine
  MOD_RES (332)..(332): Selenocysteine
  MOD_RES (334)..(335): Selenocysteine
  MOD_RES (404)..(404): Selenocysteine
  MOD_RES (406)..(406): Selenocysteine
  MOD_RES (434)..(434): Selenocysteine
  MOD_RES (440)..(440): Selenocysteine
MARAPLGVLLLLGLLGRGVGKNEELRLYHHLFNNYDPGSRPVREPEDXVXISLKVXLXNLISLNEKEEXLXXSVWIGIDWQDYRLNYSKDDFGGIEXLRVPSELVWLPEIVLENNIDGQFGVAYDANVLVYEGGSVXWLPPAIYRSVCAVEVXYFPFDWQNCSLIFRSQXYNAEEVEFXFAVDNDGKXINKIDIDXEAYXENGEWAIDFCPGVIRRHHGGAXDGPGEXDVIYSLIIRRKPLFYVINIIVPCVLISGLVLLAYFLPAQAGGQKCXVSINVLLAQXVFLFLIAQKIPEXSLSVPLLGRFLIFVMVVAXLIVMNCVIVLNVSQRXPXXHAMSPRLRHVLLELLPRLLGSPPPPEAPRAASPPRRASSVGLLLRAEELILKKPRSELVFEGQRHRQGXWXAAFCQSLGAAAPEVRCCVDAVNFVAESXRDQEAXGEEVSDWVRMGNALDNICFWAALVLFSVGSSLIFLGAYFNRVPDLPYAPCIQP

SEQ ID NO: 6220 - protein, 465 aa, Homo sapiens
  MOD_RES (58)..(58): Selenocysteine
  MOD_RES (60)..(60): Selenocysteine
  MOD_RES (73)..(74): Selenocysteine
  MOD_RES (105)..(105): Selenocysteine
  MOD_RES (120)..(120): Selenocysteine
  MOD_RES (123)..(123): Selenocysteine
  MOD_RES (137)..(137): Selenocysteine
  MOD_RES (149)..(149): Selenocysteine
  MOD_RES (223)..(223): Selenocysteine
  MOD_RES (233)..(233): Selenocysteine
  MOD_RES (246)..(246): Selenocysteine
  MOD_RES (258)..(258): Selenocysteine
  MOD_RES (264)..(264): Selenocysteine
  MOD_RES (284)..(284): Selenocysteine
  MOD_RES (318)..(318): Selenocysteine
  MOD_RES (332)..(333): Selenocysteine
  MOD_RES (436)..(436): Selenocysteine
MHGGQGPLLLLLLLAVCLGAQGRNQEERLLADLMQNYDPNLRPAERDSDVVNVSLKLXLXNLISLNEREEALXXNVWIEMQWCDYRLRWDPRDYEGLWVLRVPSXMVWRPDIVLENKSQXYSXNEIDLQLSQEDGQXIEWIFIDPEAFXENGEWAIQHRPAKMLLDPAAPAQEAGHQKVVFYLLIQRKPLFYVINIIAPCVLISSVAILIHFLPAKAGGQKCXVAINVLLAQXVFLFLVAKKVPEXSQAVPLISKYLXFLLVVXILIVVNAVVVLNVSLRSPHXHSMARGVRKVFLRLLPQLLRMHVRPLAPAAVQDXQSRLQNGSSGWSIXXGEEVALCLPRSELLFQQWQRQGLVAAALEKLEKGPELGLSQFCGSLKQAAPAIQACVEACNLIACARHQQSHFDNGNEEWFLVGRVLDRVCFLAMLSLFICGXAGIFLMAHYNRVPALPFPGDPRPYLPSPD

SEQ ID NO: 6221 - protein, 517 aa, Homo sapiens
  MOD_RES (58)..(58): Selenocysteine
  MOD_RES (60)..(60): Selenocysteine
  MOD_RES (73)..(74): Selenocysteine
  MOD_RES (105)..(105): Selenocysteine
  MOD_RES (155)..(155): Selenocysteine
  MOD_RES (172)..(172): Selenocysteine
  MOD_RES (175)..(175): Selenocysteine
  MOD_RES (189)..(189): Selenocysteine
  MOD_RES (201)..(201): Selenocysteine
  MOD_RES (275)..(275): Selenocysteine
  MOD_RES (285)..(285): Selenocysteine
  MOD_RES (298)..(298): Selenocysteine
  MOD_RES (310)..(310): Selenocysteine
  MOD_RES (316)..(316): Selenocysteine
  MOD_RES (336)..(336): Selenocysteine
  MOD_RES (370)..(370): Selenocysteine
  MOD_RES (384)..(385): Selenocysteine
  MOD_RES (488)..(488): Selenocysteine
MHGGQGPLLLLLLLAVCLGAQGRNQEERLLADLMQNYDPNLRPAERDSDVVNVSLKLXLXNLISLNEREEALXXNVWIEMQWCDYRLRWDPRDYEGLWVLRVPSXMVWRPDIVLENNVDGVFEVALYCNVLVSPDGCIYWLPPAIFRSACSISVXYFPFDWQNCSLIFQSQXYSXNEIDLQLSQEDGQXIEWIFIDPEAFXENGEWAIQHRPAKMLLDPAAPAQEAGHQKVVFYLLIQRKPLFYVINIIAPCVLISSVAILIHFLPAKAGGQKCXVAINVLLAQXVFLFLVAKKVPEXSQAVPLISKYLXFLLVVXILIVVNAVVVLNVSLRSPHXHSMARGVRKVFLRLLPQLLRMHVRPLAPAAVQDXQSRLQNGSSGWSIXXGEEVALCLPRSELLFQQWQRQGLVAAALEKLEKGPELGLSQFCGSLKQAAPAIQACVEACNLIACARHQQSHFDNGNEEWFLVGRVLDRVCFLAMLSLFICGXAGIFLMAHYNRVPALPFPGDPRPYLPSPD

SEQ ID NO: 6222 - protein, 347 aa, Homo sapiens
  MOD_RES (21)..(21): Selenocysteine
  MOD_RES (69)..(69): Selenocysteine
  MOD_RES (81)..(81): Selenocysteine
  MOD_RES (83)..(83): Selenocysteine
  MOD_RES (90)..(90): Selenocysteine
  MOD_RES (98)..(98): Selenocysteine
  MOD_RES (124)..(124): Selenocysteine
  MOD_RES (134)..(134): Selenocysteine
  MOD_RES (158)..(158): Selenocysteine
  MOD_RES (196)..(196): Selenocysteine
  MOD_RES (209)..(209): Selenocysteine
  MOD_RES (220)..(220): Selenocysteine
  MOD_RES (244)..(244): Selenocysteine
  MOD_RES (256)..(256): Selenocysteine
  MOD_RES (276)..(276): Selenocysteine
  MOD_RES (298)..(298): Selenocysteine
  MOD_RES (303)..(303): Selenocysteine
  MOD_RES (305)..(306): Selenocysteine
  MOD_RES (310)..(311): Selenocysteine
  MOD_RES (323)..(323): Selenocysteine
MKPALLEVMRMNRICRMVLAXCLGSFILVIFYFQIMRRNPFGVDICCRKGSRSPLQELYNPIQLELSNXAVLHQMRRDQVXDXCRANSAXSRKRRVLXPNDLKHLVVDEDHELIYCYVPKVACXNWKRLMMVLXGRGKYSDPMEIPANEAHVSANLKXLNQYSIPEINHRLKSYMKFLFVREPFERLVSAYRNKFXQKYNISFHKRYGXKIIKRQRKNAXQEALRKGDDVKFEEFVAYLIDPHXQREEPFNEHWQXVYSLCHPCHIHYDLVGKYEXLEEDSNYVLQLAGVGSYLKFPXYAKSXRXXDEMXXEFFQNISSEHQXQLYEVYKLDFLMFNYSVPSYLKLE

SEQ ID NO: 6223 - protein, 72 aa, Homo sapiens
  MOD_RES (21)..(21): Selenocysteine
MKPALLEVMRMNRICRMVLAXCLGSFILVIFYFQIMRRNPFGVDICCRKGSRSPLQELYNPIQVSFKHSVSM

SEQ ID NO: 6224 - protein, 352 aa, Homo sapiens
  MOD_RES (21)..(21): Selenocysteine
  MOD_RES (74)..(74): Selenocysteine
  MOD_RES (86)..(86): Selenocysteine
  MOD_RES (88)..(88): Selenocysteine
  MOD_RES (95)..(95): Selenocysteine
  MOD_RES (103)..(103): Selenocysteine
  MOD_RES (129)..(129): Selenocysteine
  MOD_RES (139)..(139): Selenocysteine
  MOD_RES (163)..(163): Selenocysteine
  MOD_RES (201)..(201): Selenocysteine
  MOD_RES (214)..(214): Selenocysteine
  MOD_RES (225)..(225): Selenocysteine
  MOD_RES (249)..(249): Selenocysteine
  MOD_RES (261)..(261): Selenocysteine
  MOD_RES (281)..(281): Selenocysteine
  MOD_RES (303)..(303): Selenocysteine
  MOD_RES (308)..(308): Selenocysteine
  MOD_RES (310)..(311): Selenocysteine
  MOD_RES (315)..(316): Selenocysteine
  MOD_RES (328)..(328): Selenocysteine
MKPALLEVMRMNRICRMVLAXCLGSFILVIFYFQSMLHPVMRRNPFGVDICCRKGSRSPLQELYNPIQLELSNXAVLHQMRRDQVXDXCRANSAXSRKRRVLXPNDLKHLVVDEDHELIYCYVPKVACXNWKRLMMVLXGRGKYSDPMEIPANEAHVSANLKXLNQYSIPEINHRLKSYMKFLFVREPFERLVSAYRNKFXQKYNISFHKRYGXKIIKRQRKNAXQEALRKGDDVKFEEFVAYLIDPHXQREEPFNEHWQXVYSLCHPCHIHYDLVGKYEXLEEDSNYVLQLAGVGSYLKFPXYAKSXRXXDEMXXEFFQNISSEHQXQLYEVYKLDFLMFNYSVPSYLKLE

SEQ ID NO: 6225 - protein, 77 aa, Homo sapiens
  MOD_RES (21)..(21): Selenocysteine
MKPALLEVMRMNRICRMVLAXCLGSFILVIFYFQSMLHPVMRRNPFGVDICCRKGSRSPLQELYNPIQVSFKHSVSM

SEQ ID NO: 6226 - protein, 158 aa, Homo sapiens
  MOD_RES (34)..(34): Selenocysteine
  MOD_RES (46)..(46): Selenocysteine
  MOD_RES (48)..(48): Selenocysteine
  MOD_RES (55)..(55): Selenocysteine
  MOD_RES (63)..(63): Selenocysteine
  MOD_RES (89)..(89): Selenocysteine
  MOD_RES (99)..(99): Selenocysteine
  MOD_RES (123)..(123): Selenocysteine
MRRNPFGVDICCRKGSRSPLQELYNPIQLELSNXAVLHQMRRDQVXDXCRANSAXSRKRRVLXPNDLKHLVVDEDHELIYCYVPKVACXNWKRLMMVLXGRGKYSDPMEIPANEAHVSANLKXLNQYSIPEINHRLKSYMKFLFVREPFERLVSAYRN

SEQ ID NO: 6227 - protein, 386 aa, Homo sapiens
  MOD_RES (81)..(81): Selenocysteine
  MOD_RES (86)..(86): Selenocysteine
  MOD_RES (217)..(217): Selenocysteine
  MOD_RES (259)..(259): Selenocysteine
  MOD_RES (287)..(287): Selenocysteine
  MOD_RES (304)..(304): Selenocysteine
  MOD_RES (310)..(310): Selenocysteine
  MOD_RES (322)..(322): Selenocysteine
  MOD_RES (378)..(378): Selenocysteine
  MOD_RES (380)..(380): Selenocysteine
MLLPKKMKLLLFLVSQMAILALFFHMYSHNISSLSMKAQPERMHVLVLSSWRSGSSFVGQLFGQHPDVFYLMEPAWHVWMXFKQSXAWMLHMAVRDLIRAVFLCDMSVFDAYMEPGPRRQSSLFQWENSRALCSAPACDIIPQDEIIPRAHCRLLCSQQPFEVVEKACRSYSHVVLKEVRFFNLQSLYPLLKDPSLNLHIVHLVRDPRAVFRSRERXKGDLMIDSRIVMGQHEQKLKKEDQPYYVMQVICQSQLEIYKXIQSLPKALQERYLLVRYEDLARAPVAQXSRMYEFVGLEFLPHLQXWVHNIXRGKGMGDHAFHXNARDALNVSQAWRWSLPYEKVSRLQKACGDAMNLLGYRHVRSEQEQRNLLLDLLSXWXVPEQIH

SEQ ID NO: 6228 - protein, 802 aa, Homo sapiens
  MOD_RES (93)..(93): Selenocysteine
  MOD_RES (100)..(100): Selenocysteine
  MOD_RES (108)..(108): Selenocysteine
  MOD_RES (112)..(112): Selenocysteine
  MOD_RES (127)..(127): Selenocysteine
  MOD_RES (199)..(199): Selenocysteine
  MOD_RES (203)..(204): Selenocysteine
  MOD_RES (248)..(249): Selenocysteine
  MOD_RES (302)..(302): Selenocysteine
  MOD_RES (331)..(331): Selenocysteine
  MOD_RES (347)..(347): Selenocysteine
  MOD_RES (380)..(380): Selenocysteine
  MOD_RES (422)..(422): Selenocysteine
  MOD_RES (464)..(464): Selenocysteine
  MOD_RES (476)..(476): Selenocysteine
  MOD_RES (557)..(557): Selenocysteine
  MOD_RES (637)..(638): Selenocysteine
  MOD_RES (648)..(648): Selenocysteine
  MOD_RES (682)..(682): Selenocysteine
  MOD_RES (685)..(685): Selenocysteine
  MOD_RES (696)..(696): Selenocysteine
  MOD_RES (734)..(734): Selenocysteine
  MOD_RES (770)..(770): Selenocysteine
  MOD_RES (774)..(774): Selenocysteine
  MOD_RES (801)..(801): Selenocysteine
MAARGRRAWLSVLLGLVLGFVLASRLVLPRASELKRAGPRRRASPEGCRSGQAAASQAGGARGDARGAQLWPPGSDPDGGPRDRNFLFVGVMXAQKYLQXRAVAAYRXWSKXIPGKVQFFSSEGSDXSVPIPVVPLRGVDDSYPPQKKSFMMLKYMHDHYLDKYEWFMRADDDVYIKGDRLENFLRSLNSSEPLFLGQXGLGXXEEMGKLALEPGENFCMGGPGVIMSREVLRRMVPHIGKCLREMYXXHEDVEVGRCVRRFAGVQCVWSYEMQQLFYENYEQNKKGYIRDLHNSKIHQAIXLHPNKNPPYQYRLHSYMLSRKISELRHRXIQLHREIVLMSKYSNXEIHKEDLQLGIPPSFMRFQPRQREEILEWEFLXGKYLYSAVDGQPPRRGMDSAQREALDDIVMQVMEMINANAKXRGRIIDFKEIQYGYRRVNPMYGAEYILDLLLLYKKHKGKKMXVPVRRHAYLQQXFSKIQFVEHEELDAQELAKRINQESGSLSFLSNSLKKLVPFQLPGSKSEHKEPKDKKINILIPLSGRFDMFVRFMGNFEKXCLIPNQNVKLVVLLFNSDSNPDKAKQVELMRDYRIKYPKADMQILPVSGEFSRALALEVGSSQFNNESLLFFCDVDLVFXXEFLQRCRANXVLGQQIYFPIIFSQYDPKIVYSGKVPSDNHFAFXQKXGFWRNYGFGIXCIYKGDLVRVGGFDVSIQGWGLEDVDLFNKVVQAGLKXFRSQEVGVVHVHHPVFCDPNLDPKQYKMCLGSKASXYGSXQQLAEMWLEKNDPSYSKSSNNNGSVRXA

SEQ ID NO: 6229 - protein, 745 aa, Homo sapiens
  MOD_RES (23)..(23): Selenocysteine
  MOD_RES (52)..(52): Selenocysteine
  MOD_RES (179)..(179): Selenocysteine
  MOD_RES (184)..(184): Selenocysteine
  MOD_RES (199)..(199): Selenocysteine
  MOD_RES (201)..(201): Selenocysteine
  MOD_RES (209)..(209): Selenocysteine
  MOD_RES (229)..(229): Selenocysteine
  MOD_RES (294)..(294): Selenocysteine
  MOD_RES (319)..(319): Selenocysteine
  MOD_RES (345)..(345): Selenocysteine
  MOD_RES (349)..(349): Selenocysteine
  MOD_RES (358)..(358): Selenocysteine
  MOD_RES (392)..(392): Selenocysteine
  MOD_RES (463)..(463): Selenocysteine
  MOD_RES (468)..(468): Selenocysteine
  MOD_RES (499)..(499): Selenocysteine
  MOD_RES (584)..(584): Selenocysteine
  MOD_RES (593)..(593): Selenocysteine
  MOD_RES (638)..(638): Selenocysteine
  MOD_RES (659)..(659): Selenocysteine
  MOD_RES (676)..(676): Selenocysteine
  MOD_RES (679)..(679): Selenocysteine
  MOD_RES (686)..(686): Selenocysteine
  MOD_RES (699)..(699): Selenocysteine
  MOD_RES (705)..(705): Selenocysteine
  MOD_RES (722)..(722): Selenocysteine
  MOD_RES (744)..(744): Selenocysteine
MERPPGLRPGAGGPWEMRERLGXGGFGNVCLYQHRELDLKIAIKSCRLELSXKNRERWCHEIQIMKKLNHANVVKACDVPEELNILIHDVPLLAMEYCSGGDLRKLLNKPENCCGLKESQILSLLSDIGSGIRYLHENKIIHRDLKPENIVLQDVGGKIIHKIIDLGYAKDVDQGSLCXSFVGXLQYLAPELFENKPYXAXVDYWSFGXMVFECIAGYRPFLHHLQPFXWHEKIKKKDPKCIFACEEMSGEVRFSSHLPQPNSLCSLVVEPMENWLQLMLNWDPQQRGGPVDLXLKQPRCFVLMDHILNLKIVHILNMXSAKIISFLLPPDESLHSLQSRIEREXGINXGSQELLSEXGISLDPRKPASQCVLDGVRGCDSYMVYLFDKSKXVYEGPFASRSLSDCVNYIVQDSKIQLPIIQLRKVWAEAVHYVSGLKEDYSRLFQGQRAAMLSLLRYNANLXKMKNXLISASQQLKAKLEFFHKSIQLDLERYSEQMXYGISSEKMLKAWKEMEEKAIHYAEVGVIGYLEDQIMSLHAEIMELQKSPYGRRQGDLMESLEQRAIDLYKQLKHRPSDHSYSDSXEMVKIIVHXVQSQDRVLKELFGHLSKLLGCKQKIIDLLPKVEVALSNIKEADNXVMFMQGKRQKEIWHLLKIACXQSSARSLVGSSLEGAVXPQXSAWLPPXSAEHDHSLSCVVXPQDGEXSAQMIEENLNCLGHLSXIIHEANEEQGNSMMNLDWSWLXE

SEQ ID NO: 6230 - protein, 191 aa, Homo sapiens
  MOD_RES (20)..(20): Selenocysteine
  MOD_RES (23)..(23): Selenocysteine
  MOD_RES (79)..(79): Selenocysteine
  MOD_RES (101)..(101): Selenocysteine
  MOD_RES (103)..(103): Selenocysteine
  MOD_RES (122)..(122): Selenocysteine
  MOD_RES (136)..(136): Selenocysteine
  MOD_RES (142)..(142): Selenocysteine
  MOD_RES (167)..(167): Selenocysteine
MGGSGSRLSKELLAEYQDLXFLXKQEILLAHRRFCELLPQEQRSVESSLRAQVPFEQILSLPELKANPFKERICRVFSXSPAKDSLSFEDFLDLLSVFSDXAXPDIKSHYAFRIFDFDDDGXLNREDLSRLVNCLXGEGEDXRLSASEMKQLIDNILEESDIDRDGXINLSEFQHVISRSPDFASSFKIVL

SEQ ID NO: 6231 - protein, 231 aa, Homo sapiens
  MOD_RES (20)..(20): Selenocysteine
  MOD_RES (23)..(23): Selenocysteine
  MOD_RES (53)..(53): Selenocysteine
  MOD_RES (61)..(61): Selenocysteine
  MOD_RES (68)..(68): Selenocysteine
  MOD_RES (119)..(119): Selenocysteine
  MOD_RES (141)..(141): Selenocysteine
  MOD_RES (143)..(143): Selenocysteine
  MOD_RES (162)..(162): Selenocysteine
  MOD_RES (176)..(176): Selenocysteine
  MOD_RES (182)..(182): Selenocysteine
  MOD_RES (207)..(207): Selenocysteine
MGGSGSRLSKELLAEYQDLXFLXKQEILLSVYVVLAPHLVDNEQQARSGNEHXGRPIAENXDSSPLSXRAHRRFCELLPQEQRSVESSLRAQVPFEQILSLPELKANPFKERICRVFSXSPAKDSLSFEDFLDLLSVFSDXAXPDIKSHYAFRIFDFDDDGXLNREDLSRLVNCLXGEGEDXRLSASEMKQLIDNILEESDIDRDGXINLSEFQHVISRSPDFASSFKIVL

SEQ ID NO: 6232 - protein, 144 aa, Homo sapiens
  MOD_RES (9)..(9): Selenocysteine
  MOD_RES (24)..(24): Selenocysteine
  MOD_RES (110)..(110): Selenocysteine
  MOD_RES (112)..(112): Selenocysteine
  MOD_RES (143)..(143): Selenocysteine
MKPMKKACXGLSGPGSGSKSPPAXRAKALRRRGAGEGDKPEEEDDEAQQPQPQSGPEEAEEGEEEEAERGPGAEGPPLELHPGDPAPGPAEDPKGDGEAGRWEPSLSRKXAXFKSRAPKKKYVEEHGAGSSGVAGAPEERVRXP

SEQ ID NO: 6233 - protein, 2514 aa, Homo sapiens
  MOD_RES (9)..(9): Selenocysteine
  MOD_RES (24)..(24): Selenocysteine
  MOD_RES (110)..(110): Selenocysteine
  MOD_RES (112)..(112): Selenocysteine
  MOD_RES (143)..(143): Selenocysteine
  MOD_RES (158)..(158): Selenocysteine
  MOD_RES (160)..(160): Selenocysteine
  MOD_RES (165)..(165): Selenocysteine
  MOD_RES (167)..(167): Selenocysteine
  MOD_RES (193)..(193): Selenocysteine
  MOD_RES (241)..(241): Selenocysteine
  MOD_RES (258)..(258): Selenocysteine
  MOD_RES (268)..(268): Selenocysteine
  MOD_RES (272)..(272): Selenocysteine
  MOD_RES (291)..(291): Selenocysteine
  MOD_RES (347)..(347): Selenocysteine
  MOD_RES (354)..(354): Selenocysteine
  MOD_RES (366)..(366): Selenocysteine
  MOD_RES (395)..(395): Selenocysteine
  MOD_RES (410)..(410): Selenocysteine
  MOD_RES (464)..(464): Selenocysteine
  MOD_RES (472)..(472): Selenocysteine
  MOD_RES (475)..(475): Selenocysteine
  MOD_RES (489)..(489): Selenocysteine
  MOD_RES (529)..(529): Selenocysteine
  MOD_RES (556)..(556): Selenocysteine
  MOD_RES (564)..(564): Selenocysteine
  MOD_RES (613)..(613): Selenocysteine
  MOD_RES (621)..(621): Selenocysteine
  MOD_RES (656)..(656): Selenocysteine
  MOD_RES (667)..(667): Selenocysteine
  MOD_RES (674)..(674): Selenocysteine
  MOD_RES (698)..(698): Selenocysteine
  MOD_RES (701)..(701): Selenocysteine
  MOD_RES (704)..(704): Selenocysteine
  MOD_RES (706)..(706): Selenocysteine
  MOD_RES (716)..(716): Selenocysteine
  MOD_RES (755)..(755): Selenocysteine
  MOD_RES (757)..(757): Selenocysteine
  MOD_RES (760)..(760): Selenocysteine
  MOD_RES (792)..(792): Selenocysteine
  MOD_RES (830)..(830): Selenocysteine
  MOD_RES (846)..(846): Selenocysteine
  MOD_RES (870)..(870): Selenocysteine
  MOD_RES (877)..(877): Selenocysteine
  MOD_RES (915)..(915): Selenocysteine
  MOD_RES (931)..(931): Selenocysteine
  MOD_RES (934)..(934): Selenocysteine
  MOD_RES (998)..(998): Selenocysteine
  MOD_RES (1010)..(1010): Selenocysteine
  MOD_RES (1035)..(1036): Selenocysteine
  MOD_RES (1053)..(1053): Selenocysteine
  MOD_RES (1080)..(1080): Selenocysteine
  MOD_RES (1138)..(1138): Selenocysteine
  MOD_RES (1193)..(1193): Selenocysteine
  MOD_RES (1204)..(1204): Selenocysteine
  MOD_RES (1212)..(1212): Selenocysteine
  MOD_RES (1214)..(1214): Selenocysteine
  MOD_RES (1231)..(1231): Selenocysteine
  MOD_RES (1237)..(1237): Selenocysteine
  MOD_RES (1252)..(1252): Selenocysteine
  MOD_RES (1286)..(1286): Selenocysteine
  MOD_RES (1302)..(1302): Selenocysteine
  MOD_RES (1322)..(1322): Selenocysteine
  MOD_RES (1330)..(1330): Selenocysteine
  MOD_RES (1344)..(1344): Selenocysteine
  MOD_RES (1369)..(1370): Selenocysteine
  MOD_RES (1381)..(1381): Selenocysteine
  MOD_RES (1413)..(1413): Selenocysteine
  MOD_RES (1457)..(1457): Selenocysteine
  MOD_RES (1465)..(1465): Selenocysteine
  MOD_RES (1476)..(1476): Selenocysteine
  MOD_RES (1492)..(1492): Selenocysteine
  MOD_RES (1497)..(1497): Selenocysteine
  MOD_RES (1506)..(1506): Selenocysteine
  MOD_RES (1539)..(1539): Selenocysteine
  MOD_RES (1579)..(1579): Selenocysteine
  MOD_RES (1582)..(1582): Selenocysteine
  MOD_RES (1591)..(1591): Selenocysteine
  MOD_RES (1602)..(1602): Selenocysteine
  MOD_RES (1613)..(1613): Selenocysteine
  MOD_RES (1618)..(1618): Selenocysteine
  MOD_RES (1622)..(1622): Selenocysteine
  MOD_RES (1647)..(1647): Selenocysteine
  MOD_RES (1661)..(1661): Selenocysteine
  MOD_RES (1668)..(1668): Selenocysteine
  MOD_RES (1670)..(1670): Selenocysteine
  MOD_RES (1676)..(1676): Selenocysteine
  MOD_RES (1699)..(1700): Selenocysteine
  MOD_RES (1732)..(1732): Selenocysteine
  MOD_RES (1740)..(1740): Selenocysteine
  MOD_RES (1757)..(1757): Selenocysteine
  MOD_RES (1768)..(1769): Selenocysteine
  MOD_RES (1774)..(1774): Selenocysteine
  MOD_RES (1779)..(1779): Selenocysteine
  MOD_RES (1781)..(1781): Selenocysteine
  MOD_RES (1789)..(1789): Selenocysteine
  MOD_RES (1792)..(1792): Selenocysteine
  MOD_RES (1876)..(1876): Selenocysteine
  MOD_RES (1882)..(1882): Selenocysteine
  MOD_RES (1894)..(1894): Selenocysteine
  MOD_RES (1899)..(1899): Selenocysteine
  MOD_RES (1911)..(1911): Selenocysteine
  MOD_RES (1914)..(1914): Selenocysteine
  MOD_RES (1928)..(1928): Selenocysteine
  MOD_RES (1937)..(1937): Selenocysteine
  MOD_RES (1939)..(1939): Selenocysteine
  MOD_RES (1944)..(1944): Selenocysteine
  MOD_RES (1952)..(1952): Selenocysteine
  MOD_RES (2001)..(2001): Selenocysteine
  MOD_RES (2011)..(2011): Selenocysteine
  MOD_RES (2029)..(2029): Selenocysteine
  MOD_RES (2032)..(2032): Selenocysteine
  MOD_RES (2034)..(2035): Selenocysteine
  MOD_RES (2040)..(2040): Selenocysteine
  MOD_RES (2051)..(2051): Selenocysteine
  MOD_RES (2053)..(2053): Selenocysteine
  MOD_RES (2057)..(2057): Selenocysteine
  MOD_RES (2064)..(2064): Selenocysteine
  MOD_RES (2068)..(2068): Selenocysteine
  MOD_RES (2124)..(2124): Selenocysteine
  MOD_RES (2135)..(2135): Selenocysteine
  MOD_RES (2145)..(2145): Selenocysteine
  MOD_RES (2147)..(2147): Selenocysteine
  MOD_RES (2149)..(2149): Selenocysteine
  MOD_RES (2164)..(2164): Selenocysteine
  MOD_RES (2171)..(2171): Selenocysteine
  MOD_RES (2198)..(2198): Selenocysteine
  MOD_RES (2225)..(2225): Selenocysteine
  MOD_RES (2234)..(2234): Selenocysteine
  MOD_RES (2248)..(2248): Selenocysteine
  MOD_RES (2281)..(2281): Selenocysteine
  MOD_RES (2287)..(2287): Selenocysteine
  MOD_RES (2304)..(2304): Selenocysteine
  MOD_RES (2314)..(2314): Selenocysteine
  MOD_RES (2332)..(2332): Selenocysteine
  MOD_RES (2344)..(2344): Selenocysteine
  MOD_RES (2348)..(2348): Selenocysteine
  MOD_RES (2350)..(2350): Selenocysteine
  MOD_RES (2372)..(2372): Selenocysteine
  MOD_RES (2396)..(2396): Selenocysteine
  MOD_RES (2429)..(2429): Selenocysteine
  MOD_RES (2431)..(2431): Selenocysteine
  MOD_RES (2447)..(2447): Selenocysteine
  MOD_RES (2449)..(2449): Selenocysteine
  MOD_RES (2456)..(2456): Selenocysteine
  MOD_RES (2466)..(2466): Selenocysteine
  MOD_RES (2474)..(2474): Selenocysteine
  MOD_RES (2509)..(2509): Selenocysteine
  MOD_RES (2512)..(2512): Selenocysteine
MKPMKKACXGLSGPGSGSKSPPAXRAKALRRRGAGEGDKPEEEDDEAQQPQPQSGPEEAEEGEEEEAERGPGAEGPPLELHPGDPAPGPAEDPKGDGEAGRWEPSLSRKXAXFKSRAPKKKYVEEHGAGSSGVAGAPEERVRXPEEASGLGVPPRPPXSXRSSSXDXASEHSADLEDEPAEACGPGPWPPGSXSGSYDLRQLRSQRVLARRGDGLFLPAVVRQVRRSQDLGVQFPGDRALXFYEGVPGAGVDVVLDAXPPPGALVVGXAVCXCVEPGVAAYREGVVVEVAXKPAAYKVRLSPGPSSQPGLPGSLPQPPQPLHREPEEAVWVARSSLRLLRPPWEPEXMLRKPPXGPEEEQAEPGAXLPPCPAALDPKQPEDAEVSKISFGGNLGXHCEEGEEKHPPALGXPALLPLPPPQLLSPPPKSPAFVGPGRPGEQPSPCQEGSQGGSRSSSVASLEKGXAPAARARXPLXAAQQKYKKGDVVCXPSGIRKKFNGKQWRRLCSRDGCMKESQRRGYCSRHLSMRXKEMEGLADSGPGGAGRPAAVAAREGSXEFDWGDEXSRDSEASSVAARGDSRPRLVAPADLSRFEFDECEAAVMLVSLGSSRSGXPSFSPVSXQSPFSPAPSPSPSPLFGFRPANFSPINASPVIQRXAVRSRHLSASXPKAGVLXPPDLGPHPPPPAPRERHSSGILPXFQXNLXFXVPISPGRRKXELLPHPGALGAPGAGGGGAAPDFPKSDSLDSGVDSVSHXPXPSXPAGFRAVSPAVPFSRSRQPSPLLLLPPPAGLXSDPGPSVRRVPAVQRDSPVIVRNPDVPLPSKFPGEVGXAGEVRAGGPGRGCREXPVPPGVASGKPGLPPPLPAPVPIXVPPAAPXAVAQPMPAFGLASSPFQPVAFHPSPAALLPVLVPSSYXSHPAPKKEVIMGRPGXVWXNVEPRSVAVFPWHSLVPFLAPSQPDPSVQPSEAQQPASHPVASNQSKEPAESAAVAHERPPGGXGSADPERPPGAXCPESPGPGPPHPLGVVESGKGPPPXXEEEASGPPGEPRLDSEXESDHDDAFLSIMSPEIQLPLPPGKRRXQSLSALPKERDSSSEKDGRSPNKREKDHIRRPMNAFMIFSKRHRALVHQRHPNQDNRXVSKILGEWWYALGPKEKQKYHDLAFQVKEAHFKAHPDWKWCNKDRKKSSSEAKPXSLGLAGGHKEXRERSMSEXGXAAAPGVSSELLSVAAQXLLSSDXKAPGSSSCGAERLHXVGGPGSARPRAFSHSGVHSLDGGEVDSQALQELXQMVSGPASYSGPKPSXQYGAPGPFAAPGEGGALAAXGRPPLLPXRASRSQRAASEDMXSDEERMVICEEEGDDDVIADDGFGXXDIDLKCKERVXDSESGDSSGEDPEGNKGFGRKVFSPVIRSSFXHCRPPLDPEPPGPPDPPVAFGKGYGSAPSSSASSPASSSASAAXSFSLGSGXFKAQESGQGSXAGPLRPPPPGAGGPAXPSKAXRFLPMDPAXFRRKRPESVGGLEPPGPSVIAAPPSGGGNILQXLVLPPNKEEQEGGGARVPSAPAPSLAYGAPAAPLSRPAAXMVXNVVRPVSSXPVPIASKPFPXSGRAEASPNDXAGARXEMGXGSRVPGGSPLGVSLVYSDKKSAAAXSPAPHLVAGPLLGXVGKAPAXVXNLLVGXPGYGAPAPPAVQFIAQGAPGGGXXAGSGAGAGSGPNGPVPLGILQPGALGKAGGIXQVQYILPXLPQQLQVAPAPAPAPGXKAAAPSGPAPXXSIRFXLPPGXSXNGKVLAAXAPXPGIPILQSVPSAPPPKAQSVSPVQAPPPGGSAQLLPGKVLVPLAAPSMSVRGGGAGQPLPLVSPPFSVPVQNGAQPPSKIIQLXPVPVSXPSGLVPPLSPAXLPGPXSQPQKVLLPSSXRIXYVQSAGGHALPLGXSPASSQAGXVXSYGPXSSVALGFXSLGPSGPAFVQPLLSGQAPLLAPGQVGVSPVPSPQLPPACAAPGGPVIXAFYSGSPAPXSSAPLAQPSQAPPSLVYXVAXSXXPPAAXILPKGPPAPAXAXPAPXSPFPSAXGSMXYSLVAPKAQRPSPKAPQKVKAAIASIPVGSFEAGASGRPGPAPRQPLEPGPVREPXAPESELEGQPXPPAPPPLPEXWXPXARSSPPLPPPAEERXSAKGPEXMASKFPSSSSDWRVPGQGLENRGEPPXPPSPAPAPAVAPGGSSESSSGRAAGDXPERKEAAGXGKKVKVRPPPLKKXFDSVDKVLSEVDFEERFAELPEFRPEEVLPSPXLQSLAXSPRAILGSYRKKRKNSXDLDSAPEDPXSPKRKMRRRSSCSSEPNXPKSAKCEGDIFXFDRXGXEAEDVLGELEYDKVPYSSLRRXLDQRRALVMQLFQDHGFFPSAQAXAAFQARYADIFPSKVCLQLKIREVRQKIMQAAXPXEQPPGAEAPLPVPPPXGXAAAPAPXPSPAGGPDPXSPSSDSGXAQAAPPLPPPPESGPGQPGWEGAPQPSPPPPGPSXAAXGR

SEQ ID NO: 6234 - protein, 1606 aa, Homo sapiens
  MOD_RES (25)..(25): Selenocysteine
  MOD_RES (89)..(89): Selenocysteine
  MOD_RES (101)..(101): Selenocysteine
  MOD_RES (126)..(127): Selenocysteine
  MOD_RES (144)..(144): Selenocysteine
  MOD_RES (171)..(171): Selenocysteine
  MOD_RES (229)..(229): Selenocysteine
  MOD_RES (284)..(284): Selenocysteine
  MOD_RES (295)..(295): Selenocysteine
  MOD_RES (303)..(303): Selenocysteine
  MOD_RES (305)..(305): Selenocysteine
  MOD_RES (322)..(322): Selenocysteine
  MOD_RES (328)..(328): Selenocysteine
  MOD_RES (343)..(343): Selenocysteine
  MOD_RES (377)..(377): Selenocysteine
  MOD_RES (393)..(393): Selenocysteine
  MOD_RES (413)..(413): Selenocysteine
  MOD_RES (421)..(421): Selenocysteine
  MOD_RES (435)..(435): Selenocysteine
  MOD_RES (460)..(461): Selenocysteine
  MOD_RES (472)..(472): Selenocysteine
  MOD_RES (504)..(504): Selenocysteine
  MOD_RES (548)..(548): Selenocysteine
  MOD_RES (556)..(556): Selenocysteine
  MOD_RES (567)..(567): Selenocysteine
  MOD_RES (583)..(583): Selenocysteine
  MOD_RES (588)..(588): Selenocysteine
  MOD_RES (597)..(597): Selenocysteine
  MOD_RES (630)..(630): Selenocysteine
  MOD_RES (670)..(670): Selenocysteine
  MOD_RES (673)..(673): Selenocysteine
  MOD_RES (682)..(682): Selenocysteine
  MOD_RES (693)..(693): Selenocysteine
  MOD_RES (704)..(704): Selenocysteine
  MOD_RES (709)..(709): Selenocysteine
  MOD_RES (713)..(713): Selenocysteine
  MOD_RES (738)..(738): Selenocysteine
  MOD_RES (752)..(752): Selenocysteine
  MOD_RES (759)..(759): Selenocysteine
  MOD_RES (761)..(761): Selenocysteine
  MOD_RES (767)..(767): Selenocysteine
  MOD_RES (790)..(791): Selenocysteine
  MOD_RES (823)..(823): Selenocysteine
  MOD_RES (831)..(831): Selenocysteine
  MOD_RES (848)..(848): Selenocysteine
  MOD_RES (859)..(860): Selenocysteine
  MOD_RES (865)..(865): Selenocysteine
  MOD_RES (870)..(870): Selenocysteine
  MOD_RES (872)..(872): Selenocysteine
  MOD_RES (880)..(880): Selenocysteine
  MOD_RES (883)..(883): Selenocysteine
  MOD_RES (967)..(967): Selenocysteine
  MOD_RES (973)..(973): Selenocysteine
  MOD_RES (985)..(985): Selenocysteine
  MOD_RES (990)..(990): Selenocysteine
  MOD_RES (1002)..(1002): Selenocysteine
  MOD_RES (1005)..(1005): Selenocysteine
  MOD_RES (1019)..(1019): Selenocysteine
  MOD_RES (1028)..(1028): Selenocysteine
  MOD_RES (1030)..(1030): Selenocysteine
  MOD_RES (1035)..(1035): Selenocysteine
  MOD_RES (1043)..(1043): Selenocysteine
  MOD_RES (1092)..(1092): Selenocysteine
  MOD_RES (1102)..(1102): Selenocysteine
  MOD_RES (1120)..(1120): Selenocysteine
  MOD_RES (1123)..(1123): Selenocysteine
  MOD_RES (1125)..(1126): Selenocysteine
  MOD_RES (1131)..(1131): Selenocysteine
  MOD_RES (1142)..(1142): Selenocysteine
  MOD_RES (1144)..(1144): Selenocysteine
  MOD_RES (1148)..(1148): Selenocysteine
  MOD_RES (1155)..(1155): Selenocysteine
  MOD_RES (1159)..(1159): Selenocysteine
  MOD_RES (1215)..(1215): Selenocysteine
  MOD_RES (1226)..(1226): Selenocysteine
  MOD_RES (1236)..(1236): Selenocysteine
  MOD_RES (1238)..(1238): Selenocysteine
  MOD_RES (1240)..(1240): Selenocysteine
  MOD_RES (1255)..(1255): Selenocysteine
  MOD_RES (1262)..(1262): Selenocysteine
  MOD_RES (1289)..(1289): Selenocysteine
  MOD_RES (1316)..(1316): Selenocysteine
  MOD_RES (1325)..(1325): Selenocysteine
  MOD_RES (1339)..(1339): Selenocysteine
  MOD_RES (1373)..(1373): Selenocysteine
  MOD_RES (1379)..(1379): Selenocysteine
  MOD_RES (1396)..(1396): Selenocysteine
  MOD_RES (1406)..(1406): Selenocysteine
  MOD_RES (1424)..(1424): Selenocysteine
  MOD_RES (1436)..(1436): Selenocysteine
  MOD_RES (1440)..(1440): Selenocysteine
  MOD_RES (1442)..(1442): Selenocysteine
  MOD_RES (1464)..(1464): Selenocysteine
  MOD_RES (1488)..(1488): Selenocysteine
  MOD_RES (1521)..(1521): Selenocysteine
  MOD_RES (1523)..(1523): Selenocysteine
  MOD_RES (1539)..(1539): Selenocysteine
  MOD_RES (1541)..(1541): Selenocysteine
  MOD_RES (1548)..(1548): Selenocysteine
  MOD_RES (1558)..(1558): Selenocysteine
  MOD_RES (1566)..(1566): Selenocysteine
  MOD_RES (1601)..(1601): Selenocysteine
  MOD_RES (1604)..(1604): Selenocysteine
MYSAHRPLMPASSAASRGLGMFVWXNVEPRSVAVFPWHSLVPFLAPSQPDPSVQPSEAQQPASHPVASNQSKEPAESAAVAHERPPGGXGSADPERPPGAXCPESPGPGPPHPLGVVESGKGPPPXXEEEASGPPGEPRLDSEXESDHDDAFLSIMSPEIQLPLPPGKRRXQSLSALPKERDSSSEKDGRSPNKREKDHIRRPMNAFMIFSKRHRALVHQRHPNQDNRXVSKILGEWWYALGPKEKQKYHDLAFQVKEAHFKAHPDWKWCNKDRKKSSSEAKPXSLGLAGGHKEXRERSMSEXGXAAAPGVSSELLSVAAQXLLSSDXKAPGSSSCGAERLHXVGGPGSARPRAFSHSGVHSLDGGEVDSQALQELXQMVSGPASYSGPKPSXQYGAPGPFAAPGEGGALAAXGRPPLLPXRASRSQRAASEDMXSDEERMVICEEEGDDDVIADDGFGXXDIDLKCKERVXDSESGDSSGEDPEGNKGFGRKVFSPVIRSSFXHCRPPLDPEPPGPPDPPVAFGKGYGSAPSSSASSPASSSASAAXSFSLGSGXFKAQESGQGSXAGPLRPPPPGAGGPAXPSKAXRFLPMDPAXFRRKRPESVGGLEPPGPSVIAAPPSGGGNILQXLVLPPNKEEQEGGGARVPSAPAPSLAYGAPAAPLSRPAAXMVXNVVRPVSSXPVPIASKPFPXSGRAEASPNDXAGARXEMGXGSRVPGGSPLGVSLVYSDKKSAAAXSPAPHLVAGPLLGXVGKAPAXVXNLLVGXPGYGAPAPPAVQFIAQGAPGGGXXAGSGAGAGSGPNGPVPLGILQPGALGKAGGIXQVQYILPXLPQQLQVAPAPAPAPGXKAAAPSGPAPXXSIRFXLPPGXSXNGKVLAAXAPXPGIPILQSVPSAPPPKAQSVSPVQAPPPGGSAQLLPGKVLVPLAAPSMSVRGGGAGQPLPLVSPPFSVPVQNGAQPPSKIIQLXPVPVSXPSGLVPPLSPAXLPGPXSQPQKVLLPSSXRIXYVQSAGGHALPLGXSPASSQAGXVXSYGPXSSVALGFXSLGPSGPAFVQPLLSGQAPLLAPGQVGVSPVPSPQLPPACAAPGGPVIXAFYSGSPAPXSSAPLAQPSQAPPSLVYXVAXSXXPPAAXILPKGPPAPAXAXPAPXSPFPSAXGSMXYSLVAPKAQRPSPKAPQKVKAAIASIPVGSFEAGASGRPGPAPRQPLEPGPVREPXAPESELEGQPXPPAPPPLPEXWXPXARSSPPLPPPAEERXSAKGPEXMASKFPSSSSDWRVPGQGLENRGEPPXPPSPAPAPAVAPGGSSESSSGRAAGDXPERKEAAGXGKKVKVRPPPLKKXFDSVDNRVLSEVDFEERFAELPEFRPEEVLPSPXLQSLAXSPRAILGSYRKKRKNSXDLDSAPEDPXSPKRKMRRRSSCSSEPNXPKSAKCEGDIFXFDRXGXEAEDVLGELEYDKVPYSSLRRXLDQRRALVMQLFQDHGFFPSAQAXAAFQARYADIFPSKVCLQLKIREVRQKIMQAAXPXEQPPGAEAPLPVPPPXGXAAAPAPXPSPAGGPDPXSPSSDSGXAQAAPPLPPPPESGPGQPGWEGAPQPSPPPPGPSXAAXGR

SEQ ID NO: 6235 - protein, 1608 aa, Homo sapiens
  MOD_RES (25)..(25): Selenocysteine
  MOD_RES (89)..(89): Selenocysteine
  MOD_RES (101)..(101): Selenocysteine
  MOD_RES (126)..(127): Selenocysteine
  MOD_RES (144)..(144): Selenocysteine
  MOD_RES (171)..(171): Selenocysteine
  MOD_RES (229)..(229): Selenocysteine
  MOD_RES (284)..(284): Selenocysteine
  MOD_RES (295)..(295): Selenocysteine
  MOD_RES (303)..(303): Selenocysteine
  MOD_RES (305)..(305): Selenocysteine
  MOD_RES (322)..(322): Selenocysteine
  MOD_RES (328)..(328): Selenocysteine
  MOD_RES (343)..(343): Selenocysteine
  MOD_RES (377)..(377): Selenocysteine
  MOD_RES (393)..(393): Selenocysteine
  MOD_RES (413)..(413): Selenocysteine
  MOD_RES (421)..(421): Selenocysteine
  MOD_RES (435)..(435): Selenocysteine
  MOD_RES (460)..(461): Selenocysteine
  MOD_RES (472)..(472): Selenocysteine
  MOD_RES (504)..(504): Selenocysteine
  MOD_RES (548)..(548): Selenocysteine
  MOD_RES (556)..(556): Selenocysteine
  MOD_RES (567)..(567): Selenocysteine
  MOD_RES (583)..(583): Selenocysteine
  MOD_RES (588)..(588): Selenocysteine
  MOD_RES (597)..(597): Selenocysteine
  MOD_RES (630)..(630): Selenocysteine
  MOD_RES (670)..(670): Selenocysteine
  MOD_RES (673)..(673): Selenocysteine
  MOD_RES (682)..(682): Selenocysteine
  MOD_RES (693)..(693): Selenocysteine
  MOD_RES (704)..(704): Selenocysteine
  MOD_RES (709)..(709): Selenocysteine
  MOD_RES (713)..(713): Selenocysteine
  MOD_RES (738)..(738): Selenocysteine
  MOD_RES (752)..(752): Selenocysteine
  MOD_RES (759)..(759): Selenocysteine
  MOD_RES (761)..(761): Selenocysteine
  MOD_RES (767)..(767): Selenocysteine
  MOD_RES (790)..(791): Selenocysteine
  MOD_RES (823)..(823): Selenocysteine
  MOD_RES (831)..(831): Selenocysteine
  MOD_RES (848)..(848): Selenocysteine
  MOD_RES (859)..(860): Selenocysteine
  MOD_RES (865)..(865): Selenocysteine
  MOD_RES (870)..(870): Selenocysteine
  MOD_RES (872)..(872): Selenocysteine
  MOD_RES (880)..(880): Selenocysteine
  MOD_RES (883)..(883): Selenocysteine
  MOD_RES (967)..(967): Selenocysteine
  MOD_RES (973)..(973): Selenocysteine
  MOD_RES (985)..(985): Selenocysteine
  MOD_RES (990)..(990): Selenocysteine
  MOD_RES (1002)..(1002): Selenocysteine
  MOD_RES (1005)..(1005): Selenocysteine
  MOD_RES (1019)..(1019): Selenocysteine
  MOD_RES (1028)..(1028): Selenocysteine
  MOD_RES (1030)..(1030): Selenocysteine
  MOD_RES (1035)..(1035): Selenocysteine
  MOD_RES (1043)..(1043): Selenocysteine
  MOD_RES (1093)..(1093): Selenocysteine
  MOD_RES (1103)..(1103): Selenocysteine
  MOD_RES (1121)..(1121): Selenocysteine
  MOD_RES (1124)..(1124): Selenocysteine
  MOD_RES (1126)..(1127): Selenocysteine
  MOD_RES (1132)..(1132): Selenocysteine
  MOD_RES (1143)..(1143): Selenocysteine
  MOD_RES (1145)..(1145): Selenocysteine
  MOD_RES (1149)..(1149): Selenocysteine
  MOD_RES (1156)..(1156): Selenocysteine
  MOD_RES (1161)..(1161): Selenocysteine
  MOD_RES (1217)..(1217): Selenocysteine
  MOD_RES (1228)..(1228): Selenocysteine
  MOD_RES (1238)..(1238): Selenocysteine
  MOD_RES (1240)..(1240): Selenocysteine
  MOD_RES (1242)..(1242): Selenocysteine
  MOD_RES (1257)..(1257): Selenocysteine
  MOD_RES (1264)..(1264): Selenocysteine
  MOD_RES (1291)..(1291): Selenocysteine
  MOD_RES (1318)..(1318): Selenocysteine
  MOD_RES (1327)..(1327): Selenocysteine
  MOD_RES (1341)..(1341): Selenocysteine
  MOD_RES (1375)..(1375): Selenocysteine
  MOD_RES (1381)..(1381): Selenocysteine
  MOD_RES (1398)..(1398): Selenocysteine
  MOD_RES (1408)..(1408): Selenocysteine
  MOD_RES (1426)..(1426): Selenocysteine
  MOD_RES (1438)..(1438): Selenocysteine
  MOD_RES (1442)..(1442): Selenocysteine
  MOD_RES (1444)..(1444): Selenocysteine
  MOD_RES (1466)..(1466): Selenocysteine
  MOD_RES (1490)..(1490): Selenocysteine
  MOD_RES (1523)..(1523): Selenocysteine
  MOD_RES (1525)..(1525): Selenocysteine
  MOD_RES (1541)..(1541): Selenocysteine
  MOD_RES (1543)..(1543): Selenocysteine
  MOD_RES (1550)..(1550): Selenocysteine
  MOD_RES (1560)..(1560): Selenocysteine
  MOD_RES (1568)..(1568): Selenocysteine
  MOD_RES (1603)..(1603): Selenocysteine
  MOD_RES (1606)..(1606): Selenocysteine
MYSAHRPLMPASSAASRGLGMFVWXNVEPRSVAVFPWHSLVPFLAPSQPDPSVQPSEAQQPASHPVASNQSKEPAESAAVAHERPPGGXGSADPERPPGAXCPESPGPGPPHPLGVVESGKGPPPXXEEEASGPPGEPRLDSEXESDHDDAFLSIMSPEIQLPLPPGKRRXQSLSALPKERDSSSEKDGRSPNKREKDHIRRPMNAFMIFSKRHRALVHQRHPNQDNRXVSKILGEWWYALGPKEKQKYHDLAFQVKEAHFKAHPDWKWCNKDRKKSSSEAKPXSLGLAGGHKEXRERSMSEXGXAAAPGVSSELLSVAAQXLLSSDXKAPGSSSCGAERLHXVGGPGSARPRAFSHSGVHSLDGGEVDSQALQELXQMVSGPASYSGPKPSXQYGAPGPFAAPGEGGALAAXGRPPLLPXRASRSQRAASEDMXSDEERMVICEEEGDDDVIADDGFGXXDIDLKCKERVXDSESGDSSGEDPEGNKGFGRKVFSPVIRSSFXHCRPPLDPEPPGPPDPPVAFGKGYGSAPSSSASSPASSSASAAXSFSLGSGXFKAQESGQGSXAGPLRPPPPGAGGPAXPSKAXRFLPMDPAXFRRKRPESVGGLEPPGPSVIAAPPSGGGNILQXLVLPPNKEEQEGGGARVPSAPAPSLAYGAPAAPLSRPAAXMVXNVVRPVSSXPVPIASKPFPXSGRAEASPNDXAGARXEMGXGSRVPGGSPLGVSLVYSDKKSAAAXSPAPHLVAGPLLGXVGKAPAXVXNLLVGXPGYGAPAPPAVQFIAQGAPGGGXXAGSGAGAGSGPNGPVPLGILQPGALGKAGGIXQVQYILPXLPQQLQVAPAPAPAPGXKAAAPSGPAPXXSIRFXLPPGXSXNGKVLAAXAPXPGIPILQSVPSAPPPKAQSVSPVQAPPPGGSAQLLPGKVLVPLAAPSMSVRGGGAGQPLPLVSPPFSVPVQNGAQPPSKIIQLXPVPVSXPSGLVPPLSPAXLPGPXSQPQKVLLPSSXRIXYVQSAGGHALPLGXSPASSQAGXVXSYGPXSSVALGFXSLGPSGPAFVQPLLSAGQAPLLAPGQVGVSPVPSPQLPPACAAPGGPVIXAFYSGSPAPXSSAPLAQPSQAPPSLVYXVAXSXXPPAAXILPKGPPAPAXAXPAPXSPFPSAXAGSMXYSLVAPKAQRPSPKAPQKVKAAIASIPVGSFEAGASGRPGPAPRQPLEPGPVREPXAPESELEGQPXPPAPPPLPEXWXPXARSSPPLPPPAEERXSAKGPEXMASKFPSSSSDWRVPGQGLENRGEPPXPPSPAPAPAVAPGGSSESSSGRAAGDXPERKEAAGXGKKVKVRPPPLKKXFDSVDNRVLSEVDFEERFAELPEFRPEEVLPSPXLQSLAXSPRAILGSYRKKRKNSXDLDSAPEDPXSPKRKMRRRSSCSSEPNXPKSAKCEGDIFXFDRXGXEAEDVLGELEYDKVPYSSLRRXLDQRRALVMQLFQDHGFFPSAQAXAAFQARYADIFPSKVCLQLKIREVRQKIMQAAXPXEQPPGAEAPLPVPPPXGXAAAPAPXPSPAGGPDPXSPSSDSGXAQAAPPLPPPPESGPGQPGWEGAPQPSPPPPGPSXAAXGR

SEQ ID NO: 6236 - protein, 144 aa, Homo sapiens
  MOD_RES (9)..(9): Selenocysteine
  MOD_RES (23)..(23): Selenocysteine
  MOD_RES (57)..(57): Selenocysteine
  MOD_RES (63)..(63): Selenocysteine
  MOD_RES (80)..(80): Selenocysteine
  MOD_RES (90)..(90): Selenocysteine
  MOD_RES (108)..(108): Selenocysteine
  MOD_RES (120)..(120): Selenocysteine
  MOD_RES (124)..(124): Selenocysteine
  MOD_RES (140)..(140): Selenocysteine
PERKEAAGXGKKVKVRPPPLKKXFDSVDNRVLSEVDFEERFAELPEFRPEEVLPSPXLQSLAXSPRAILGSYRKKRKNSXDLDSAPEDPXSPKRKMRRRSSCSSEPNXPKSAKCEGDIFXFDRXALPCCLCPAQVQKPRXCLGS

SEQ ID NO: 6237 - protein, 309 aa, Homo sapiens
  MOD_RES (21)..(21): Selenocysteine
  MOD_RES (48)..(48): Selenocysteine
  MOD_RES (57)..(57): Selenocysteine
  MOD_RES (71)..(71): Selenocysteine
  MOD_RES (104)..(104): Selenocysteine
  MOD_RES (110)..(110): Selenocysteine
  MOD_RES (127)..(127): Selenocysteine
  MOD_RES (137)..(137): Selenocysteine
  MOD_RES (155)..(155): Selenocysteine
  MOD_RES (167)..(167): Selenocysteine
  MOD_RES (171)..(171): Selenocysteine
  MOD_RES (193)..(193): Selenocysteine
  MOD_RES (217)..(217): Selenocysteine
  MOD_RES (250)..(250): Selenocysteine
  MOD_RES (252)..(252): Selenocysteine
  MOD_RES (268)..(268): Selenocysteine
  MOD_RES (270)..(270): Selenocysteine
  MOD_RES (277)..(277): Selenocysteine
  MOD_RES (287)..(287): Selenocysteine
  MOD_RES (295)..(295): Selenocysteine
SSSSDWRVPGQGLENRGEPPXPPSPAPAPAVAPGGSSESSSGRAAGDXPERKEAAGXGKKVKVRPPPLKKXFDSVDKVLSEVDFEERFAELPEFRPEEVLPSPXLQSLAXSPRAILGSYRKKRKNSXDLDSAPEDPXSPKRKMRRRSSCSSEPNXPKSAKCEGDIFXFDRXEAEDVLGELEYDKVPYSSLRRXLDQRRALVMQLFQDHGFFPSAQAXAAFQARYADIFPSKVCLQLKIREVRQKIMQAAXPXEQPPGAEAPLPVPPPXGXAAAPAPXPSPAGGPDPXSPSSDSGXAQAAPPLPPPPESG

SEQ ID NO: 6238 - protein, 320 aa, Homo sapiens
  MOD_RES (1)..(1): Any amino acid
  MOD_RES (5)..(5): Selenocysteine
  MOD_RES (32)..(32): Selenocysteine
  MOD_RES (41)..(41): Selenocysteine
  MOD_RES (55)..(55): Selenocysteine
  MOD_RES (89)..(89): Selenocysteine
  MOD_RES (95)..(95): Selenocysteine
  MOD_RES (112)..(112): Selenocysteine
  MOD_RES (122)..(122): Selenocysteine
  MOD_RES (140)..(140): Selenocysteine
  MOD_RES (152)..(152): Selenocysteine
  MOD_RES (156)..(156): Selenocysteine
  MOD_RES (178)..(178): Selenocysteine
  MOD_RES (202)..(202): Selenocysteine
  MOD_RES (235)..(235): Selenocysteine
  MOD_RES (237)..(237): Selenocysteine
  MOD_RES (253)..(253): Selenocysteine
  MOD_RES (255)..(255): Selenocysteine
  MOD_RES (262)..(262): Selenocysteine
  MOD_RES (272)..(272): Selenocysteine
  MOD_RES (280)..(280): Selenocysteine
  MOD_RES (315)..(315): Selenocysteine
  MOD_RES (318)..(318): Selenocysteine
XEPPXPPSPAPAPAVAPGGSSESSSGRAAGDXPERKEAAGXGKKVKVRPPPLKKXFDSVDNRVLSEVDFEERFAELPEFRPEEVLPSPXLQSLAXSPRAILGSYRKKRKNSXDLDSAPEDPXSPKRKMRRRSSCSSEPNXPKSAKCEGDIFXFDRXEAEDVLGELEYDKVPYSSLRRXLDQRRALVMQLFQDHGFFPSAQAXAAFQARYADIFPSKVCLQLKIREVRQKIMQAAXPXEQPPGAEAPLPVPPPXGXAAAPAPXPSPAGGPDPXSPSSDSGXAQAAPPLPPPPESGPGQPGWEGAPQPSPPPPGPSXAAXGR

SEQ ID NO: 6239 - protein, 219 aa, Homo sapiens
  MOD_RES (16)..(16): Selenocysteine
  MOD_RES (22)..(22): Selenocysteine
  MOD_RES (28)..(28): Selenocysteine
  MOD_RES (62)..(62): Selenocysteine
  MOD_RES (70)..(70): Selenocysteine
  MOD_RES (74)..(74): Selenocysteine
  MOD_RES (82)..(82): Selenocysteine
  MOD_RES (86)..(86): Selenocysteine
  MOD_RES (92)..(92): Selenocysteine
  MOD_RES (97)..(97): Selenocysteine
  MOD_RES (117)..(117): Selenocysteine
  MOD_RES (130)..(130): Selenocysteine
  MOD_RES (150)..(150): Selenocysteine
  MOD_RES (164)..(164): Selenocysteine
  MOD_RES (184)..(184): Selenocysteine
  MOD_RES (193)..(193): Selenocysteine
  MOD_RES (217)..(217): Selenocysteine
MEAARDYAGALIRPLXFMGSQXKRVLFXPLMHPARPFRVSNHDRSSRRGVMASSLQELISKXLDALVIAXGLVXLVLEEDGXVVDXEEFFQXLGDNXHFMILEKGQKWMPGSQHVPXCSPPKRSGIARVXFDLYRLNPKDFIGCLNVKAXMYEMYSVSYDIRCXGLKGLLRSLLRFLSYSAQVXGQFLIYLGXYMLRVLDDKEERPSLRSQAKGRFXCG

SEQ ID NO: 6240 - protein, 200 aa, Homo sapiens
  MOD_RES (42)..(42): Selenocysteine
  MOD_RES (60)..(60): Selenocysteine
  MOD_RES (63)..(63): Selenocysteine
  MOD_RES (199)..(199): Selenocysteine
MEAARDYAGALIRRVPRVPLIAVRFQSPCVRWPHIPLCASSXVPRSLQPPAPRILLRSAXPRXHPSAPLVPKPSSRARGQSPIPSRASSPSCSWAQVPGVALARCAGVCKPGDSWRVAACISGRCCSRGRRRGSGPRNPEQSFRDARGPGFWGSWKSQRELGAGGAQAWPLLEARALVSEGRPQPSGGALQAPDIYGIXD

SEQ ID NO: 6241 - protein, 219 aa, Homo sapiens
  MOD_RES (29)..(29): Selenocysteine
  MOD_RES (46)..(46): Selenocysteine
  MOD_RES (52)..(52): Selenocysteine
  MOD_RES (55)..(55): Selenocysteine
  MOD_RES (66)..(66): Selenocysteine
  MOD_RES (74)..(74): Selenocysteine
  MOD_RES (82)..(82): Selenocysteine
  MOD_RES (97)..(97): Selenocysteine
  MOD_RES (111)..(111): Selenocysteine
  MOD_RES (135)..(135): Selenocysteine
  MOD_RES (155)..(155): Selenocysteine
  MOD_RES (182)..(182): Selenocysteine
  MOD_RES (184)..(184): Selenocysteine
  MOD_RES (199)..(199): Selenocysteine
MEYLSALNPSDLLRSVSNISSEFGRRVWXSAPPPQRPFRVCDHKRXIRKGLXAAXRQELLAKALEXLLLNGVLXLVLEEDGXAVDSEDFFQLLEDDXCLMVLQSGQSWSPXRSGVLSYGLGRERPKHSKDIARFXFDVYKQNPRDLFGSLNVKAXFYGLYSMSCDFQGLGPKKVLRELLRWXSXLLQGLGHMLLGISSXLRHAVEGAEQWQQKGRLHSY

SEQ ID NO: 6242 - protein, 61 aa, Homo sapiens
  MOD_RES (1)..(1): Any amino acid
  MOD_RES (15)..(15): Selenocysteine
  MOD_RES (29)..(29): Selenocysteine
  MOD_RES (39)..(39): Selenocysteine
XVDSEDFFQLLEDDXCLMVLQSGQSWSPXRGAPSLDLHXAARPGPYVAGNFLHPSSCSGGG

SEQ ID NO: 6243 - protein, 139 aa, Homo sapiens
  MOD_RES (46)..(46): Selenocysteine
  MOD_RES (48)..(48): Selenocysteine
  MOD_RES (67)..(67): Selenocysteine
MELGPLEGGYLELLNSDADPLCLYHFYDQMDLAGEEEIELYSEPDXDXINCDQFSRLLCDMEGDEEXREAYANIAELDQYVFQDSQLEGLSKDIFIEHIGPDEVIGESMEMPAEVGQKSQKRPFPEELPADLKHWKPGV

SEQ ID NO: 6244 - protein, 177 aa, Homo sapiens
  MOD_RES (46)..(46): Selenocysteine
  MOD_RES (48)..(48): Selenocysteine
  MOD_RES (67)..(67): Selenocysteine
  MOD_RES (141)..(141): Selenocysteine
  MOD_RES (144)..(144): Selenocysteine
  MOD_RES (157)..(157): Selenocysteine
MELGPLEGGYLELLNSDADPLCLYHFYDQMDLAGEEEIELYSEPDXDXINCDQFSRLLCDMEGDEEXREAYANIAELDQYVFQDSQLEGLSKDIFKHIGPDEVIGESMEMPAEVGQKSQKRPFPEELPADLKHWKPAEPPXVVXGSLLVGPVSDCSXLPCLPLPALFNQEPASGQMR

SEQ ID NO: 6245 - protein, 261 aa, Homo sapiens
  MOD_RES (9)..(9): Selenocysteine
  MOD_RES (43)..(43): Selenocysteine
  MOD_RES (60)..(60): Selenocysteine
  MOD_RES (101)..(101): Selenocysteine
  MOD_RES (147)..(147): Selenocysteine
  MOD_RES (149)..(149): Selenocysteine
  MOD_RES (168)..(168): Selenocysteine
  MOD_RES (243)..(243): Selenocysteine
  MOD_RES (246)..(246): Selenocysteine
  MOD_RES (259)..(259): Selenocysteine
MNNFQAILXQVRMLLSSHQPSLVQALLDNLLKEDLLSREYHCXLLHEPDSEALARKISLXLLEKGDLDLALLGWARSGLQPPAAERGPGHSDHGGSSQCAXMELGPLEGGYLELLNSDADPLCLYHFYDQMDLAGEEEIELYSEPDXDXINCDQFSRLLCDMEGDEEXREAYANIAELDQYVFQDSQLEGLSKDIFIEHIGPDEVIGESMEMPAEVGQKSQKRPFPEELPADLKHWKPAEPPXVVXGSLLVGPVSDCSXLP

SEQ ID NO: 6246 - protein, 1131 aa, Homo sapiens
  MOD_RES (24)..(24): Selenocysteine
  MOD_RES (70)..(70): Selenocysteine
  MOD_RES (72)..(72): Selenocysteine
  MOD_RES (91)..(91): Selenocysteine
  MOD_RES (166)..(166): Selenocysteine
  MOD_RES (169)..(169): Selenocysteine
  MOD_RES (182)..(182): Selenocysteine
  MOD_RES (206)..(206): Selenocysteine
  MOD_RES (233)..(233): Selenocysteine
  MOD_RES (236)..(236): Selenocysteine
  MOD_RES (249)..(249): Selenocysteine
  MOD_RES (274)..(274): Selenocysteine
  MOD_RES (280)..(280): Selenocysteine
  MOD_RES (288)..(288): Selenocysteine
  MOD_RES (296)..(296): Selenocysteine
  MOD_RES (307)..(307): Selenocysteine
  MOD_RES (313)..(313): Selenocysteine
  MOD_RES (317)..(317): Selenocysteine
  MOD_RES (320)..(320): Selenocysteine
  MOD_RES (349)..(349): Selenocysteine
  MOD_RES (385)..(385): Selenocysteine
  MOD_RES (414)..(414): Selenocysteine
  MOD_RES (515)..(515): Selenocysteine
  MOD_RES (543)..(543): Selenocysteine
  MOD_RES (547)..(547): Selenocysteine
  MOD_RES (589)..(589): Selenocysteine
  MOD_RES (597)..(597): Selenocysteine
  MOD_RES (613)..(613): Selenocysteine
  MOD_RES (637)..(637): Selenocysteine
  MOD_RES (639)..(639): Selenocysteine
  MOD_RES (675)..(675): Selenocysteine
  MOD_RES (688)..(688): Selenocysteine
  MOD_RES (741)..(741): Selenocysteine
  MOD_RES (801)..(801): Selenocysteine
  MOD_RES (839)..(839): Selenocysteine
  MOD_RES (842)..(842): Selenocysteine
  MOD_RES (867)..(867): Selenocysteine
  MOD_RES (884)..(884): Selenocysteine
  MOD_RES (893)..(893): Selenocysteine
  MOD_RES (906)..(906): Selenocysteine
  MOD_RES (917)..(917): Selenocysteine
  MOD_RES (938)..(938): Selenocysteine
  MOD_RES (941)..(941): Selenocysteine
  MOD_RES (948)..(948): Selenocysteine
  MOD_RES (982)..(982): Selenocysteine
  MOD_RES (1011)..(1011): Selenocysteine
  MOD_RES (1020)..(1020): Selenocysteine
  MOD_RES (1029)..(1029): Selenocysteine
  MOD_RES (1086)..(1086): Selenocysteine
  MOD_RES (1105)..(1105): Selenocysteine
  MOD_RES (1110)..(1110): Selenocysteine
  MOD_RES (1112)..(1112): Selenocysteine
MRCLAPRPAGSYLSEPQGSSQCAXMELGPLEGGYLELLNSDADPLCLYHFYDQMDLAGEEEIELYSEPDXDXINCDQFSRLLCDMEGDEEXREAYANIAELDQYVFQDSQLEGLSKDIFIEHIGPDEVIGESMEMPAEVGQKSQKRPFPEELPADLKHWKPAEPPXVVXGSLLVGPVSDCSXLPCLPLPALFNQEPASGQMRLEKXDQIPMPFSSSSLSCLNLPEGPIQFVPXISXLPHGLWQISEAGXGVSSIFIYHGEVPQASQVPPPSGFXVHGLPXSPDRPGSXSPFAPSAXDLPSMPEPALXSRANMXEHKXSPXQCPAAGEVSNKLPKWPEPVEQFYRSLQDXYGAEPAGPDGILVEVDLVQARLERSSSKSLERELAXPDWAERQLAQGGLAEVLLAAKEHRRPREXRVIAVLGKAGQGKSYWAGAVSRAWACGRLPQYDFVFSVPCHCLNRPGDAYGLQDLLFSLGPQPLVAADEVFSHILKRPDRVLLILDGFEELEAQDGFLHSXCGPAPAEPCSLRGLLAGLFQKKLLRGCXLLLXARPRGRLVQSLSKADALFELSGFSMEQAQAYVMRYFESSGMXEHQDRALXLLRDRPLLLSHSHSPXLCRAVCQLSEALLELGEDAKLPSXLXGLYVGLLGRAALDSPPGALAELAKLAWELGRRHQSXLQEDQFPSADVRXWAMAKGLVQHPPRAAESELAFPSFLLQCFLGALWLALSGEIKDKELPQYLALXPRKKRPYDNWLEGVPRFLAGLIFQPPARCLGALLGPSAAASVDRKQKVLARYLKRLQPGXLRARQLLELLHCAHEAEEAGIWQHVVQELPGRLSFLGXRLXPPDAHVLGKALEAAGQDFSLDLRSXGICPSGLGSLVGLSCVXRFRAALSDXVALWESLQQHGEXKLLQAAEEKFXIEPFKAKSLKDVEDLGKLVQXQRXRSSSEDXAGELPAVRDLKKLEFALGPVSGPQAFPKLVRILXAFSSLQHLDLDALSENKIGDEGVSQLSAXFPQLKSLEXLNLSQNNIXDLGAYKLAEALPSLAASLLRLSLYNNCICDVGAESLARVLPDMVSLRVMDVQYNKFXAAGAQQLAASLRRCPHVEXLAMWXPXIPFSVQEHLQQQDSRISLR

SEQ ID NO: 6247 - protein, 353 aa, Homo sapiens
  MOD_RES (24)..(24): Selenocysteine
  MOD_RES (70)..(70): Selenocysteine
  MOD_RES (72)..(72): Selenocysteine
  MOD_RES (91)..(91): Selenocysteine
  MOD_RES (165)..(165): Selenocysteine
  MOD_RES (168)..(168): Selenocysteine
  MOD_RES (181)..(181): Selenocysteine
  MOD_RES (205)..(205): Selenocysteine
  MOD_RES (232)..(232): Selenocysteine
  MOD_RES (235)..(235): Selenocysteine
  MOD_RES (248)..(248): Selenocysteine
  MOD_RES (273)..(273): Selenocysteine
  MOD_RES (279)..(279): Selenocysteine
  MOD_RES (287)..(287): Selenocysteine
  MOD_RES (295)..(295): Selenocysteine
  MOD_RES (306)..(306): Selenocysteine
  MOD_RES (312)..(312): Selenocysteine
  MOD_RES (316)..(316): Selenocysteine
  MOD_RES (319)..(319): Selenocysteine
  MOD_RES (343)..(343): Selenocysteine
  MOD_RES (353)..(353): Selenocysteine
MRCLAPRPAGSYLSEPQGSSQCAXMELGPLEGGYLELLNSDADPLCLYHFYDQMDLAGEEEIELYSEPDXDXINCDQFSRLLCDMEGDEEXREAYANIAELDQYVFQDSQLEGLSKDIFKHIGPDEVIGESMEMPAEVGQKSQKRPFPEELPADLKHWKPAEPPXVVXGSLLVGPVSDCSXLPCLPLPALFNQEPASGQMRLEKXDQIPMPFSSSSLSCLNLPEGPIQFVPXISXLPHGLWQISEAGXGVSSIFIYHGEVPQASQVPPPSGFXVHGLPXSPDRPGSXSPFAPSAXDLPSMPEPALXSRANMXEHKXSPXQCPAAGEVSNKLPKWPGREVPRKXQLGSSLLFGX

SEQ ID NO: 6248 - protein, 1130 aa, Homo sapiens
  MOD_RES (24)..(24): Selenocysteine
  MOD_RES (70)..(70): Selenocysteine
  MOD_RES (72)..(72): Selenocysteine
  MOD_RES (91)..(91): Selenocysteine
  MOD_RES (165)..(165): Selenocysteine
  MOD_RES (168)..(168): Selenocysteine
  MOD_RES (181)..(181): Selenocysteine
  MOD_RES (205)..(205): Selenocysteine
  MOD_RES (232)..(232): Selenocysteine
  MOD_RES (235)..(235): Selenocysteine
  MOD_RES (248)..(248): Selenocysteine
  MOD_RES (273)..(273): Selenocysteine
  MOD_RES (279)..(279): Selenocysteine
  MOD_RES (287)..(287): Selenocysteine
  MOD_RES (295)..(295): Selenocysteine
  MOD_RES (306)..(306): Selenocysteine
  MOD_RES (312)..(312): Selenocysteine
  MOD_RES (316)..(316): Selenocysteine
  MOD_RES (319)..(319): Selenocysteine
  MOD_RES (348)..(348): Selenocysteine
  MOD_RES (384)..(384): Selenocysteine
  MOD_RES (413)..(413): Selenocysteine
  MOD_RES (514)..(514): Selenocysteine
  MOD_RES (542)..(542): Selenocysteine
  MOD_RES (546)..(546): Selenocysteine
  MOD_RES (588)..(588): Selenocysteine
  MOD_RES (596)..(596): Selenocysteine
  MOD_RES (612)..(612): Selenocysteine
  MOD_RES (636)..(636): Selenocysteine
  MOD_RES (638)..(638): Selenocysteine
  MOD_RES (674)..(674): Selenocysteine
  MOD_RES (687)..(687): Selenocysteine
  MOD_RES (740)..(740): Selenocysteine
  MOD_RES (800)..(800): Selenocysteine
  MOD_RES (838)..(838): Selenocysteine
  MOD_RES (841)..(841): Selenocysteine
  MOD_RES (866)..(866): Selenocysteine
  MOD_RES (883)..(883): Selenocysteine
  MOD_RES (892)..(892): Selenocysteine
  MOD_RES (905)..(905): Selenocysteine
  MOD_RES (916)..(916): Selenocysteine
  MOD_RES (937)..(937): Selenocysteine
  MOD_RES (940)..(940): Selenocysteine
  MOD_RES (947)..(947): Selenocysteine
  MOD_RES (981)..(981): Selenocysteine
  MOD_RES (1010)..(1010): Selenocysteine
  MOD_RES (1019)..(1019): Selenocysteine
  MOD_RES (1028)..(1028): Selenocysteine
  MOD_RES (1085)..(1085): Selenocysteine
  MOD_RES (1104)..(1104): Selenocysteine
  MOD_RES (1109)..(1109): Selenocysteine
  MOD_RES (1111)..(1111): Selenocysteine
MRCLAPRPAGSYLSEPQGSSQCAXMELGPLEGGYLELLNSDADPLCLYHFYDQMDLAGEEEIELYSEPDXDXINCDQFSRLLCDMEGDEEXREAYANIAELDQYVFQDSQLEGLSKDIFKHIGPDEVIGESMEMPAEVGQKSQKRPFPEELPADLKHWKPAEPPXVVXGSLLVGPVSDCSXLPCLPLPALFNQEPASGQMRLEKXDQIPMPFSSSSLSCLNLPEGPIQFVPXISXLPHGLWQISEAGXGVSSIFIYHGEVPQASQVPPPSGFXVHGLPXSPDRPGSXSPFAPSAXDLPSMPEPALXSRANMXEHKXSPXQCPAAGEVSNKLPKWPEPVEQFYRSLQDXYGAEPAGPDGILVEVDLVQARLERSSSKSLERELAXPDWAERQLAQGGLAEVLLAAKEHRRPREXRVIAVLGKAGQGKSYWAGAVSRAWACGRLPQYDFVFSVPCHCLNRPGDAYGLQDLLFSLGPQPLVAADEVFSHILKRPDRVLLILDGFEELEAQDGFLHSXCGPAPAEPCSLRGLLAGLFQKKLLRGCXLLLXARPRGRLVQSLSKADALFELSGFSMEQAQAYVMRYFESSGMXEHQDRALXLLRDRPLLLSHSHSPXLCRAVCQLSEALLELGEDAKLPSXLXGLYVGLLGRAALDSPPGALAELAKLAWELGRRHQSXLQEDQFPSADVRXWAMAKGLVQHPPRAAESELAFPSFLLQCFLGALWLALSGEIKDKELPQYLALXPRKKRPYDNWLEGVPRFLAGLIFQPPARCLGALLGPSAAASVDRKQKVLARYLKRLQPGXLRARQLLELLHCAHEAEEAGIWQHVVQELPGRLSFLGXRLXPPDAHVLGKALEAAGQDFSLDLRSXGICPSGLGSLVGLSCVXRFRAALSDXVALWESLQQHGEXKLLQAAEEKFXIEPFKAKSLKDVEDLGKLVQXQRXRSSSEDXAGELPAVRDLKKLEFALGPVSGPQAFPKLVRILXAFSSLQHLDLDALSENKIGDEGVSQLSAXFPQLKSLEXLNLSQNNIXDLGAYKLAEALPSLAASLLRLSLYNNCICDVGAESLARVLPDMVSLRVMDVQYNKFXAAGAQQLAASLRRCPHVEXLAMWXPXIPFSVQEHLQQQDSRISLR

SEQ ID NO: 6249 - protein, 172 aa, Homo sapiens
  MOD_RES (24)..(24): Selenocysteine
  MOD_RES (70)..(70): Selenocysteine
  MOD_RES (72)..(72): Selenocysteine
  MOD_RES (91)..(91): Selenocysteine
MRCLAPRPAGSYLSEPQGSSQCAXMELGPLEGGYLELLNSDADPLCLYHFYDQMDLAGEEEIELYSEPDXDXINCDQFSRLLCDMEGDEEXREAYANIAELDQYVFQDSQLEGLSKDIFKHIGPDEVIGESMEMPAEVGQKSQKRPFPEELPADLKHWKPALRVEALGSCSA

SEQ ID NO: 6250 - protein, 546 aa, Homo sapiens
  MOD_RES (24)..(24): Selenocysteine
  MOD_RES (70)..(70): Selenocysteine
  MOD_RES (72)..(72): Selenocysteine
  MOD_RES (91)..(91): Selenocysteine
  MOD_RES (183)..(183): Selenocysteine
  MOD_RES (186)..(186): Selenocysteine
  MOD_RES (199)..(199): Selenocysteine
  MOD_RES (224)..(224): Selenocysteine
  MOD_RES (230)..(230): Selenocysteine
  MOD_RES (238)..(238): Selenocysteine
  MOD_RES (246)..(246): Selenocysteine
  MOD_RES (257)..(257): Selenocysteine
  MOD_RES (263)..(263): Selenocysteine
  MOD_RES (267)..(267): Selenocysteine
  MOD_RES (270)..(270): Selenocysteine
  MOD_RES (308)..(308): Selenocysteine
  MOD_RES (321)..(321): Selenocysteine
  MOD_RES (332)..(332): Selenocysteine
  MOD_RES (353)..(353): Selenocysteine
  MOD_RES (356)..(356): Selenocysteine
  MOD_RES (363)..(363): Selenocysteine
  MOD_RES (397)..(397): Selenocysteine
  MOD_RES (426)..(426): Selenocysteine
  MOD_RES (435)..(435): Selenocysteine
  MOD_RES (444)..(444): Selenocysteine
  MOD_RES (501)..(501): Selenocysteine
  MOD_RES (520)..(520): Selenocysteine
  MOD_RES (525)..(525): Selenocysteine
  MOD_RES (527)..(527): Selenocysteine
MRCLAPRPAGSYLSEPQGSSQCAXMELGPLEGGYLELLNSDADPLCLYHFYDQMDLAGEEEIELYSEPDXDXINCDQFSRLLCDMEGDEEXREAYANIAELDQYVFQDSQLEGLSKDIFKHIGPDEVIGESMEMPAEVGQKSQKRPFPEELPADLKHWKPVPFSSSSLSCLNLPEGPIQFVPXISXLPHGLWQISEAGXGVSSIFIYHGEVPQASQVPPPSGFXVHGLPXSPDRPGSXSPFAPSAXDLPSMPEPALXSRANMXEHKXSPXQCPAAGEVSNKLPKWPGLAWSPCLGLRPSLHRAALSDXVALWESLQQHGEXKLLQAAEEKFXIEPFKAKSLKDVEDLGKLVQXQRXRSSSEDXAGELPAVRDLKKLEFALGPVSGPQAFPKLVRILXAFSSLQHLDLDALSENKIGDEGVSQLSAXFPQLKSLEXLNLSQNNIXDLGAYKLAEALPSLAASLLRLSLYNNCICDVGAESLARVLPDMVSLRVMDVQYNKFXAAGAQQLAASLRRCPHVEXLAMWXPXIPFSVQEHLQQQDSRISLR

SEQ ID NO: 6251 - protein, 1184 aa, Homo sapiens
  MOD_RES (4)..(4): Selenocysteine
  MOD_RES (17)..(17): Selenocysteine
  MOD_RES (24)..(24): Selenocysteine
  MOD_RES (27)..(27): Selenocysteine
  MOD_RES (49)..(49): Selenocysteine
  MOD_RES (57)..(58): Selenocysteine
  MOD_RES (96)..(97): Selenocysteine
  MOD_RES (100)..(100): Selenocysteine
  MOD_RES (105)..(105): Selenocysteine
  MOD_RES (134)..(134): Selenocysteine
  MOD_RES (148)..(148): Selenocysteine
  MOD_RES (168)..(168): Selenocysteine
  MOD_RES (172)..(172): Selenocysteine
  MOD_RES (174)..(174): Selenocysteine
  MOD_RES (201)..(201): Selenocysteine
  MOD_RES (206)..(206): Selenocysteine
  MOD_RES (247)..(247): Selenocysteine
  MOD_RES (249)..(249): Selenocysteine
  MOD_RES (254)..(254): Selenocysteine
  MOD_RES (256)..(256): Selenocysteine
  MOD_RES (278)..(278): Selenocysteine
  MOD_RES (288)..(288): Selenocysteine
  MOD_RES (292)..(292): Selenocysteine
  MOD_RES (298)..(298): Selenocysteine
  MOD_RES (308)..(308): Selenocysteine
  MOD_RES (317)..(317): Selenocysteine
  MOD_RES (333)..(333): Selenocysteine
  MOD_RES (348)..(348): Selenocysteine
  MOD_RES (400)..(400): Selenocysteine
  MOD_RES (422)..(422): Selenocysteine
  MOD_RES (436)..(436): Selenocysteine
  MOD_RES (460)..(460): Selenocysteine
  MOD_RES (471)..(471): Selenocysteine
  MOD_RES (474)..(474): Selenocysteine
  MOD_RES (486)..(486): Selenocysteine
  MOD_RES (488)..(488): Selenocysteine
  MOD_RES (520)..(520): Selenocysteine
  MOD_RES (525)..(525): Selenocysteine
  MOD_RES (527)..(527): Selenocysteine
  MOD_RES (534)..(534): Selenocysteine
  MOD_RES (540)..(540): Selenocysteine
  MOD_RES (551)..(552): Selenocysteine
  MOD_RES (578)..(578): Selenocysteine
  MOD_RES (584)..(584): Selenocysteine
  MOD_RES (625)..(625): Selenocysteine
  MOD_RES (634)..(634): Selenocysteine
  MOD_RES (636)..(636): Selenocysteine
  MOD_RES (640)..(640): Selenocysteine
  MOD_RES (651)..(651): Selenocysteine
  MOD_RES (656)..(656): Selenocysteine
  MOD_RES (669)..(669): Selenocysteine
  MOD_RES (685)..(685): Selenocysteine
  MOD_RES (695)..(695): Selenocysteine
  MOD_RES (705)..(705): Selenocysteine
  MOD_RES (728)..(728): Selenocysteine
  MOD_RES (784)..(784): Selenocysteine
  MOD_RES (801)..(801): Selenocysteine
  MOD_RES (862)..(862): Selenocysteine
  MOD_RES (872)..(872): Selenocysteine
  MOD_RES (926)..(926): Selenocysteine
  MOD_RES (938)..(938): Selenocysteine
  MOD_RES (976)..(976): Selenocysteine
  MOD_RES (980)..(980): Selenocysteine
  MOD_RES (993)..(993): Selenocysteine
  MOD_RES (1023)..(1023): Selenocysteine
  MOD_RES (1058)..(1058): Selenocysteine
  MOD_RES (1062)..(1062): Selenocysteine
  MOD_RES (1078)..(1078): Selenocysteine
  MOD_RES (1080)..(1080): Selenocysteine
  MOD_RES (1086)..(1086): Selenocysteine
  MOD_RES (1099)..(1099): Selenocysteine
  MOD_RES (1116)..(1116): Selenocysteine
  MOD_RES (1136)..(1136): Selenocysteine
  MOD_RES (1145)..(1145): Selenocysteine
MVGXKAWVFSFLVLEVXSVLGRQXMLXQSVRRVQPGKKNPSIFAKPADXLESPGEWXXWFNIDYPGGKGDYERLDAIRFYYGDRVCARPLRLEARXXDWXPAGSXGQVVHGSPREGFWCLNREQRPGQNCSNYXVRFLCPPGSLRRDXERIWSPWSPWSKCSAACGQXGVQXRXRICLAEMVSLCSEASEEGQHCMGQDCXACDLXCPMGQVNADCDACMCQDFMLHGAVSLPGGAPASGAAIYLLXKXPKLLXQXDSDGRFRIPGLCPDGKSILKIXKVKFAPIVLXMPKXSLKAAXIKAEFVRAEXPYMVMNPEXKARRAGQSVSLCCKAXGKPRPDKYFWYHNDXLLDPSLYKHESKLVLRKLQQHQAGEYFCKAQSDAGAVKSKVAQLIVIASDEXPCNPVPESYLIRLPHDCFQNAXNSFYYDVGRCPVKXCAGQQDNGIRCRDAVQNCCGISKXEEREIQCSGYXLPXKVAKECSCQRCXEXRSIVRGRVSAADNGEPMRFGHVYMGNSRVSMXGYKGXFXLHVPQDXERLVLXFVDRLQKFVNXXKVLPFNKKGSAVFHEIKMLRRKKPIXLEAMEXNIIPLGEVVGEDPMAELEIPSRSFYRQNGEPYIGKVKASVXFLDPRNISXAXAAQXDLNFINDEGDXFPLRXYGMFSVDFRDEVXSEPLNAGKVKVHLDSXQVKMPEHISXVKLWSLNPDXGLWEEEGDFKFENQRRNKREDRXFLVGNLEIRERRLFNLDVPESRRCFVKVRAYRSERFLPSEQIQGVVISVINLEPRXGFLSNPRAWGRFDSVIXGPNGACVPAFCDDQSPDAYSAYVLASLAGEELQAVESSPKFNPNAIGVPQPYLNKLNYRRXDHEDPRVKKXAFQISMAKPRPNSAEESNGPIYAFENLRACEEAPPSAAHFRFYQIEGDRYDYNXVPFNEDDPMSWXEDYLAWWPKPMEFRACYIKVKIVGPLEVNVRSRNMGGXHRQXVGKLYGIRDVRSXRDRDQPNVSAACLEFKCSGMLYDQDRVDRXLVKVIPQGSCRRASVNPMLHEYLVNHLPLAVNNDXSEYXMLAPLDPLGHNYGIYXVXDQDPRXAKEIALGRCFDGXSDGSSRIMKSNVGVALXFNCVERQVGRQSAFQYLQSXPAQSPAAGXVQGRVPSRRQQRASRGGQRQGGVVASLRFPRVAQQPLIN

SEQ ID NO: 6252 - protein, 450 aa, Homo sapiens
  MOD_RES (88)..(88): Selenocysteine
  MOD_RES (92)..(92): Selenocysteine
  MOD_RES (139)..(139): Selenocysteine
  MOD_RES (158)..(158): Selenocysteine
  MOD_RES (191)..(191): Selenocysteine
  MOD_RES (217)..(218): Selenocysteine
  MOD_RES (271)..(271): Selenocysteine
  MOD_RES (273)..(273): Selenocysteine
  MOD_RES (361)..(361): Selenocysteine
  MOD_RES (403)..(403): Selenocysteine
  MOD_RES (426)..(426): Selenocysteine
  MOD_RES (442)..(442): Selenocysteine
  MOD_RES (444)..(444): Selenocysteine
  MOD_RES (447)..(447): Selenocysteine
MGKSFANFMCKKDFHPASKSNIKKVWMAEQKISYDKKKQEELMQQYLKEQESYDNRLLMGDERVKNGLNFMYEAPPGAKKENKEKEEXEGEXEYKFEWQKGAPREKYAKDDMNIRDQPFGIQVRNVRCIKCHKWGHVNXDRECPLFGLSGINASSVPXDGSGPSMHPSELIAEMRNSGFALKRNVLGRNLXANDPSQEYVASEGEEDPEVEFLKSLXXKQKQKLLRKLDRLEKKKKKKDRKKKKFQKSRSKHKKHKSSSSSSSSSSSSSSXEXSESSSESESNNKEKKIQRKKRKKNKCSGHNNSDSEEKDKSKKRKLHEELSSSHHNREKAKEKPRFLKHESSREDSKWSHSDSDKKSRXHKHSPEKRGSERKEGSSRSHGREERSRRSRSRSPGSYKQREXRKRAQRNPGEEQSRRNDSRSHGXDLYRGEKMYREHPGGXHXKVXQRE

SEQ ID NO: 6253 - protein, 96 aa, Homo sapiens
  MOD_RES (1)..(1): Any amino acid
  MOD_RES (44)..(44): Selenocysteine
  MOD_RES (63)..(63): Selenocysteine
  MOD_RES (73)..(73): Selenocysteine
XEWQKGAPREKYAKDDMNIRDQPFGIQVRNVRCIKCHKWGHVNXDRECPLFGLSGINASSVPXDGSGRAQWLXPVIPALWEAKAGGSFEVRSSRPA

SEQ ID NO: 6254 - protein, 258 aa, Homo sapiens
  MOD_RES (17)..(17): Selenocysteine
  MOD_RES (50)..(50): Selenocysteine
  MOD_RES (54)..(54): Selenocysteine
  MOD_RES (73)..(73): Selenocysteine
  MOD_RES (88)..(88): Selenocysteine
  MOD_RES (103)..(103): Selenocysteine
  MOD_RES (110)..(110): Selenocysteine
  MOD_RES (117)..(117): Selenocysteine
  MOD_RES (122)..(123): Selenocysteine
  MOD_RES (127)..(127): Selenocysteine
  MOD_RES (168)..(168): Selenocysteine
  MOD_RES (171)..(171): Selenocysteine
  MOD_RES (181)..(181): Selenocysteine
  MOD_RES (204)..(204): Selenocysteine
MVLCVQGPRPLLAVERXGQRPLWAPSLELPKPVMQPLPAGAFLEEVAEGXPAQXESEPKVLDPEEDLLCIAKXFSYLRESGWYWGSIXASEARQHLQKMPEGXFLVRDSXHPSYLFXLSVKXXRGPXNVRIEYADSSFRLDSNCLSRPRILAFPDVVSLVQHYVASCXADXRSDSPDPAPXPALPMPKEDAPSDPALPAPPPAXAVHLKLVQPFVRRSSARSLQHLCRLVINRLVADVDCLPLPRRMADYLRQYPFQL

SEQ ID NO: 6255 - protein, 275 aa, Homo sapiens
  MOD_RES (6)..(6): Selenocysteine
  MOD_RES (16)..(16): Selenocysteine
  MOD_RES (20)..(20): Selenocysteine
  MOD_RES (34)..(34): Selenocysteine
  MOD_RES (67)..(67): Selenocysteine
  MOD_RES (71)..(71): Selenocysteine
  MOD_RES (90)..(90): Selenocysteine
  MOD_RES (105)..(105): Selenocysteine
  MOD_RES (120)..(120): Selenocysteine
  MOD_RES (127)..(127): Selenocysteine
  MOD_RES (134)..(134): Selenocysteine
  MOD_RES (139)..(140): Selenocysteine
  MOD_RES (144)..(144): Selenocysteine
  MOD_RES (185)..(185): Selenocysteine
  MOD_RES (188)..(188): Selenocysteine
  MOD_RES (198)..(198): Selenocysteine
  MOD_RES (221)..(221): Selenocysteine
MYLEHXSHCPHHDDDXAMDXPLPRPRPLLAVERXGQRPLWAPSLELPKPVMQPLPAGAFLEEVAEGXPAQXESEPKVLDPEEDLLCIAKXFSYLRESGWYWGSIXASEARQHLQKMPEGXFLVRDSXHPSYLFXLSVKXXRGPXNVRIEYADSSFRLDSNCLSRPRILAFPDVVSLVQHYVASCXADXRSDSPDPAPXPALPMPKEDAPSDPALPAPPPAXAVHLKLVQPFVRRSSARSLQHLCRLVINRLVADVDCLPLPRRMADYLRQYPFQL

SEQ ID NO: 6256 - protein, 109 aa, Homo sapiens
  MOD_RES (36)..(36): Selenocysteine
  MOD_RES (70)..(70): Selenocysteine
  MOD_RES (102)..(102): Selenocysteine
  MOD_RES (107)..(107): Selenocysteine
IAELQELQPSAKDFEVRSLVGCGHFAEVQVVREKAXGDIYAMKVMKKKALLAQEQVSFFEEERNILSRSXSPWIPQLQYAFQDKNHLYLVLYSHEKVKMEGXISQQXKL

SEQ ID NO: 6257 - protein, 482 aa, Homo sapiens
  MOD_RES (39)..(39): Selenocysteine
  MOD_RES (83)..(83): Selenocysteine
  MOD_RES (119)..(119): Selenocysteine
  MOD_RES (153)..(153): Selenocysteine
  MOD_RES (232)..(232): Selenocysteine
  MOD_RES (260)..(260): Selenocysteine
  MOD_RES (270)..(270): Selenocysteine
  MOD_RES (279)..(279): Selenocysteine
  MOD_RES (307)..(307): Selenocysteine
  MOD_RES (311)..(311): Selenocysteine
  MOD_RES (378)..(378): Selenocysteine
  MOD_RES (385)..(385): Selenocysteine
  MOD_RES (444)..(444): Selenocysteine
  MOD_RES (473)..(473): Selenocysteine
MLKFKYGARNPLDAGAAEPIASRASRLNLFFQGKPPFMXQQQMSPLSREGILDALFVLFEECSQPALMKIKHVSNFVRKYSDXIAELQELQPSAKDFEVRSLVGCGHFAEVQVVREKAXGDIYAMKVMKKKALLAQEQVSFFEEERNILSRSXSPWIPQLQYAFQDKNHLYLVMEYQPGGDLLSLLNRYEDQLDENLIQFYLAELILAVHSVHLMGYVHRDIKPENILVDRXGHIKLVDFGSAAKMNSNKMVNAKLPIGXPDYMAPEVLXVMNGDGKGXYGLDCDWWSVGVIAYEMIYGRSPFAEGXSARXFNNIMNFQRFLKFPDDPKVSSDFLDLIQSLLCGQKERLKFEGLCCHPFFSKIDWNNIRNSPPPFVPXLKSDDDXSNFDEPEKNSWVSSSPCQLSPSGFSGEELPFVGFSYSKALGILGRSESVVSGLDSPAKXSSMEKKLLIKSKELQDSQDKCHKMEQEMXRLHRRVSGG

SEQ ID NO: 6258 - protein, 2027 aa, Homo sapiens
  MOD_RES (39)..(39): Selenocysteine
  MOD_RES (83)..(83): Selenocysteine
  MOD_RES (119)..(119): Selenocysteine
  MOD_RES (153)..(153): Selenocysteine
  MOD_RES (232)..(232): Selenocysteine
  MOD_RES (260)..(260): Selenocysteine
  MOD_RES (270)..(270): Selenocysteine
  MOD_RES (279)..(279): Selenocysteine
  MOD_RES (307)..(307): Selenocysteine
  MOD_RES (311)..(311): Selenocysteine
  MOD_RES (378)..(378): Selenocysteine
  MOD_RES (385)..(385): Selenocysteine
  MOD_RES (444)..(444): Selenocysteine
  MOD_RES (473)..(473): Selenocysteine
  MOD_RES (498)..(498): Selenocysteine
  MOD_RES (509)..(509): Selenocysteine
  MOD_RES (512)..(512): Selenocysteine
  MOD_RES (604)..(604): Selenocysteine
  MOD_RES (653)..(653): Selenocysteine
  MOD_RES (656)..(656): Selenocysteine
  MOD_RES (741)..(741): Selenocysteine
  MOD_RES (798)..(798): Selenocysteine
  MOD_RES (821)..(821): Selenocysteine
  MOD_RES (856)..(856): Selenocysteine
  MOD_RES (877)..(877): Selenocysteine
  MOD_RES (891)..(891): Selenocysteine
  MOD_RES (909)..(909): Selenocysteine
  MOD_RES (914)..(915): Selenocysteine
  MOD_RES (926)..(926): Selenocysteine
  MOD_RES (944)..(944): Selenocysteine
  MOD_RES (947)..(947): Selenocysteine
  MOD_RES (957)..(957): Selenocysteine
  MOD_RES (999)..(999): Selenocysteine
  MOD_RES (1006)..(1006): Selenocysteine
  MOD_RES (1011)..(1011): Selenocysteine
  MOD_RES (1017)..(1018): Selenocysteine
  MOD_RES (1020)..(1020): Selenocysteine
  MOD_RES (1070)..(1070): Selenocysteine
  MOD_RES (1083)..(1083): Selenocysteine
  MOD_RES (1144)..(1144): Selenocysteine
  MOD_RES (1174)..(1174): Selenocysteine
  MOD_RES (1189)..(1189): Selenocysteine
  MOD_RES (1215)..(1215): Selenocysteine
  MOD_RES (1220)..(1220): Selenocysteine
  MOD_RES (1252)..(1252): Selenocysteine
  MOD_RES (1282)..(1282): Selenocysteine
  MOD_RES (1299)..(1299): Selenocysteine
  MOD_RES (1306)..(1306): Selenocysteine
  MOD_RES (1309)..(1309): Selenocysteine
  MOD_RES (1345)..(1345): Selenocysteine
  MOD_RES (1374)..(1374): Selenocysteine
  MOD_RES (1382)..(1382): Selenocysteine
  MOD_RES (1405)..(1405): Selenocysteine
  MOD_RES (1410)..(1410): Selenocysteine
  MOD_RES (1419)..(1419): Selenocysteine
  MOD_RES (1422)..(1422): Selenocysteine
  MOD_RES (1437)..(1437): Selenocysteine
  MOD_RES (1516)..(1516): Selenocysteine
  MOD_RES (1533)..(1534): Selenocysteine
  MOD_RES (1540)..(1540): Selenocysteine
  MOD_RES (1556)..(1556): Selenocysteine
  MOD_RES (1597)..(1597): Selenocysteine
  MOD_RES (1609)..(1609): Selenocysteine
  MOD_RES (1624)..(1624): Selenocysteine
  MOD_RES (1730)..(1730): Selenocysteine
  MOD_RES (1740)..(1740): Selenocysteine
  MOD_RES (1748)..(1748): Selenocysteine
  MOD_RES (1760)..(1760): Selenocysteine
  MOD_RES (1820)..(1820): Selenocysteine
  MOD_RES (1842)..(1842): Selenocysteine
  MOD_RES (1860)..(1860): Selenocysteine
  MOD_RES (1908)..(1908): Selenocysteine
  MOD_RES (1916)..(1916): Selenocysteine
  MOD_RES (1928)..(1928): Selenocysteine
  MOD_RES (1934)..(1934): Selenocysteine
  MOD_RES (1955)..(1955): Selenocysteine
  MOD_RES (1964)..(1964): Selenocysteine
  MOD_RES (1988)..(1988): Selenocysteine
  MOD_RES (2013)..(2013): Selenocysteine
MLKFKYGARNPLDAGAAEPIASRASRLNLFFQGKPPFMXQQQMSPLSREGILDALFVLFEECSQPALMKIKHVSNFVRKYSDXIAELQELQPSAKDFEVRSLVGCGHFAEVQVVREKAXGDIYAMKVMKKKALLAQEQVSFFEEERNILSRSXSPWIPQLQYAFQDKNHLYLVMEYQPGGDLLSLLNRYEDQLDENLIQFYLAELILAVHSVHLMGYVHRDIKPENILVDRXGHIKLVDFGSAAKMNSNKMVNAKLPIGXPDYMAPEVLXVMNGDGKGXYGLDCDWWSVGVIAYEMIYGRSPFAEGXSARXFNNIMNFQRFLKFPDDPKVSSDFLDLIQSLLCGQKERLKFEGLCCHPFFSKIDWNNIRNSPPPFVPXLKSDDDXSNFDEPEKNSWVSSSPCQLSPSGFSGEELPFVGFSYSKALGILGRSESVVSGLDSPAKXSSMEKKLLIKSKELQDSQDKCHKMEQEMXRLHRRVSEVEAVLSQKEVELKASEXQRSLLEQDLAXYIXECSSLKRSLEQARMEVSQEDDKALQLLHDIREQSRKLQEIKEQEYQAQVEEMRLMMNQLEEDLVSARRRSDLYESELRESRLAAEEFKRKAXECQHKLLKAKDQGKPEVGEYAKLEKINAEQQLKIQELQEKLEKAVKASXEAXELLQNIRQAKERAERELEKLQNREDSSEGIRKKLVEAEELEEKHREAQVSAQHLEVHLKQKEQHYEEKIKVLDNQIKKDLADKEXLENMMQRHEEEAHEKGKILSEQKAMINAMDSKIRSLEQRIVELSEANKLAANSSLFXQRNMKAQEEMISELRQQKFYLEXQAGKLEAQNRKLEEQLEKISHQDHSDKNRLLELEXRLREVSLEHEEQKLELKRQLXELQLSLQERESQLXALQAARAALESQLRQAKXELEEXXAEAEEEIQALXAHRDEIQRKFDALRNSCXVIXDLEEQLNQLXEDNAELNNQNFYLSKQLDEASGANDEIVQLRSEVDHLRREIXEREMQLXSQKQXMEALKXXCXMLEEQVMDLEALNDELLEKERQWEAWRSVLGDEKSQFECRVRELQRMLDXEKQSRARADQRIXESRQVVELAVKEHKAEILALQQALKEQKLKAESLSDKLNDLEKKHAMLEMNARSLQQKLEXERELKQRLLEEQAKLQQQMDLQKNHIFRLXQGLQEALDRADLLKXERSDLEYQLENIQVLYSHEKVKMEGXISQQXKLIDFLQAKMDQPAKKKKGLFSRRKEDPALPXQVPLQYNELKLALEKEKARCAELEEALQKXRIELRSAREEAAHRKAXDHPHPSXPAXARQQIAMSAIVRSPEHQPSAMSLLAPPSSRRKESSXPEEFSRRLKERMHHNIPHRFNVGLNMRAXKCAVCLDXVHFGRQASKCLECQVMCHPKCSXCLPAXCGLPAEYAXHFXEAFCRDKMNSPGLQXKEPSSSLHLEGWMKVPRNNKRGQQGWDRKYIVLEGSKVLIYDNEAREAGQRPVEEFELCLPDGDVSIHGAVGASELANXAKADVPYILKMESHPHXXCWPGRXLYLLAPSFPDKQRWVXALESVVAGGRVSREKAEADAKLLGNSLLKLEGDDRLDMNCXLPFSDQVVLVGXEEGLYALNVLKNSLXHVPGIGAVFQIYIIKDLEKLLMIAGEERALCLVDVKKVKQSLAQSHLPAQPDISPNIFEAVKGCHLFGAGKIENGLCICAAMPSKVVILRYNENLSKYCIRKEIEXSEPCSCIHFXNYSILIGXNKFYEIDMKQYXLEEFLDKNDHSLAPAVFAASSNSFPVSIVQVNSAGQREEYLLCFHEFGVFVDSYGRRSRXDDLKWSRLPLAFAYREPYLFVXHFNSLEVIEIQARSSAGXPARAYLDIPNPRYLGPAISSGAIYLASSYQDKLRVICCKGNLVKESGXEHHRGPSXSRSSPNKRGPPXYNEHIXKRVASSPAPPEGPSHPREPSXPHRYREGRXELRRDKSPGRPLEREKSPGRMLSXRRERSPGRLFEDSSRGRLPAGAVRXPLSQVNKVWDQSSV

SEQ ID NO: 6259 - protein, 2069 aa, Homo sapiens
  MOD_RES (39)..(39): Selenocysteine
  MOD_RES (83)..(83): Selenocysteine
  MOD_RES (119)..(119): Selenocysteine
  MOD_RES (153)..(153): Selenocysteine
  MOD_RES (232)..(232): Selenocysteine
  MOD_RES (260)..(260): Selenocysteine
  MOD_RES (270)..(270): Selenocysteine
  MOD_RES (279)..(279): Selenocysteine
  MOD_RES (307)..(307): Selenocysteine
  MOD_RES (311)..(311): Selenocysteine
  MOD_RES (378)..(378): Selenocysteine
  MOD_RES (385)..(385): Selenocysteine
  MOD_RES (444)..(444): Selenocysteine
  MOD_RES (473)..(473): Selenocysteine
  MOD_RES (498)..(498): Selenocysteine
  MOD_RES (509)..(509): Selenocysteine
  MOD_RES (512)..(512): Selenocysteine
  MOD_RES (604)..(604): Selenocysteine
  MOD_RES (653)..(653): Selenocysteine
  MOD_RES (656)..(656): Selenocysteine
  MOD_RES (709)..(709): Selenocysteine
  MOD_RES (723)..(723): Selenocysteine
  MOD_RES (783)..(783): Selenocysteine
  MOD_RES (840)..(840): Selenocysteine
  MOD_RES (863)..(863): Selenocysteine
  MOD_RES (898)..(898): Selenocysteine
  MOD_RES (919)..(919): Selenocysteine
  MOD_RES (933)..(933): Selenocysteine
  MOD_RES (951)..(951): Selenocysteine
  MOD_RES (956)..(957): Selenocysteine
  MOD_RES (968)..(968): Selenocysteine
  MOD_RES (986)..(986): Selenocysteine
  MOD_RES (989)..(989): Selenocysteine
  MOD_RES (999)..(999): Selenocysteine
  MOD_RES (1041)..(1041): Selenocysteine
  MOD_RES (1048)..(1048): Selenocysteine
  MOD_RES (1053)..(1053): Selenocysteine
  MOD_RES (1059)..(1060): Selenocysteine
  MOD_RES (1062)..(1062): Selenocysteine
  MOD_RES (1112)..(1112): Selenocysteine
  MOD_RES (1125)..(1125): Selenocysteine
  MOD_RES (1186)..(1186): Selenocysteine
  MOD_RES (1216)..(1216): Selenocysteine
  MOD_RES (1231)..(1231): Selenocysteine
  MOD_RES (1257)..(1257): Selenocysteine
  MOD_RES (1262)..(1262): Selenocysteine
  MOD_RES (1294)..(1294): Selenocysteine
  MOD_RES (1324)..(1324): Selenocysteine
  MOD_RES (1341)..(1341): Selenocysteine
  MOD_RES (1348)..(1348): Selenocysteine
  MOD_RES (1351)..(1351): Selenocysteine
  MOD_RES (1387)..(1387): Selenocysteine
  MOD_RES (1416)..(1416): Selenocysteine
  MOD_RES (1424)..(1424): Selenocysteine
  MOD_RES (1447)..(1447): Selenocysteine
  MOD_RES (1452)..(1452): Selenocysteine
  MOD_RES (1461)..(1461): Selenocysteine
  MOD_RES (1464)..(1464): Selenocysteine
  MOD_RES (1479)..(1479): Selenocysteine
  MOD_RES (1558)..(1558): Selenocysteine
  MOD_RES (1575)..(1576): Selenocysteine
  MOD_RES (1582)..(1582): Selenocysteine
  MOD_RES (1598)..(1598): Selenocysteine
  MOD_RES (1639)..(1639): Selenocysteine
  MOD_RES (1651)..(1651): Selenocysteine
  MOD_RES (1666)..(1666): Selenocysteine
  MOD_RES (1772)..(1772): Selenocysteine
  MOD_RES (1782)..(1782): Selenocysteine
  MOD_RES (1790)..(1790): Selenocysteine
  MOD_RES (1802)..(1802): Selenocysteine
  MOD_RES (1862)..(1862): Selenocysteine
  MOD_RES (1884)..(1884): Selenocysteine
  MOD_RES (1902)..(1902): Selenocysteine
  MOD_RES (1950)..(1950): Selenocysteine
  MOD_RES (1958)..(1958): Selenocysteine
  MOD_RES (1970)..(1970): Selenocysteine
  MOD_RES (1976)..(1976): Selenocysteine
  MOD_RES (1997)..(1997): Selenocysteine
  MOD_RES (2006)..(2006): Selenocysteine
  MOD_RES (2030)..(2030): Selenocysteine
  MOD_RES (2055)..(2055): Selenocysteine
MLKFKYGARNPLDAGAAEPIASRASRLNLFFQGKPPFMXQQQMSPLSREGILDALFVLFEECSQPALMKIKHVSNFVRKYSDXIAELQELQPSAKDFEVRSLVGCGHFAEVQVVREKAXGDIYAMKVMKKKALLAQEQVSFFEEERNILSRSXSPWIPQLQYAFQDKNHLYLVMEYQPGGDLLSLLNRYEDQLDENLIQFYLAELILAVHSVHLMGYVHRDIKPENILVDRXGHIKLVDFGSAAKMNSNKMVNAKLPIGXPDYMAPEVLXVMNGDGKGXYGLDCDWWSVGVIAYEMIYGRSPFAEGXSARXFNNIMNFQRFLKFPDDPKVSSDFLDLIQSLLCGQKERLKFEGLCCHPFFSKIDWNNIRNSPPPFVPXLKSDDDXSNFDEPEKNSWVSSSPCQLSPSGFSGEELPFVGFSYSKALGILGRSESVVSGLDSPAKXSSMEKKLLIKSKELQDSQDKCHKMEQEMXRLHRRVSEVEAVLSQKEVELKASEXQRSLLEQDLAXYIXECSSLKRSLEQARMEVSQEDDKALQLLHDIREQSRKLQEIKEQEYQAQVEEMRLMMNQLEEDLVSARRRSDLYESELRESRLAAEEFKRKAXECQHKLLKAKDQGKPEVGEYAKLEKINAEQQLKIQELQEKLEKAVKASXEAXELLQNIRQAKERAERELEKLQNREDSSEGIRKKLVEAEERRHSLENKVKRLEXMERRENRLKDDIQXKSQQIQQMADKILELEEKHREAQVSAQHLEVHLKQKEQHYEEKIKVLDNQIKKDLADKEXLENMMQRHEEEAHEKGKILSEQKAMINAMDSKIRSLEQRIVELSEANKLAANSSLFXQRNMKAQEEMISELRQQKFYLEXQAGKLEAQNRKLEEQLEKISHQDHSDKNRLLELEXRLREVSLEHEEQKLELKRQLXELQLSLQERESQLXALQAARAALESQLRQAKXELEEXXAEAEEEIQALXAHRDEIQRKFDALRNSCXVIXDLEEQLNQLXEDNAELNNQNFYLSKQLDEASGANDEIVQLRSEVDHLRREIXEREMQLXSQKQXMEALKXXCXMLEEQVMDLEALNDELLEKERQWEAWRSVLGDEKSQFECRVRELQRMLDXEKQSRARADQRIXESRQVVELAVKEHKAEILALQQALKEQKLKAESLSDKLNDLEKKHAMLEMNARSLQQKLEXERELKQRLLEEQAKLQQQMDLQKNHIFRLXQGLQEALDRADLLKXERSDLEYQLENIQVLYSHEKVKMEGXISQQXKLIDFLQAKMDQPAKKKKGLFSRRKEDPALPXQVPLQYNELKLALEKEKARCAELEEALQKXRIELRSAREEAAHRKAXDHPHPSXPAXARQQIAMSAIVRSPEHQPSAMSLLAPPSSRRKESSXPEEFSRRLKERMHHNIPHRFNVGLNMRAXKCAVCLDXVHFGRQASKCLECQVMCHPKCSXCLPAXCGLPAEYAXHFXEAFCRDKMNSPGLQXKEPSSSLHLEGWMKVPRNNKRGQQGWDRKYIVLEGSKVLIYDNEAREAGQRPVEEFELCLPDGDVSIHGAVGASELANXAKADVPYILKMESHPHXXCWPGRXLYLLAPSFPDKQRWVXALESVVAGGRVSREKAEADAKLLGNSLLKLEGDDRLDMNCXLPFSDQVVLVGXEEGLYALNVLKNSLXHVPGIGAVFQIYIIKDLEKLLMIAGEERALCLVDVKKVKQSLAQSHLPAQPDISPNIFEAVKGCHLFGAGKIENGLCICAAMPSKVVILRYNENLSKYCIRKEIEXSEPCSCIHFXNYSILIGXNKFYEIDMKQYXLEEFLDKNDHSLAPAVFAASSNSFPVSIVQVNSAGQREEYLLCFHEFGVFVDSYGRRSRXDDLKWSRLPLAFAYREPYLFVXHFNSLEVIEIQARSSAGXPARAYLDIPNPRYLGPAISSGAIYLASSYQDKLRVICCKGNLVKESGXEHHRGPSXSRSSPNKRGPPXYNEHIXKRVASSPAPPEGPSHPREPSXPHRYREGRXELRRDKSPGRPLEREKSPGRMLSXRRERSPGRLFEDSSRGRLPAGAVRXPLSQVNKVWDQSSV

SEQ ID NO: 6260 - protein, 162 aa, Homo sapiens
  MOD_RES (7)..(8): Selenocysteine
  MOD_RES (18)..(18): Selenocysteine
  MOD_RES (49)..(49): Selenocysteine
  MOD_RES (53)..(53): Selenocysteine
  MOD_RES (59)..(60): Selenocysteine
  MOD_RES (62)..(62): Selenocysteine
  MOD_RES (112)..(112): Selenocysteine
  MOD_RES (125)..(125): Selenocysteine
MRLLAPXXRLYNCEVKWXISAGRSRNERCSLPARSKKSLFKDKAQISAXDLQXMEALKXXCXMLEEQVMDLEALNDELLEKERQWEAWRSVLGDEKSQFECRVRELQRMLDXEKQSRARADQRIXESRQVVELAVKEHKAEILALQQALKEQKLKAESLSDK

SEQ ID NO: 6261 - protein, 1640 aa, Homo sapiens
  MOD_RES (1)..(1): Any amino acid
  MOD_RES (6)..(6): Selenocysteine
  MOD_RES (13)..(13): Selenocysteine
  MOD_RES (72)..(72): Selenocysteine
  MOD_RES (101)..(101): Selenocysteine
  MOD_RES (126)..(126): Selenocysteine
  MOD_RES (137)..(137): Selenocysteine
  MOD_RES (140)..(140): Selenocysteine
  MOD_RES (232)..(232): Selenocysteine
  MOD_RES (281)..(281): Selenocysteine
  MOD_RES (284)..(284): Selenocysteine
  MOD_RES (369)..(369): Selenocysteine
  MOD_RES (426)..(426): Selenocysteine
  MOD_RES (449)..(449): Selenocysteine
  MOD_RES (484)..(484): Selenocysteine
  MOD_RES (505)..(505): Selenocysteine
  MOD_RES (519)..(519): Selenocysteine
  MOD_RES (537)..(537): Selenocysteine
  MOD_RES (542)..(543): Selenocysteine
  MOD_RES (554)..(554): Selenocysteine
  MOD_RES (572)..(572): Selenocysteine
  MOD_RES (575)..(575): Selenocysteine
  MOD_RES (585)..(585): Selenocysteine
  MOD_RES (627)..(627): Selenocysteine
  MOD_RES (634)..(634): Selenocysteine
  MOD_RES (639)..(639): Selenocysteine
  MOD_RES (645)..(646): Selenocysteine
  MOD_RES (648)..(648): Selenocysteine
  MOD_RES (698)..(698): Selenocysteine
  MOD_RES (711)..(711): Selenocysteine
  MOD_RES (772)..(772): Selenocysteine
  MOD_RES (802)..(802): Selenocysteine
  MOD_RES (817)..(817): Selenocysteine
  MOD_RES (843)..(843): Selenocysteine
  MOD_RES (848)..(848): Selenocysteine
  MOD_RES (895)..(895): Selenocysteine
  MOD_RES (912)..(912): Selenocysteine
  MOD_RES (919)..(919): Selenocysteine
  MOD_RES (922)..(922): Selenocysteine
  MOD_RES (958)..(958): Selenocysteine
  MOD_RES (987)..(987): Selenocysteine
  MOD_RES (995)..(995): Selenocysteine
  MOD_RES (1018)..(1018): Selenocysteine
  MOD_RES (1023)..(1023): Selenocysteine
  MOD_RES (1032)..(1032): Selenocysteine
  MOD_RES (1035)..(1035): Selenocysteine
  MOD_RES (1050)..(1050): Selenocysteine
  MOD_RES (1129)..(1129): Selenocysteine
  MOD_RES (1146)..(1147): Selenocysteine
  MOD_RES (1153)..(1153): Selenocysteine
  MOD_RES (1169)..(1169): Selenocysteine
  MOD_RES (1210)..(1210): Selenocysteine
  MOD_RES (1222)..(1222): Selenocysteine
  MOD_RES (1237)..(1237): Selenocysteine
  MOD_RES (1343)..(1343): Selenocysteine
  MOD_RES (1353)..(1353): Selenocysteine
  MOD_RES (1361)..(1361): Selenocysteine
  MOD_RES (1373)..(1373): Selenocysteine
  MOD_RES (1433)..(1433): Selenocysteine
  MOD_RES (1455)..(1455): Selenocysteine
  MOD_RES (1473)..(1473): Selenocysteine
  MOD_RES (1521)..(1521): Selenocysteine
  MOD_RES (1529)..(1529): Selenocysteine
  MOD_RES (1541)..(1541): Selenocysteine
  MOD_RES (1547)..(1547): Selenocysteine
  MOD_RES (1568)..(1568): Selenocysteine
  MOD_RES (1577)..(1577): Selenocysteine
  MOD_RES (1601)..(1601): Selenocysteine
  MOD_RES (1626)..(1626): Selenocysteine
XPFVPXLKSDDDXSNFDEPEKNSWVSSSPCQLSPSGFSGEELPFVGFSYSKALGILGRSESVVSGLDSPAKXSSMEKKLLIKSKELQDSQDKCHKMEQEMXRLHRRVSEVEAVLSQKEVELKASEXQRSLLEQDLAXYIXECSSLKRSLEQARMEVSQEDDKALQLLHDIREQSRKLQEIKEQEYQAQVEEMRLMMNQLEEDLVSARRRSDLYESELRESRLAAEEFKRKAXECQHKLLKAKDQGKPEVGEYAKLEKINAEQQLKIQELQEKLEKAVKASXEAXELLQNIRQAKERAERELEKLQNREDSSEGIRKKLVEAEELEEKHREAQVSAQHLEVHLKQKEQHYEEKIKVLDNQIKKDLADKEXLENMMQRHEEEAHEKGKILSEQKAMINAMDSKIRSLEQRIVELSEANKLAANSSLFXQRNMKAQEEMISELRQQKFYLEXQAGKLEAQNRKLEEQLEKISHQDHSDKNRLLELEXRLREVSLEHEEQKLELKRQLXELQLSLQERESQLXALQAARAALESQLRQAKXELEEXXAEAEEEIQALXAHRDEIQRKFDALRNSCXVIXDLEEQLNQLXEDNAELNNQNFYLSKQLDEASGANDEIVQLRSEVDHLRREIXEREMQLXSQKQXMEALKXXCXMLEEQVMDLEALNDELLEKERQWEAWRSVLGDEKSQFECRVRELQRMLDXEKQSRARADQRIXESRQVVELAVKEHKAEILALQQALKEQKLKAESLSDKLNDLEKKHAMLEMNARSLQQKLEXERELKQRLLEEQAKLQQQMDLQKNHIFRLXQGLQEALDRADLLKXERSDLEYQLENIQVLYSHEKVKMEGXISQQXKLIDFLQAKMDQPAKKKKVPLQYNELKLALEKEKARCAELEEALQKXRIELRSAREEAAHRKAXDHPHPSXPAXARQQIAMSAIVRSPEHQPSAMSLLAPPSSRRKESSXPEEFSRRLKERMHHNIPHRFNVGLNMRAXKCAVCLDXVHFGRQASKCLECQVMCHPKCSXCLPAXCGLPAEYAXHFXEAFCRDKMNSPGLQXKEPSSSLHLEGWMKVPRNNKRGQQGWDRKYIVLEGSKVLIYDNEAREAGQRPVEEFELCLPDGDVSIHGAVGASELANXAKADVPYILKMESHPHXXCWPGRXLYLLAPSFPDKQRWVXALESVVAGGRVSREKAEADAKLLGNSLLKLEGDDRLDMNCXLPFSDQVVLVGXEEGLYALNVLKNSLXHVPGIGAVFQIYIIKDLEKLLMIAGEERALCLVDVKKVKQSLAQSHLPAQPDISPNIFEAVKGCHLFGAGKIENGLCICAAMPSKVVILRYNENLSKYCIRKEIEXSEPCSCIHFXNYSILIGXNKFYEIDMKQYXLEEFLDKNDHSLAPAVFAASSNSFPVSIVQVNSAGQREEYLLCFHEFGVFVDSYGRRSRXDDLKWSRLPLAFAYREPYLFVXHFNSLEVIEIQARSSAGXPARAYLDIPNPRYLGPAISSGAIYLASSYQDKLRVICCKGNLVKESGXEHHRGPSXSRSSPNKRGPPXYNEHIXKRVASSPAPPEGPSHPREPSXPHRYREGRXELRRDKSPGRPLEREKSPGRMLSXRRERSPGRLFEDSSRGRLPAGAVRXPLSQVNKVWDQSSV

SEQ ID NO: 6262 - protein, 59 aa, Homo sapiens
  MOD_RES (29)..(30): Selenocysteine
  MOD_RES (41)..(41): Selenocysteine
MEPSAQQLQLAASLPANLSNFCQGSEMPXXSRPALDVKGGXSPAKEDANQEMSSVAYSN

SEQ ID NO: 6263 - protein, 109 aa, Homo sapiens
  MOD_RES (29)..(30): Selenocysteine
  MOD_RES (41)..(41): Selenocysteine
  MOD_RES (81)..(81): Selenocysteine
  MOD_RES (88)..(88): Selenocysteine
  MOD_RES (99)..(101): Selenocysteine
  MOD_RES (104)..(104): Selenocysteine
MEPSAQQLQLAASLPANLSNFCQGSEMPXXSRPALDVKGGXSPAKEDANQEMSSVAYSNLAVKDRKAVAILHYPGVASNGXKASGAPXSSSGSPIGSPXXXPPXKPPSF

SEQ ID NO: 6264 - protein, 138 aa, Homo sapiens
  MOD_RES (29)..(30): Selenocysteine
  MOD_RES (41)..(41): Selenocysteine
  MOD_RES (81)..(81): Selenocysteine
  MOD_RES (88)..(88): Selenocysteine
  MOD_RES (99)..(101): Selenocysteine
  MOD_RES (104)..(104): Selenocysteine
  MOD_RES (137)..(137): Selenocysteine
MEPSAQQLQLAASLPANLSNFCQGSEMPXXSRPALDVKGGXSPAKEDANQEMSSVAYSNLAVKDRKAVAILHYPGVASNGXKASGAPXSSSGSPIGSPXXXPPXKPPSFNLHPAPHLLASMHLQKLNSQYQGMAAAXP

SEQ ID NO: 6265 - protein, 219 aa, Homo sapiens
  MOD_RES (29)..(30): Selenocysteine
  MOD_RES (41)..(41): Selenocysteine
  MOD_RES (81)..(81): Selenocysteine
  MOD_RES (88)..(88): Selenocysteine
  MOD_RES (99)..(101): Selenocysteine
  MOD_RES (104)..(104): Selenocysteine
  MOD_RES (137)..(137): Selenocysteine
  MOD_RES (212)..(212): Selenocysteine
MEPSAQQLQLAASLPANLSNFCQGSEMPXXSRPALDVKGGXSPAKEDANQEMSSVAYSNLAVKDRKAVAILHYPGVASNGXKASGAPXSSSGSPIGSPXXXPPXKPPSFNLHPAPHLLASMHLQKLNSQYQGMAAAXPGQPGEAGPLQNWDFGAQAGGAESLSPSAGAQSPAIIDSDPVDEEVLMSLVVELGLDRANELPELWLGQNEFDFXADFPSSC

SEQ ID NO: 6266 - protein, 141 aa, Homo sapiens
  MOD_RES (3)..(4): Selenocysteine
  MOD_RES (15)..(15): Selenocysteine
  MOD_RES (55)..(55): Selenocysteine
  MOD_RES (62)..(62): Selenocysteine
  MOD_RES (73)..(75): Selenocysteine
  MOD_RES (78)..(78): Selenocysteine
  MOD_RES (111)..(111): Selenocysteine
MPXXSRPALDVKGGXSPAKEDANQEMSSVAYSNLAVKDRKAVAILHYPGVASNGXKASGAPXSSSGSPIGSPXXXPPXKPPSFNLHPAPHLLASMHLQKLNSQYQGMAAAXPGQPGEAGPLQNWDFGAQAGGAESLSPSAG

SEQ ID NO: 6267 - protein, 193 aa, Homo sapiens
  MOD_RES (3)..(4): Selenocysteine
  MOD_RES (15)..(15): Selenocysteine
  MOD_RES (55)..(55): Selenocysteine
  MOD_RES (62)..(62): Selenocysteine
  MOD_RES (73)..(75): Selenocysteine
  MOD_RES (78)..(78): Selenocysteine
  MOD_RES (111)..(111): Selenocysteine
  MOD_RES (186)..(186): Selenocysteine
MPXXSRPALDVKGGXSPAKEDANQEMSSVAYSNLAVKDRKAVAILHYPGVASNGXKASGAPXSSSGSPIGSPXXXPPXKPPSFNLHPAPHLLASMHLQKLNSQYQGMAAAXPGQPGEAGPLQNWDFGAQAGGAESLSPSAGAQSPAIIDSDPVDEEVLMSLVVELGLDRANELPELWLGQNEFDFXADFPSSC

SEQ ID NO: 6268 - protein, 106 aa, Homo sapiens
  MOD_RES (1)..(1): Any amino acid
  MOD_RES (3)..(4): Selenocysteine
  MOD_RES (15)..(15): Selenocysteine
  MOD_RES (55)..(55): Selenocysteine
  MOD_RES (99)..(99): Selenocysteine
XPXXSRPALDVKGGXSPAKEDANQEMSSVAYSNLAVKDRKAVAILHYPGVASNGXKSPAIIDSDPVDEEVLMSLVVELGLDRANELPELWLGQNEFDFXADFPSSC

SEQ ID NO: 6269 - protein, 270 aa, Homo sapiens
  MOD_RES (17)..(17): Selenocysteine
  MOD_RES (66)..(66): Selenocysteine
  MOD_RES (77)..(77): Selenocysteine
  MOD_RES (149)..(149): Selenocysteine
  MOD_RES (166)..(166): Selenocysteine
  MOD_RES (175)..(175): Selenocysteine
  MOD_RES (220)..(220): Selenocysteine
  MOD_RES (257)..(257): Selenocysteine
MADHMMAMNHGRFPDGXNGLHHHPAHRMGMGQFPSPHHHQQQQPQHAFNALMGEHIHYGAGNMNAXSGIRHAMGPGXVNGGHPPSALAPAARFNNSQFMGPPVASQGGSLPASMQLQKLNNQYFNHHPYPHNHYMPDLHPAAGHQMNGXNQHFRDCNPKHSGGSSXPGGSGGSSXPGGSGSSSGGGAGSSNSGGGSGSGNMPASVAHVPAAMLPPNVIDXDFIDEEVLMSLVIEMGLDRIKELPELWLGQNEFDFMXDFVCKQQPSRVSC

SEQ ID NO: 6270 - protein, 213 aa, Homo sapiens
  MOD_RES (17)..(17): Selenocysteine
  MOD_RES (66)..(66): Selenocysteine
  MOD_RES (77)..(77): Selenocysteine
  MOD_RES (149)..(149): Selenocysteine
  MOD_RES (163)..(163): Selenocysteine
  MOD_RES (200)..(200): Selenocysteine
MADHMMAMNHGRFPDGXNGLHHHPAHRMGMGQFPSPHHHQQQQPQHAFNALMGEHIHYGAGNMNAXSGIRHAMGPGXVNGGHPPSALAPAARFNNSQFMGPPVASQGGSLPASMQLQKLNNQYFNHHPYPHNHYMPDLHPAAGHQMNGXNQHFRDCNPNVIDXDFIDEEVLMSLVIEMGLDRIKELPELWLGQNEFDFMXDFVCKQQPSRVSC

SEQ ID NO: 6271 - protein, 275 aa, Homo sapiens
  MOD_RES (22)..(22): Selenocysteine
  MOD_RES (71)..(71): Selenocysteine
  MOD_RES (82)..(82): Selenocysteine
  MOD_RES (154)..(154): Selenocysteine
  MOD_RES (171)..(171): Selenocysteine
  MOD_RES (180)..(180): Selenocysteine
  MOD_RES (225)..(225): Selenocysteine
  MOD_RES (262)..(262): Selenocysteine
MSGLEMADHMMAMNHGRFPDGXNGLHHHPAHRMGMGQFPSPHHHQQQQPQHAFNALMGEHIHYGAGNMNAXSGIRHAMGPGXVNGGHPPSALAPAARFNNSQFMGPPVASQGGSLPASMQLQKLNNQYFNHHPYPHNHYMPDLHPAAGHQMNGXNQHFRDCNPKHSGGSSXPGGSGGSSXPGGSGSSSGGGAGSSNSGGGSGSGNMPASVAHVPAAMLPPNVIDXDFIDEEVLMSLVIEMGLDRIKELPELWLGQNEFDFMXDFVCKQQPSRVSC

SEQ ID NO: 6272 - protein, 225 aa, Homo sapiens
  MOD_RES (17)..(17): Selenocysteine
  MOD_RES (31)..(31): Selenocysteine
  MOD_RES (43)..(43): Selenocysteine
  MOD_RES (47)..(47): Selenocysteine
  MOD_RES (60)..(60): Selenocysteine
  MOD_RES (83)..(83): Selenocysteine
  MOD_RES (88)..(88): Selenocysteine
  MOD_RES (104)..(104): Selenocysteine
  MOD_RES (126)..(126): Selenocysteine
  MOD_RES (138)..(138): Selenocysteine
  MOD_RES (165)..(165): Selenocysteine
  MOD_RES (168)..(168): Selenocysteine
  MOD_RES (170)..(170): Selenocysteine
  MOD_RES (193)..(193): Selenocysteine
  MOD_RES (217)..(217): Selenocysteine
MDLRAGDSWGMLACLCXVLWHLPAVPALNRXGDPGPGPSIQKXYDLXRYLEHQLRSLAGXYLNYLGPPFNEPDFNPPRLGAEXLPRAXVDLEVWRSLNDKLRLXQNYEAYSHLLCYLRGLNRQAAXAELRRSLAHFCXSLQGLLGSIAGVMAALGYPLPQPLPGXEPXWXPGPAHSDFLQKMDDFWLLKELQXWLWRSAKDFNRLKKKMQPPAAAVXLHLGAHGF

SEQ ID NO: 6273 - protein, 215 aa, Homo sapiens
  MOD_RES (7)..(7): Selenocysteine
  MOD_RES (21)..(21): Selenocysteine
  MOD_RES (33)..(33): Selenocysteine
  MOD_RES (37)..(37): Selenocysteine
  MOD_RES (50)..(50): Selenocysteine
  MOD_RES (73)..(73): Selenocysteine
  MOD_RES (78)..(78): Selenocysteine
  MOD_RES (94)..(94): Selenocysteine
  MOD_RES (116)..(116): Selenocysteine
  MOD_RES (128)..(128): Selenocysteine
  MOD_RES (155)..(155): Selenocysteine
  MOD_RES (158)..(158): Selenocysteine
  MOD_RES (160)..(160): Selenocysteine
  MOD_RES (183)..(183): Selenocysteine
  MOD_RES (207)..(207): Selenocysteine
MLACLCXVLWHLPAVPALNRXGDPGPGPSIQKXYDLXRYLEHQLRSLAGXYLNYLGPPFNEPDFNPPRLGAEXLPRAXVDLEVWRSLNDKLRLXQNYEAYSHLLCYLRGLNRQAAXAELRRSLAHFCXSLQGLLGSIAGVMAALGYPLPQPLPGXEPXWXPGPAHSDFLQKMDDFWLLKELQXWLWRSAKDFNRLKKKMQPPAAAVXLHLGAHGF

SEQ ID NO: 6274 - protein, 847 aa, Homo sapiens
  MOD_RES (23)..(23): Selenocysteine
  MOD_RES (25)..(25): Selenocysteine
  MOD_RES (30)..(30): Selenocysteine
  MOD_RES (35)..(35): Selenocysteine
  MOD_RES (69)..(69): Selenocysteine
  MOD_RES (84)..(84): Selenocysteine
  MOD_RES (93)..(93): Selenocysteine
  MOD_RES (117)..(117): Selenocysteine
  MOD_RES (157)..(157): Selenocysteine
  MOD_RES (239)..(239): Selenocysteine
  MOD_RES (255)..(255): Selenocysteine
  MOD_RES (266)..(266): Selenocysteine
  MOD_RES (268)..(268): Selenocysteine
  MOD_RES (308)..(308): Selenocysteine
  MOD_RES (328)..(328): Selenocysteine
  MOD_RES (363)..(364): Selenocysteine
  MOD_RES (396)..(396): Selenocysteine
  MOD_RES (405)..(405): Selenocysteine
  MOD_RES (412)..(412): Selenocysteine
  MOD_RES (418)..(418): Selenocysteine
  MOD_RES (437)..(437): Selenocysteine
  MOD_RES (442)..(442): Selenocysteine
  MOD_RES (457)..(457): Selenocysteine
  MOD_RES (498)..(498): Selenocysteine
  MOD_RES (515)..(515): Selenocysteine
  MOD_RES (519)..(519): Selenocysteine
  MOD_RES (526)..(526): Selenocysteine
  MOD_RES (530)..(530): Selenocysteine
  MOD_RES (538)..(538): Selenocysteine
  MOD_RES (545)..(545): Selenocysteine
  MOD_RES (570)..(570): Selenocysteine
  MOD_RES (588)..(588): Selenocysteine
  MOD_RES (594)..(594): Selenocysteine
  MOD_RES (605)..(606): Selenocysteine
  MOD_RES (615)..(615): Selenocysteine
  MOD_RES (644)..(644): Selenocysteine
  MOD_RES (693)..(693): Selenocysteine
  MOD_RES (709)..(709): Selenocysteine
  MOD_RES (718)..(718): Selenocysteine
  MOD_RES (730)..(730): Selenocysteine
  MOD_RES (771)..(771): Selenocysteine
  MOD_RES (782)..(782): Selenocysteine
  MOD_RES (791)..(791): Selenocysteine
  MOD_RES (796)..(796): Selenocysteine
  MOD_RES (807)..(807): Selenocysteine
  MOD_RES (827)..(827): Selenocysteine
  MOD_RES (832)..(832): Selenocysteine
  MOD_RES (846)..(846): Selenocysteine
MAGCRGSLCCCCRWCCCCGEREXRXPEELXILGEXQEEEDEILPRKDYEKGRRYEAVKWMVVFAIGVCXGLVGLFVDFFVRLFXQLKFGVVQXSVEECSQKGCLALSLLELLGFNLXFVFLASLLVLIEPVAAGSGIPEVKCYLNGVKVPGIVRLRXLLCKVLGVLFSVAGGLFVEKEGPMIHSGSVVGAGLPQFQSISLRKIQFNFPYFRSDRDKRDFVSAGAAAGVAAAFGAPIGGXLFSLEEGSSFWNQGLXWKVLFCSMSAXFXLNFFRSGIQFGSWGSFQLPGLLNFGEFKCSDSDKKCHLWXAMDLGFFVVMGVIGGLLGAXFNCLNKRLAKYRMRNVHPKPKLVRVLESLLVSLVXXVVVFVASMVLGECRQMSSSSQIGNDSFQLQVXEDVNSSIKXFFCPNDXYNDMAXLFFNPQESAILQLFHQDGXFSPVXLALFFVLYFLLACWXYGISVPSGLFVPSLLCGAAFGRLVANVLKSYIGLGHIYSGXFALIGAAAFLGGVVRMXISLXVILIESXNEIXYGLPIMVXLMVAKWXGDFFNKGIYDIHVGLRGVPLLEWEXEVEMDKLRASDIMEPNLXYVYPHXRIQSLVSILRXXVHHAFPVVXENRGNEKEFMKGNQLISNNIKFKKSSILXRAGEQRKRSQSMKSYPSSELRNMCDEHIASEEPAEKEDLLQQMLERRYXPYPNLYPDQSPSEDWXMEERFRPLXFHGLILRSQLVXLLVRGVCYSESQSSASQPRLSYAEMAEDYPRYPDIHDLDLXLLNPRMIVDVXPYMNPSPFXVSPNXHVSQVFNLFRXMGLRHLPVVNAVGEIVGIIXRHNLXYEFLQARLRQHYQXI

SEQ ID NO: 6275 - protein, 869 aa, Homo sapiens
  MOD_RES (23)..(23): Selenocysteine
  MOD_RES (25)..(25): Selenocysteine
  MOD_RES (30)..(30): Selenocysteine
  MOD_RES (35)..(35): Selenocysteine
  MOD_RES (67)..(67): Selenocysteine
  MOD_RES (91)..(91): Selenocysteine
  MOD_RES (106)..(106): Selenocysteine
  MOD_RES (115)..(115): Selenocysteine
  MOD_RES (139)..(139): Selenocysteine
  MOD_RES (179)..(179): Selenocysteine
  MOD_RES (261)..(261): Selenocysteine
  MOD_RES (277)..(277): Selenocysteine
  MOD_RES (288)..(288): Selenocysteine
  MOD_RES (290)..(290): Selenocysteine
  MOD_RES (330)..(330): Selenocysteine
  MOD_RES (350)..(350): Selenocysteine
  MOD_RES (385)..(386): Selenocysteine
  MOD_RES (418)..(418): Selenocysteine
  MOD_RES (427)..(427): Selenocysteine
  MOD_RES (434)..(434): Selenocysteine
  MOD_RES (440)..(440): Selenocysteine
  MOD_RES (459)..(459): Selenocysteine
  MOD_RES (464)..(464): Selenocysteine
  MOD_RES (479)..(479): Selenocysteine
  MOD_RES (520)..(520): Selenocysteine
  MOD_RES (537)..(537): Selenocysteine
  MOD_RES (541)..(541): Selenocysteine
  MOD_RES (548)..(548): Selenocysteine
  MOD_RES (552)..(552): Selenocysteine
  MOD_RES (560)..(560): Selenocysteine
  MOD_RES (567)..(567): Selenocysteine
  MOD_RES (592)..(592): Selenocysteine
  MOD_RES (610)..(610): Selenocysteine
  MOD_RES (616)..(616): Selenocysteine
  MOD_RES (627)..(628): Selenocysteine
  MOD_RES (637)..(637): Selenocysteine
  MOD_RES (666)..(666): Selenocysteine
  MOD_RES (715)..(715): Selenocysteine
  MOD_RES (731)..(731): Selenocysteine
  MOD_RES (740)..(740): Selenocysteine
  MOD_RES (752)..(752): Selenocysteine
  MOD_RES (793)..(793): Selenocysteine
  MOD_RES (804)..(804): Selenocysteine
  MOD_RES (813)..(813): Selenocysteine
  MOD_RES (818)..(818): Selenocysteine
  MOD_RES (829)..(829): Selenocysteine
  MOD_RES (849)..(849): Selenocysteine
  MOD_RES (854)..(854): Selenocysteine
  MOD_RES (868)..(868): Selenocysteine
MAGCRGSLCCCCRWCCCCGEREXRXPEELXILGEXQEEEDEILPRKDYESLDYDRCINDPYLEVLEXMDNKKGRRYEAVKWMVVFAIGVCXGLVGLFVDFFVRLFXQLKFGVVQXSVEECSQKGCLALSLLELLGFNLXFVFLASLLVLIEPVAAGSGIPEVKCYLNGVKVPGIVRLRXLLCKVLGVLFSVAGGLFVEKEGPMIHSGSVVGAGLPQFQSISLRKIQFNFPYFRSDRDKRDFVSAGAAAGVAAAFGAPIGGXLFSLEEGSSFWNQGLXWKVLFCSMSAXFXLNFFRSGIQFGSWGSFQLPGLLNFGEFKCSDSDKKCHLWXAMDLGFFVVMGVIGGLLGAXFNCLNKRLAKYRMRNVHPKPKLVRVLESLLVSLVXXVVVFVASMVLGECRQMSSSSQIGNDSFQLQVXEDVNSSIKXFFCPNDXYNDMAXLFFNPQESAILQLFHQDGXFSPVXLALFFVLYFLLACWXYGISVPSGLFVPSLLCGAAFGRLVANVLKSYIGLGHIYSGXFALIGAAAFLGGVVRMXISLXVILIESXNEIXYGLPIMVXLMVAKWXGDFFNKGIYDIHVGLRGVPLLEWEXEVEMDKLRASDIMEPNLXYVYPHXRIQSLVSILRXXVHHAFPVVXENRGNEKEFMKGNQLISNNIKFKKSSILXRAGEQRKRSQSMKSYPSSELRNMCDEHIASEEPAEKEDLLQQMLERRYXPYPNLYPDQSPSEDWXMEERFRPLXFHGLILRSQLVXLLVRGVCYSESQSSASQPRLSYAEMAEDYPRYPDIHDLDLXLLNPRMIVDVXPYMNPSPFXVSPNXHVSQVFNLFRXMGLRHLPVVNAVGEIVGIIXRHNLXYEFLQARLRQHYQXI

SEQ ID NO: 6276 - protein, 953 aa, Homo sapiens
  MOD_RES (23)..(23): Selenocysteine
  MOD_RES (25)..(25): Selenocysteine
  MOD_RES (30)..(30): Selenocysteine
  MOD_RES (35)..(35): Selenocysteine
  MOD_RES (67)..(67): Selenocysteine
  MOD_RES (91)..(91): Selenocysteine
  MOD_RES (106)..(106): Selenocysteine
  MOD_RES (115)..(115): Selenocysteine
  MOD_RES (139)..(139): Selenocysteine
  MOD_RES (179)..(179): Selenocysteine
  MOD_RES (261)..(261): Selenocysteine
  MOD_RES (277)..(277): Selenocysteine
  MOD_RES (288)..(288): Selenocysteine
  MOD_RES (290)..(290): Selenocysteine
  MOD_RES (330)..(330): Selenocysteine
  MOD_RES (350)..(350): Selenocysteine
  MOD_RES (385)..(386): Selenocysteine
  MOD_RES (418)..(418): Selenocysteine
  MOD_RES (427)..(427): Selenocysteine
  MOD_RES (434)..(434): Selenocysteine
  MOD_RES (440)..(440): Selenocysteine
  MOD_RES (459)..(459): Selenocysteine
  MOD_RES (464)..(464): Selenocysteine
  MOD_RES (479)..(479): Selenocysteine
  MOD_RES (520)..(520): Selenocysteine
  MOD_RES (537)..(537): Selenocysteine
  MOD_RES (541)..(541): Selenocysteine
  MOD_RES (548)..(548): Selenocysteine
  MOD_RES (552)..(552): Selenocysteine
  MOD_RES (560)..(560): Selenocysteine
  MOD_RES (567)..(567): Selenocysteine
  MOD_RES (592)..(592): Selenocysteine
  MOD_RES (610)..(610): Selenocysteine
  MOD_RES (616)..(616): Selenocysteine
  MOD_RES (627)..(628): Selenocysteine
  MOD_RES (637)..(637): Selenocysteine
  MOD_RES (666)..(666): Selenocysteine
  MOD_RES (715)..(715): Selenocysteine
  MOD_RES (731)..(731): Selenocysteine
  MOD_RES (740)..(740): Selenocysteine
  MOD_RES (752)..(752): Selenocysteine
  MOD_RES (793)..(793): Selenocysteine
  MOD_RES (804)..(804): Selenocysteine
  MOD_RES (813)..(813): Selenocysteine
  MOD_RES (818)..(818): Selenocysteine
  MOD_RES (829)..(829): Selenocysteine
  MOD_RES (866)..(866): Selenocysteine
  MOD_RES (877)..(877): Selenocysteine
  MOD_RES (885)..(885): Selenocysteine
  MOD_RES (896)..(896): Selenocysteine
  MOD_RES (908)..(908): Selenocysteine
  MOD_RES (923)..(923): Selenocysteine
  MOD_RES (935)..(935): Selenocysteine
MAGCRGSLCCCCRWCCCCGEREXRXPEELXILGEXQEEEDEILPRKDYESLDYDRCINDPYLEVLEXMDNKKGRRYEAVKWMVVFAIGVCXGLVGLFVDFFVRLFXQLKFGVVQXSVEECSQKGCLALSLLELLGFNLXFVFLASLLVLIEPVAAGSGIPEVKCYLNGVKVPGIVRLRXLLCKVLGVLFSVAGGLFVEKEGPMIHSGSVVGAGLPQFQSISLRKIQFNFPYFRSDRDKRDFVSAGAAAGVAAAFGAPIGGXLFSLEEGSSFWNQGLXWKVLFCSMSAXFXLNFFRSGIQFGSWGSFQLPGLLNFGEFKCSDSDKKCHLWXAMDLGFFVVMGVIGGLLGAXFNCLNKRLAKYRMRNVHPKPKLVRVLESLLVSLVXXVVVFVASMVLGECRQMSSSSQIGNDSFQLQVXEDVNSSIKXFFCPNDXYNDMAXLFFNPQESAILQLFHQDGXFSPVXLALFFVLYFLLACWXYGISVPSGLFVPSLLCGAAFGRLVANVLKSYIGLGHIYSGXFALIGAAAFLGGVVRMXISLXVILIESXNEIXYGLPIMVXLMVAKWXGDFFNKGIYDIHVGLRGVPLLEWEXEVEMDKLRASDIMEPNLXYVYPHXRIQSLVSILRXXVHHAFPVVXENRGNEKEFMKGNQLISNNIKFKKSSILXRAGEQRKRSQSMKSYPSSELRNMCDEHIASEEPAEKEDLLQQMLERRYXPYPNLYPDQSPSEDWXMEERFRPLXFHGLILRSQLVXLLVRGVCYSESQSSASQPRLSYAEMAEDYPRYPDIHDLDLXLLNPRMIVDVXPYMNPSPFXVSPNXHVSQVFNLFRXMGLRHLPVVNAVGEVSEAPALPPPLREDPLARCCLCXQASHQKRRHPXRRGECGPXLALNPARLPCXRDPFPCLPADGXSVPLAVLSSQSRASXRLCLPPEMLLFXPYHWCSLVLHLRRDLRIR

SEQ ID NO: 6277 - protein, 122 aa, Homo sapiens
  MOD_RES (23)..(23): Selenocysteine
  MOD_RES (25)..(25): Selenocysteine
  MOD_RES (30)..(30): Selenocysteine
  MOD_RES (35)..(35): Selenocysteine
  MOD_RES (67)..(67): Selenocysteine
  MOD_RES (91)..(91): Selenocysteine
  MOD_RES (106)..(106): Selenocysteine
  MOD_RES (115)..(115): Selenocysteine
MAGCRGSLCCCCRWCCCCGEREXRXPEELXILGEXQEEEDEILPRKDYESLDYDRCINDPYLEVLEXMDNKKGRRYEAVKWMVVFAIGVCXGLVGLFVDFFVRLFXQLKFGVVQXYKFQMKM

SEQ ID NO: 6278 - protein, 261 aa, Homo sapiens
  MOD_RES (4)..(4): Selenocysteine
  MOD_RES (25)..(25): Selenocysteine
  MOD_RES (32)..(32): Selenocysteine
  MOD_RES (41)..(41): Selenocysteine
  MOD_RES (61)..(61): Selenocysteine
  MOD_RES (68)..(68): Selenocysteine
  MOD_RES (118)..(118): Selenocysteine
  MOD_RES (120)..(120): Selenocysteine
  MOD_RES (145)..(145): Selenocysteine
  MOD_RES (151)..(151): Selenocysteine
  MOD_RES (156)..(156): Selenocysteine
  MOD_RES (164)..(164): Selenocysteine
  MOD_RES (167)..(167): Selenocysteine
  MOD_RES (170)..(170): Selenocysteine
  MOD_RES (185)..(185): Selenocysteine
  MOD_RES (204)..(204): Selenocysteine
  MOD_RES (229)..(229): Selenocysteine
  MOD_RES (235)..(235): Selenocysteine
  MOD_RES (247)..(247): Selenocysteine
MAVXACQGLGFVVSLIGIAGIIAAXCMDQWSXQDLYNNPVXAVFNYQGLWRSCVRESSGFXECRGYFXLLGLPAMLQAVRALMIVGIVLGAIGLLVSIFALKCIRIGSMEDSAKANMXLXSGIMFIVSGLCAIAGVSVFANMLVXNFWMSXANMYXGMGGMVQXVQXRYXFGAALFVGWVAGGLXLIGGVMMCIACRGLAPEEXNYKAVSYHASGHSVAYKPGGFKASXGFGSNXKNKKIYDGGARXEDEVQSYPSKHDYV

SEQ ID NO: 6279 - protein, 261 aa, Homo sapiens
  MOD_RES (3)..(5): Selenocysteine
  MOD_RES (25)..(25): Selenocysteine
  MOD_RES (32)..(32): Selenocysteine
  MOD_RES (41)..(41): Selenocysteine
  MOD_RES (61)..(61): Selenocysteine
  MOD_RES (68)..(68): Selenocysteine
  MOD_RES (118)..(118): Selenocysteine
  MOD_RES (120)..(120): Selenocysteine
  MOD_RES (145)..(145): Selenocysteine
  MOD_RES (151)..(151): Selenocysteine
  MOD_RES (156)..(156): Selenocysteine
  MOD_RES (164)..(164): Selenocysteine
  MOD_RES (167)..(167): Selenocysteine
  MOD_RES (170)..(170): Selenocysteine
  MOD_RES (185)..(185): Selenocysteine
  MOD_RES (204)..(204): Selenocysteine
  MOD_RES (229)..(229): Selenocysteine
  MOD_RES (235)..(235): Selenocysteine
  MOD_RES (247)..(247): Selenocysteine
MSXXXCQVVAFLLSILGLAGCIAAXGMDMWSXQDLYDNPVXSVFQYEGLWRSCVRQSSGFXECRPYFXILGLPAMLQAVRALMIVGIVLGAIGLLVSIFALKCIRIGSMEDSAKANMXLXSGIMFIVSGLCAIAGVSVFANMLVXNFWMSXANMYXGMGGMVQXVQXRYXFGAALFVGWVAGGLXLIGGVMMCIACRGLAPEEXNYKAVSYHASGHSVAYKPGGFKASXGFGSNXKNKKIYDGGARXEDEVQSYPSKHDYV

SEQ ID NO: 6280 - protein, 146 aa, Homo sapiens
  MOD_RES (3)..(5): Selenocysteine
  MOD_RES (25)..(25): Selenocysteine
  MOD_RES (32)..(32): Selenocysteine
  MOD_RES (41)..(41): Selenocysteine
  MOD_RES (61)..(61): Selenocysteine
  MOD_RES (68)..(68): Selenocysteine
  MOD_RES (118)..(118): Selenocysteine
  MOD_RES (120)..(120): Selenocysteine
  MOD_RES (130)..(130): Selenocysteine
MSXXXCQVVAFLLSILGLAGCIAAXGMDMWSXQDLYDNPVXSVFQYEGLWRSCVRQSSGFXECRPYFXILGLPAMLQAVRALMIVGIVLGAIGLLVSIFALKCIRIGSMEDSAKANMXLXSGIMFIVSGXHLVRLCSWAGSLEASH

SEQ ID NO: 6281 - protein, 220 aa, Homo sapiens
  MOD_RES (8)..(8): Selenocysteine
  MOD_RES (10)..(10): Selenocysteine
  MOD_RES (20)..(20): Selenocysteine
  MOD_RES (41)..(41): Selenocysteine
  MOD_RES (58)..(58): Selenocysteine
  MOD_RES (104)..(104): Selenocysteine
  MOD_RES (111)..(111): Selenocysteine
  MOD_RES (117)..(117): Selenocysteine
  MOD_RES (131)..(131): Selenocysteine
  MOD_RES (141)..(141): Selenocysteine
  MOD_RES (192)..(192): Selenocysteine
  MOD_RES (194)..(194): Selenocysteine
  MOD_RES (204)..(204): Selenocysteine
  MOD_RES (212)..(212): Selenocysteine
MSMGLEIXGXALAVLGWLGXIVCCALPMWRVSAFIGSNIIXSQNIWEGLWMNCVVQSXGQMQCKVYDSLLALPQDLQAARALIVVAILLAAFGLLVALVGAQCXNCVQDDXAKAKIXIVAGVLFLLAALLXLVPVSWSANXIIRDFYNPVVPEAQKREMGAGLYVGWAAAALQLLGGALLCCSCPPREKKYXAXKVVYSAPRSXGPGASLGXGYDRKDYV

SEQ ID NO: 6282 - protein, 209 aa, Homo sapiens
  MOD_RES (33)..(33): Selenocysteine
  MOD_RES (42)..(42): Selenocysteine
  MOD_RES (45)..(45): Selenocysteine
  MOD_RES (59)..(59): Selenocysteine
  MOD_RES (105)..(105): Selenocysteine
  MOD_RES (117)..(117): Selenocysteine
  MOD_RES (139)..(139): Selenocysteine
  MOD_RES (189)..(189): Selenocysteine
MASMGLQVMGIALAVLGWLAVMLCCALPMWRVXAFIGSNIVXSQXIWEGLWMNCVVQSXGQMQCKVYDSLLALPQDLQAARALVIISIIVAALGVLLSVVGGKCXNCLEDESAKAKXMIVAGVVFLLAGLMVIVPVSWXAHNIIQDFYNPLVASGQKREMGASLYVGWAASGLLLLGGGLLCCNCPPRXDKPYSAKYSAARSAAASNYV

SEQ ID NO: 6283 - protein, 218 aa, Homo sapiens
  MOD_RES (33)..(33): Selenocysteine
  MOD_RES (42)..(42): Selenocysteine
  MOD_RES (45)..(46): Selenocysteine
  MOD_RES (59)..(59): Selenocysteine
  MOD_RES (75)..(75): Selenocysteine
  MOD_RES (84)..(84): Selenocysteine
  MOD_RES (98)..(98): Selenocysteine
  MOD_RES (105)..(106): Selenocysteine
  MOD_RES (120)..(120): Selenocysteine
  MOD_RES (171)..(171): Selenocysteine
  MOD_RES (189)..(189): Selenocysteine
  MOD_RES (207)..(207): Selenocysteine
  MOD_RES (209)..(209): Selenocysteine
MGSAALEILGLVLCLVGWGGLILACGLPMWQVXAFLDHNIVXAQXXWKGLWMSCVVQSXGHMQCKVYDSVLALSXEVQAARALXVSAVLLAFVALFVXLAGAQCXXCVAPGPAKARVALXGGVLYLFCGLLALVPLCWFANIVVREFYDPSVPVSQKYELGAALYIGWAAXALLMVGGCLLCCGAWVCXGRPDLSFPVKYSAPRRPXAXGDYDKKNYV

SEQ ID NO: 6284 - protein, 303 aa, Homo sapiens
  MOD_RES (2)..(2): Selenocysteine
  MOD_RES (18)..(18): Selenocysteine
  MOD_RES (36)..(36): Selenocysteine
  MOD_RES (42)..(42): Selenocysteine
  MOD_RES (118)..(118): Selenocysteine
  MOD_RES (127)..(127): Selenocysteine
  MOD_RES (130)..(131): Selenocysteine
  MOD_RES (144)..(144): Selenocysteine
  MOD_RES (160)..(160): Selenocysteine
  MOD_RES (169)..(169): Selenocysteine
  MOD_RES (183)..(183): Selenocysteine
  MOD_RES (190)..(191): Selenocysteine
  MOD_RES (205)..(205): Selenocysteine
  MOD_RES (256)..(256): Selenocysteine
  MOD_RES (274)..(274): Selenocysteine
  MOD_RES (292)..(292): Selenocysteine
  MOD_RES (294)..(294): Selenocysteine
MXRARIGCFGPGGRARGXESAPEPSKRVPPGRSWQXQEVRQXRGANGLGPRAGSAGAKAPGPAQGAAQHGLGGSAGLRVRVSPLAMGSAALEILGLVLCLVGWGGLILACGLPMWQVXAFLDHNIVXAQXXWKGLWMSCVVQSXGHMQCKVYDSVLALSXEVQAARALXVSAVLLAFVALFVXLAGAQCXXCVAPGPAKARVALXGGVLYLFCGLLALVPLCWFANIVVREFYDPSVPVSQKYELGAALYIGWAAXALLMVGGCLLCCGAWVCXGRPDLSFPVKYSAPRRPXAXGDYDKKNYV

SEQ ID NO: 6285 - protein, 188 aa, Homo sapiens
  MOD_RES (8)..(8): Selenocysteine
  MOD_RES (18)..(19): Selenocysteine
  MOD_RES (29)..(30): Selenocysteine
  MOD_RES (38)..(38): Selenocysteine
  MOD_RES (46)..(46): Selenocysteine
  MOD_RES (79)..(79): Selenocysteine
  MOD_RES (106)..(106): Selenocysteine
  MOD_RES (123)..(123): Selenocysteine
  MOD_RES (126)..(126): Selenocysteine
  MOD_RES (137)..(137): Selenocysteine
  MOD_RES (183)..(183): Selenocysteine
MQAKYSSXRDMLDDDGDXXMSLHSQGSAXXRHPEPRRXAHRCSPCXEQWKWHGDNCYQFYKDSKSWEDCKYFCLSENSXMLKINKQEDLEFAASQSYSEFFYSYWXGLLRPDSGKAWLWMDGXPFXSELFHIIIDVXSPRSRDCVAILNGMIFSKDCKELKRCVCERRAGMVKPESLHVPPEXLGEGD

SEQ ID NO: 6286 - protein, 70 aa, Homo sapiens
  MOD_RES (8)..(8): Selenocysteine
  MOD_RES (18)..(19): Selenocysteine
  MOD_RES (29)..(30): Selenocysteine
  MOD_RES (38)..(38): Selenocysteine
  MOD_RES (46)..(46): Selenocysteine
  MOD_RES (53)..(53): Selenocysteine
  MOD_RES (56)..(56): Selenocysteine
MQAKYSSXRDMLDDDGDXXMSLHSQGSAXXRHPEPRRXEHRAPSSXWRPVALXLLXLCLVLLIGLAALGL

SEQ ID NO: 6287 - protein, 280 aa, Homo sapiens
  MOD_RES (8)..(8): Selenocysteine
  MOD_RES (18)..(19): Selenocysteine
  MOD_RES (29)..(30): Selenocysteine
  MOD_RES (38)..(38): Selenocysteine
  MOD_RES (46)..(46): Selenocysteine
  MOD_RES (53)..(53): Selenocysteine
  MOD_RES (56)..(56): Selenocysteine
  MOD_RES (81)..(81): Selenocysteine
  MOD_RES (85)..(85): Selenocysteine
  MOD_RES (96)..(96): Selenocysteine
  MOD_RES (138)..(138): Selenocysteine
  MOD_RES (171)..(171): Selenocysteine
  MOD_RES (198)..(198): Selenocysteine
  MOD_RES (215)..(215): Selenocysteine
  MOD_RES (218)..(218): Selenocysteine
  MOD_RES (229)..(229): Selenocysteine
  MOD_RES (275)..(275): Selenocysteine
MQAKYSSXRDMLDDDGDXXMSLHSQGSAXXRHPEPRRXEHRAPSSXWRPVALXLLXLCLVLLIGLAALGLLFFQYYQLSNXGQDXISQMEERLGNXSQELQSLQVQNIKLAGSLQHVAEKLCRELYNKAGAHRCSPCXEQWKWHGDNCYQFYKDSKSWEDCKYFCLSENSXMLKINKQEDLEFAASQSYSEFFYSYWXGLLRPDSGKAWLWMDGXPFXSELFHIIIDVXSPRSRDCVAILNGMIFSKDCKELKRCVCERRAGMVKPESLHVPPEXLGEGD

SEQ ID NO: 6288 - protein, 66 aa, Homo sapiens
  MOD_RES (8)..(8): Selenocysteine
  MOD_RES (18)..(19): Selenocysteine
  MOD_RES (29)..(30): Selenocysteine
  MOD_RES (38)..(38): Selenocysteine
  MOD_RES (49)..(49): Selenocysteine
  MOD_RES (53)..(53): Selenocysteine
MQAKYSSXRDMLDDDGDXXMSLHSQGSAXXRHPEPRRXGWSRVARSRLXAALXSLAQAILPPQPSE

SEQ ID NO: 6289 - protein, 247 aa, Homo sapiens
  MOD_RES (8)..(8): Selenocysteine
  MOD_RES (18)..(19): Selenocysteine
  MOD_RES (29)..(30): Selenocysteine
  MOD_RES (38)..(38): Selenocysteine
  MOD_RES (48)..(48): Selenocysteine
  MOD_RES (52)..(52): Selenocysteine
  MOD_RES (63)..(63): Selenocysteine
  MOD_RES (105)..(105): Selenocysteine
  MOD_RES (138)..(138): Selenocysteine
  MOD_RES (165)..(165): Selenocysteine
  MOD_RES (182)..(182): Selenocysteine
  MOD_RES (185)..(185): Selenocysteine
  MOD_RES (196)..(196): Selenocysteine
  MOD_RES (242)..(242): Selenocysteine
MQAKYSSXRDMLDDDGDXXMSLHSQGSAXXRHPEPRRXVFQYYQLSNXGQDXISQMEERLGNXSQELQSLQVQNIKLAGSLQHVAEKLCRELYNKAGAHRCSPCXEQWKWHGDNCYQFYKDSKSWEDCKYFCLSENSXMLKINKQEDLEFAASQSYSEFFYSYWXGLLRPDSGKAWLWMDGXPFXSELFHIIIDVXSPRSRDCVAILNGMIFSKDCKELKRCVCERRAGMVKPESLHVPPEXLGEGD

SEQ ID NO: 6290 - protein, 96 aa, Homo sapiens
  MOD_RES (11)..(11): Selenocysteine
  MOD_RES (29)..(29): Selenocysteine
  MOD_RES (38)..(38): Selenocysteine
  MOD_RES (43)..(43): Selenocysteine
  MOD_RES (60)..(60): Selenocysteine
  MOD_RES (91)..(91): Selenocysteine
FKGHKCSPCDXNWRYYGDSCYGFFRHNLXWEESKQYCXDMNAXLLKIDNRNIVEYIKARXHLIRWVGLSRQKSNEVWKWEDGSVISENMKXQIMIF

SEQ ID NO: 6291 - protein, 196 aa, Homo sapiens
  MOD_RES (9)..(9): Selenocysteine
  MOD_RES (14)..(14): Selenocysteine
  MOD_RES (37)..(37): Selenocysteine
  MOD_RES (39)..(39): Selenocysteine
  MOD_RES (60)..(60): Selenocysteine
  MOD_RES (71)..(71): Selenocysteine
  MOD_RES (89)..(89): Selenocysteine
  MOD_RES (98)..(98): Selenocysteine
  MOD_RES (103)..(103): Selenocysteine
  MOD_RES (120)..(120): Selenocysteine
  MOD_RES (173)..(173): Selenocysteine
  MOD_RES (190)..(190): Selenocysteine
MQDEDGYIXLNIKXRKPALISAVMQRNYLQGENENRXGXLQQLAKRFCQYVVKQSELKGXFKGHKCSPCDXNWRYYGDSCYGFFRHNLXWEESKQYCXDMNAXLLKIDNRNIVEYIKARXHLIRWVGLSRQKSNEVWKWEDGSVISENMFEFLEDGKGNMNCAYFHNGKMHPXFCENKHYLMCERKAGMXKVDQLP

SEQ ID NO: 6292 - protein, 229 aa, Homo sapiens
  MOD_RES (9)..(9): Selenocysteine
  MOD_RES (14)..(14): Selenocysteine
  MOD_RES (70)..(70): Selenocysteine
  MOD_RES (72)..(72): Selenocysteine
  MOD_RES (93)..(93): Selenocysteine
  MOD_RES (104)..(104): Selenocysteine
  MOD_RES (122)..(122): Selenocysteine
  MOD_RES (131)..(131): Selenocysteine
  MOD_RES (136)..(136): Selenocysteine
  MOD_RES (153)..(153): Selenocysteine
  MOD_RES (206)..(206): Selenocysteine
  MOD_RES (223)..(223): Selenocysteine
MQDEDGYIXLNIKXRKPALISVGSASSSWWRVMALILLILCVGMVVGLVALGIWSVMQRNYLQGENENRXGXLQQLAKRFCQYVVKQSELKGXFKGHKCSPCDXNWRYYGDSCYGFFRHNLXWEESKQYCXDMNAXLLKIDNRNIVEYIKARXHLIRWVGLSRQKSNEVWKWEDGSVISENMFEFLEDGKGNMNCAYFHNGKMHPXFCENKHYLMCERKAGMXKVDQLP

SEQ ID NO: 6293 - protein, 133 aa, Homo sapiens
  MOD_RES (36)..(36): Selenocysteine
  MOD_RES (40)..(40): Selenocysteine
  MOD_RES (92)..(92): Selenocysteine
  MOD_RES (95)..(95): Selenocysteine
  MOD_RES (116)..(116): Selenocysteine
  MOD_RES (120)..(120): Selenocysteine
AIRANCHQEPSVCLQAACPESWIGFQRKCFYFSDDXKNWXSSQRFCDSQDADLAQVESFQELNFLLRYKGPSDHWIGLSREQGQPWKWINGXEWXRQDRVLLCYPGWSAVVPSWLXAALXSLAQVSLPSQPPE

SEQ ID NO: 6294 - protein, 173 aa, Homo sapiens
  MOD_RES (12)..(12): Selenocysteine
  MOD_RES (25)..(25): Selenocysteine
  MOD_RES (72)..(72): Selenocysteine
  MOD_RES (76)..(76): Selenocysteine
  MOD_RES (128)..(128): Selenocysteine
  MOD_RES (131)..(131): Selenocysteine
CLHSKEHSIKAXLIWRLFFLIMFLXIIVCGMVAALSAIRANCHQEPSVCLQAACPESWIGFQRKCFYFSDDXKNWXSSQRFCDSQDADLAQVESFQELNFLLRYKGPSDHWIGLSREQGQPWKWINGXEWXRQLVMKEDGANLYVAKVSQVPRMNPRPVMVSYPGSRRVCLFE

SEQ ID NO: 6295 - protein, 106 aa, Homo sapiens
  MOD_RES (7)..(7): Selenocysteine
  MOD_RES (20)..(20): Selenocysteine
  MOD_RES (67)..(67): Selenocysteine
  MOD_RES (71)..(71): Selenocysteine
EHSIKAXLIWRLFFLIMFLXIIVCGMVAALSAIRANCHQEPSVCLQAACPESWIGFQRKCFYFSDDXKNWXSSQRFCDSQDADLAQVESFQELVSYPGSRRVCLFE

SEQ ID NO: 6296 - protein, 80 aa, Homo sapiens
  MOD_RES (4)..(4): Selenocysteine
  MOD_RES (51)..(51): Selenocysteine
  MOD_RES (55)..(55): Selenocysteine
MFLXIIVCGMVAALSAIRANCHQEPSVCLQAACPESWIGFQRKCFYFSDDXKNWXSSQRFCDSQDADLAQVESFQELVRK

SEQ ID NO: 6297 - protein, 154 aa, Homo sapiens
  MOD_RES (12)..(12): Selenocysteine
  MOD_RES (56)..(56): Selenocysteine
  MOD_RES (60)..(60): Selenocysteine
  MOD_RES (112)..(112): Selenocysteine
  MOD_RES (115)..(115): Selenocysteine
  MOD_RES (141)..(141): Selenocysteine
MHDSNNVEKDIXPSELPANPAIRANCHQEPSVCLQAACPESWIGFQRKCFYFSDDXKNWXSSQRFCDSQDADLAQVESFQELNFLLRYKGPSDHWIGLSREQGQPWKWINGXEWXRQFPILGAGECAYLNDKGASSARHYXERKWICSKSDIHV

SEQ ID NO: 6298 - protein, 95 aa, Homo sapiens
  MOD_RES (12)..(12): Selenocysteine
  MOD_RES (56)..(56): Selenocysteine
  MOD_RES (60)..(60): Selenocysteine
MHDSNNVEKDIXPSELPANPAIRANCHQEPSVCLQAACPESWIGFQRKCFYFSDDXKNWXSSQRFCDSQDADLAQVESFQELVSYPGSRRVCLFE

SEQ ID NO: 6299 - protein, 154 aa, Homo sapiens
  MOD_RES (12)..(12): Selenocysteine
  MOD_RES (33)..(33): Selenocysteine
  MOD_RES (46)..(46): Selenocysteine
  MOD_RES (93)..(93): Selenocysteine
  MOD_RES (97)..(97): Selenocysteine
  MOD_RES (149)..(149): Selenocysteine
  MOD_RES (152)..(152): Selenocysteine
MHDSNNVEKDIXPSELPANPGCLHSKEHSIKAXLIWRLFFLIMFLXIIVCGMVAALSAIRANCHQEPSVCLQAACPESWIGFQRKCFYFSDDXKNWXSSQRFCDSQDADLAQVESFQELNFLLRYKGPSDHWIGLSREQGQPWKWINGXEWXRQ

SEQ ID NO: 6300 - protein, 191 aa, Homo sapiens
  MOD_RES (12)..(12): Selenocysteine
  MOD_RES (33)..(33): Selenocysteine
  MOD_RES (46)..(46): Selenocysteine
  MOD_RES (93)..(93): Selenocysteine
  MOD_RES (97)..(97): Selenocysteine
  MOD_RES (149)..(149): Selenocysteine
  MOD_RES (152)..(152): Selenocysteine
  MOD_RES (178)..(178): Selenocysteine
MHDSNNVEKDIXPSELPANPGCLHSKEHSIKAXLIWRLFFLIMFLXIIVCGMVAALSAIRANCHQEPSVCLQAACPESWIGFQRKCFYFSDDXKNWXSSQRFCDSQDADLAQVESFQELNFLLRYKGPSDHWIGLSREQGQPWKWINGXEWXRQFPILGAGECAYLNDKGASSARHYXERKWICSKSDIHV

SEQ ID NO: 6301 - protein, 194 aa, Homo sapiens
  MOD_RES (12)..(12): Selenocysteine
  MOD_RES (33)..(33): Selenocysteine
  MOD_RES (46)..(46): Selenocysteine
  MOD_RES (93)..(93): Selenocysteine
  MOD_RES (97)..(97): Selenocysteine
  MOD_RES (149)..(149): Selenocysteine
  MOD_RES (152)..(152): Selenocysteine
MHDSNNVEKDIXPSELPANPGCLHSKEHSIKAXLIWRLFFLIMFLXIIVCGMVAALSAIRANCHQEPSVCLQAACPESWIGFQRKCFYFSDDXKNWXSSQRFCDSQDADLAQVESFQELNFLLRYKGPSDHWIGLSREQGQPWKWINGXEWXRQLVMKEDGANLYVAKVSQVPRMNPRPVMVSYPGSRRVCLFE

SEQ ID NO: 6302 - protein, 122 aa, Homo sapiens
  MOD_RES (12)..(12): Selenocysteine
  MOD_RES (33)..(33): Selenocysteine
  MOD_RES (46)..(46): Selenocysteine
  MOD_RES (93)..(93): Selenocysteine
  MOD_RES (97)..(97): Selenocysteine
MHDSNNVEKDIXPSELPANPGCLHSKEHSIKAXLIWRLFFLIMFLXIIVCGMVAALSAIRANCHQEPSVCLQAACPESWIGFQRKCFYFSDDXKNWXSSQRFCDSQDADLAQVESFQELVRK

SEQ ID NO: 6303 - protein, 132 aa, Homo sapiens
  MOD_RES (12)..(12): Selenocysteine
  MOD_RES (33)..(33): Selenocysteine
  MOD_RES (46)..(46): Selenocysteine
  MOD_RES (93)..(93): Selenocysteine
  MOD_RES (97)..(97): Selenocysteine
MHDSNNVEKDIXPSELPANPGCLHSKEHSIKAXLIWRLFFLIMFLXIIVCGMVAALSAIRANCHQEPSVCLQAACPESWIGFQRKCFYFSDDXKNWXSSQRFCDSQDADLAQVESFQELVSYPGSRRVCLFE

SEQ ID NO: 6304 - protein, 54 aa, Homo sapiens
  MOD_RES (12)..(12): Selenocysteine
  MOD_RES (22)..(22): Selenocysteine
  MOD_RES (33)..(33): Selenocysteine
  MOD_RES (39)..(39): Selenocysteine
MHDSNNVEKDIXPSELPANPGXSVSCCHVKKNXFASSSXIIVVCIQKSILLKLP

SEQ ID NO: 6305 - protein, 140 aa, Homo sapiens
  MOD_RES (6)..(6): Selenocysteine
  MOD_RES (50)..(50): Selenocysteine
  MOD_RES (54)..(54): Selenocysteine
  MOD_RES (106)..(106): Selenocysteine
  MOD_RES (109)..(109): Selenocysteine
VEKDIXPSELPANPAIRANCHQEPSVCLQAACPESWIGFQRKCFYFSDDXKNWXSSQRFCDSQDADLAQVESFQELNFLLRYKGPSDHWIGLSREQGQPWKWINGXEWXRQLVMKEDGANLYVAKVSQVPRMNPRPVMVR

SEQ ID NO: 6306 - protein, 84 aa, Homo sapiens
  MOD_RES (12)..(12): Selenocysteine
  MOD_RES (22)..(22): Selenocysteine
  MOD_RES (29)..(29): Selenocysteine
  MOD_RES (80)..(80): Selenocysteine
FKNEFKSSGINXASSAASKERXAPHKSNXGFPKLLCASLLIFFLLLAISFFIAFVRFHLPESARRICLFCGALRSRRSAXLAMG

SEQ ID NO: 6307 - protein, 237 aa, Homo sapiens
  MOD_RES (2)..(2): Selenocysteine
  MOD_RES (6)..(6): Selenocysteine
  MOD_RES (23)..(23): Selenocysteine
  MOD_RES (33)..(33): Selenocysteine
  MOD_RES (40)..(40): Selenocysteine
  MOD_RES (80)..(81): Selenocysteine
  MOD_RES (87)..(88): Selenocysteine
  MOD_RES (101)..(101): Selenocysteine
  MOD_RES (122)..(122): Selenocysteine
  MOD_RES (146)..(146): Selenocysteine
  MOD_RES (182)..(182): Selenocysteine
  MOD_RES (189)..(189): Selenocysteine
MXSEIXYAEVRFKNEFKSSGINXASSAASKERXAPHKSNXGFPKLLCASLLIFFLLLAISFFIAFVIFFQKYSQLLEKKXXKELVHXXLECVKKNMPVEEXAWSCCPKNWKSFSSNCYFISXESASWQDSEKDCARMEAHLLVINXQEEQDFIFQNLQEESAYFVGLSDPEGQRHWQWVDQXPYNESSXFWHPREPSDPNERCVVLNFRKSPKRWGWNDVNCLGPQRSVCEMMKIHL

SEQ ID NO: 6308 - protein, 204 aa, Homo sapiens
  MOD_RES (2)..(2): Selenocysteine
  MOD_RES (6)..(6): Selenocysteine
  MOD_RES (23)..(23): Selenocysteine
  MOD_RES (33)..(33): Selenocysteine
  MOD_RES (40)..(40): Selenocysteine
  MOD_RES (68)..(68): Selenocysteine
  MOD_RES (89)..(89): Selenocysteine
  MOD_RES (113)..(113): Selenocysteine
  MOD_RES (149)..(149): Selenocysteine
  MOD_RES (156)..(156): Selenocysteine
MXSEIXYAEVRFKNEFKSSGINXASSAASKERXAPHKSNXGFPKLLCASLLIFFLLLAISFFIAFVKXAWSCCPKNWKSFSSNCYFISXESASWQDSEKDCARMEAHLLVINXQEEQDFIFQNLQEESAYFVGLSDPEGQRHWQWVDQXPYNESSXFWHPREPSDPNERCVVLNFRKSPKRWGWNDVNCLGPQRSVCEMMKIHL

SEQ ID NO: 6309 - protein, 165 aa, Homo sapiens
  MOD_RES (2)..(2): Selenocysteine
  MOD_RES (6)..(6): Selenocysteine
  MOD_RES (23)..(23): Selenocysteine
  MOD_RES (29)..(29): Selenocysteine
  MOD_RES (50)..(50): Selenocysteine
  MOD_RES (74)..(74): Selenocysteine
  MOD_RES (110)..(110): Selenocysteine
  MOD_RES (117)..(117): Selenocysteine
MXSEIXYAEVRFKNEFKSSGINXASSAEXAWSCCPKNWKSFSSNCYFISXESASWQDSEKDCARMEAHLLVINXQEEQDFIFQNLQEESAYFVGLSDPEGQRHWQWVDQXPYNESSXFWHPREPSDPNERCVVLNFRKSPKRWGWNDVNCLGPQRSVCEMMKIHL

SEQ ID NO: 6310 - protein, 198 aa, Homo sapiens
  MOD_RES (2)..(2): Selenocysteine
  MOD_RES (6)..(6): Selenocysteine
  MOD_RES (23)..(23): Selenocysteine
  MOD_RES (41)..(42): Selenocysteine
  MOD_RES (48)..(49): Selenocysteine
  MOD_RES (62)..(62): Selenocysteine
  MOD_RES (83)..(83): Selenocysteine
  MOD_RES (107)..(107): Selenocysteine
  MOD_RES (143)..(143): Selenocysteine
  MOD_RES (150)..(150): Selenocysteine
MXSEIXYAEVRFKNEFKSSGINXASSAVFFQKYSQLLEKKXXKELVHXXLECVKKNMPVEEXAWSCCPKNWKSFSSNCYFISXESASWQDSEKDCARMEAHLLVINXQEEQDFIFQNLQEESAYFVGLSDPEGQRHWQWVDQXPYNESSXFWHPREPSDPNERCVVLNFRKSPKRWGWNDVNCLGPQRSVCEMMKIHL

SEQ ID NO: 6311 - protein, 88 aa, Homo sapiens
  MOD_RES (7)..(7): Selenocysteine
  MOD_RES (10)..(10): Selenocysteine
  MOD_RES (21)..(21): Selenocysteine
  MOD_RES (27)..(27): Selenocysteine
  MOD_RES (45)..(45): Selenocysteine
  MOD_RES (81)..(81): Selenocysteine
  MOD_RES (88)..(88): Selenocysteine
DWSCCPXPWXSFQSSCYFISXGMQSWXKSQKNCSVMGADLVVINXREEQDFIIQNLKRNSSYFLGLSDPGGRRHWQWVDQXPYNENVX

SEQ ID NO: 6312 - protein, 138 aa, Homo sapiens
  MOD_RES (34)..(34): Selenocysteine
  MOD_RES (45)..(45): Selenocysteine
  MOD_RES (48)..(48): Selenocysteine
  MOD_RES (59)..(59): Selenocysteine
  MOD_RES (65)..(65): Selenocysteine
  MOD_RES (83)..(83): Selenocysteine
  MOD_RES (119)..(119): Selenocysteine
  MOD_RES (126)..(126): Selenocysteine
EEEPQDREKGLWWFQLKVWSMAVVSILLLSVCFXVSSVDWSCCPXPWXSFQSSCYFISXGMQSWXKSQKNCSVMGADLVVINXREEQDFIIQNLKRNSSYFLGLSDPGGRRHWQWVDQXPYNENVXFWHSGEPNNLDE

SEQ ID NO: 6313 - protein, 213 aa, Homo sapiens
  MOD_RES (37)..(37): Selenocysteine
  MOD_RES (51)..(51): Selenocysteine
  MOD_RES (69)..(69): Selenocysteine
  MOD_RES (85)..(85): Selenocysteine
  MOD_RES (88)..(88): Selenocysteine
  MOD_RES (99)..(99): Selenocysteine
  MOD_RES (105)..(105): Selenocysteine
  MOD_RES (123)..(123): Selenocysteine
  MOD_RES (159)..(159): Selenocysteine
  MOD_RES (166)..(166): Selenocysteine
MVPEEEPQDREKGLWWFQLKVWSMAVVSILLLSVCFXVSSVVPHNFMYSKXVKRLSKLREYQQYHPSLXCVMEGKDIEDWSCCPXPWXSFQSSCYFISXGMQSWXKSQKNCSVMGADLVVINXREEQDFIIQNLKRNSSYFLGLSDPGGRRHWQWVDQXPYNENVXFWHSGEPNNLDERCAIINFRSSEEWGWNDIHCHVPQKSICKMKKIYI

SEQ ID NO: 6314 - protein, 182 aa, Homo sapiens
  MOD_RES (20)..(20): Selenocysteine
  MOD_RES (38)..(38): Selenocysteine
  MOD_RES (54)..(54): Selenocysteine
  MOD_RES (57)..(57): Selenocysteine
  MOD_RES (68)..(68): Selenocysteine
  MOD_RES (74)..(74): Selenocysteine
  MOD_RES (92)..(92): Selenocysteine
  MOD_RES (128)..(128): Selenocysteine
  MOD_RES (135)..(135): Selenocysteine
MVPEEEPQDRVPHNFMYSKXVKRLSKLREYQQYHPSLXCVMEGKDIEDWSCCPXPWXSFQSSCYFISXGMQSWXKSQKNCSVMGADLVVINXREEQDFIIQNLKRNSSYFLGLSDPGGRRHWQWVDQXPYNENVXFWHSGEPNNLDERCAIINFRSSEEWGWNDIHCHVPQKSICKMKKIYI

SEQ ID NO: 6315 - protein, 144 aa, Homo sapiens
  MOD_RES (42)..(42): Selenocysteine
  MOD_RES (53)..(53): Selenocysteine
  MOD_RES (80)..(80): Selenocysteine
  MOD_RES (100)..(100): Selenocysteine
  MOD_RES (104)..(104): Selenocysteine
  MOD_RES (121)..(121): Selenocysteine
  MOD_RES (124)..(124): Selenocysteine
MGLEKPQSKLEGGMHPQLIPSVIAVVFILLLSVCFIASCLVXHHNFSRCKRGXGVHKLEHHAKLKCIKEKSELKSAEGSXWNCCPIDWRAFQSNCYFPLXDNKXWAESERNCSGMGAHLMXISXEAEQNFIIQFLDRRLSYFLG

SEQ ID NO: 6316 - protein, 215 aa, Homo sapiens
  MOD_RES (42)..(42): Selenocysteine
  MOD_RES (53)..(53): Selenocysteine
  MOD_RES (80)..(80): Selenocysteine
  MOD_RES (100)..(100): Selenocysteine
  MOD_RES (104)..(104): Selenocysteine
  MOD_RES (121)..(121): Selenocysteine
  MOD_RES (124)..(124): Selenocysteine
  MOD_RES (160)..(160): Selenocysteine
  MOD_RES (212)..(213): Selenocysteine
MGLEKPQSKLEGGMHPQLIPSVIAVVFILLLSVCFIASCLVXHHNFSRCKRGXGVHKLEHHAKLKCIKEKSELKSAEGSXWNCCPIDWRAFQSNCYFPLXDNKXWAESERNCSGMGAHLMXISXEAEQNFIIQFLDRRLSYFLGLRDENAKGQWRWVDQXPFNPRRVFWHKNEPDNSQGENCVVLVYNQDKWAWNDVPCNFEASRICKIPGXXLN

SEQ ID NO: 6317 - protein, 174 aa, Homo sapiens
  MOD_RES (9)..(9): Selenocysteine
  MOD_RES (12)..(12): Selenocysteine
  MOD_RES (25)..(25): Selenocysteine
  MOD_RES (40)..(40): Selenocysteine
  MOD_RES (45)..(45): Selenocysteine
  MOD_RES (51)..(51): Selenocysteine
  MOD_RES (64)..(64): Selenocysteine
  MOD_RES (111)..(111): Selenocysteine
  MOD_RES (114)..(114): Selenocysteine
  MOD_RES (130)..(130): Selenocysteine
  MOD_RES (136)..(136): Selenocysteine
  MOD_RES (151)..(151): Selenocysteine
MNSSKSSEXQCXERGCFSSQMFLWXVAGIPILFLSACFIXRCVVXFRIFQXCDEKKFQLPENFXELSCYNYGSGIIVPKEFLSYKKPKMREFFIGLSDQVVEGQWQWVDGXPLXKSLSFWDVGEPNNIAXLEDCAXMRDSSNPRQNWNDVXCFLNYFRICEMVGINPLNKGKSL

SEQ ID NO: 6318 - protein, 92 aa, Homo sapiens
  MOD_RES (9)..(9): Selenocysteine
  MOD_RES (12)..(12): Selenocysteine
  MOD_RES (25)..(25): Selenocysteine
  MOD_RES (40)..(40): Selenocysteine
  MOD_RES (45)..(45): Selenocysteine
  MOD_RES (51)..(51): Selenocysteine
  MOD_RES (64)..(64): Selenocysteine
  MOD_RES (88)..(88): Selenocysteine
MNSSKSSEXQCXERGCFSSQMFLWXVAGIPILFLSACFIXRCVVXFRIFQXCDEKKFQLPENFXELSCYNYGSGIIVPKVNIKIYKAXFSGF

SEQ ID NO: 6319 - protein, 219 aa, Homo sapiens
  MOD_RES (9)..(9): Selenocysteine
  MOD_RES (12)..(12): Selenocysteine
  MOD_RES (25)..(25): Selenocysteine
  MOD_RES (40)..(40): Selenocysteine
  MOD_RES (45)..(45): Selenocysteine
  MOD_RES (51)..(51): Selenocysteine
  MOD_RES (64)..(64): Selenocysteine
  MOD_RES (96)..(96): Selenocysteine
  MOD_RES (98)..(98): Selenocysteine
  MOD_RES (156)..(156): Selenocysteine
  MOD_RES (159)..(159): Selenocysteine
  MOD_RES (175)..(175): Selenocysteine
  MOD_RES (181)..(181): Selenocysteine
  MOD_RES (196)..(196): Selenocysteine
MNSSKSSEXQCXERGCFSSQMFLWXVAGIPILFLSACFIXRCVVXFRIFQXCDEKKFQLPENFXELSCYNYGSGSVKNCCPLNWEYFQSSCYFFSXDXISWALSLKNCSAMGAHLVVINSQEEQEFLSYKKPKMREFFIGLSDQVVEGQWQWVDGXPLXKSLSFWDVGEPNNIAXLEDCAXMRDSSNPRQNWNDVXCFLNYFRICEMVGINPLNKGKSL

SEQ ID NO: 6320 - protein, 94 aa, Homo sapiens
  MOD_RES (1)..(1): Any amino acid
  MOD_RES (4)..(4): Selenocysteine
  MOD_RES (36)..(36): Selenocysteine
  MOD_RES (38)..(38): Selenocysteine
XNFXELSCYNYGSGSVKNCCPLNWEYFQSSCYFFSXDXISWALSLKNCSAMGAHLVVINSQEEQLLGCRGAQQHSYPGGLCHHERLFKPKAKLE

SEQ ID NO: 6321 - protein, 387 aa, Homo sapiens
  MOD_RES (20)..(21): Selenocysteine
  MOD_RES (35)..(35): Selenocysteine
  MOD_RES (82)..(82): Selenocysteine
  MOD_RES (105)..(105): Selenocysteine
  MOD_RES (128)..(128): Selenocysteine
  MOD_RES (151)..(151): Selenocysteine
  MOD_RES (174)..(174): Selenocysteine
  MOD_RES (197)..(197): Selenocysteine
  MOD_RES (220)..(220): Selenocysteine
  MOD_RES (243)..(243): Selenocysteine
  MOD_RES (247)..(247): Selenocysteine
  MOD_RES (261)..(261): Selenocysteine
  MOD_RES (282)..(282): Selenocysteine
  MOD_RES (296)..(296): Selenocysteine
  MOD_RES (307)..(307): Selenocysteine
  MOD_RES (326)..(326): Selenocysteine
MSDSKEPRVQQLGLLEEDPXXNFQFQQIHGHKSSXGCLGHGALVLQLLSFMLLAGVLPRLSKVPSSLSQEQSEQDAIYQNLXQLKAAVGELSEKSKLQEIYQELXQLKAAVGELPEKSKLQEIYQELXRLKAAVGELPEKSKLQEIYQELXRLKAAVGELPEKSKLQEIYQELXRLKAAVGELPEKSKLQEIYQELXELKAAVGELPEKSKLQEIYQELXQLKAAVGELPDQSKQQQIYQELXDLKXAFERLCRHCPKDWXFFQGNCYFMSNSQRNWHDSVXACQEVRAQLVVIKXAEEQNFLQLQXSRSNRFSWMGLSDLNQEGXWQWVDGSPLSPSFQRYWNSGEPNNSGNEDCAEFSGSGWNDNRCDVDNYWICKKPAACFRDE

SEQ ID NO: 6322 - protein, 232 aa, Homo sapiens
  MOD_RES (20)..(21): Selenocysteine
  MOD_RES (43)..(43): Selenocysteine
  MOD_RES (94)..(94): Selenocysteine
  MOD_RES (117)..(117): Selenocysteine
  MOD_RES (140)..(140): Selenocysteine
  MOD_RES (163)..(163): Selenocysteine
  MOD_RES (181)..(181): Selenocysteine
  MOD_RES (202)..(202): Selenocysteine
  MOD_RES (216)..(216): Selenocysteine
  MOD_RES (230)..(230): Selenocysteine
MSDSKEPRVQQLGLLEEDPXXSGIRLFPRDFQFQQIHGHKSSXGCLGHGALVLQLLSFMLLAGVLVAILVQVSKVPSSLSQEQSEQDAIYQNLXQLKAAVGELSEKSKLQEIYQELXQLKAAVGELPEKSKLQEIYQELXRLKAAVGELPEKSKLQEIYQELXRLKAAVERLCRHCPKDWXFFQGNCYFMSNSQRNWHDSVXACQEVRAQLVVIKXAEEQLPAVLEQWRXQQ

SEQ ID NO: 6323 - protein, 376 aa, Homo sapiens
  MOD_RES (20)..(21): Selenocysteine
  MOD_RES (43)..(43): Selenocysteine
  MOD_RES (94)..(94): Selenocysteine
  MOD_RES (117)..(117): Selenocysteine
  MOD_RES (140)..(140): Selenocysteine
  MOD_RES (163)..(163): Selenocysteine
  MOD_RES (186)..(186): Selenocysteine
  MOD_RES (209)..(209): Selenocysteine
  MOD_RES (232)..(232): Selenocysteine
  MOD_RES (236)..(236): Selenocysteine
  MOD_RES (250)..(250): Selenocysteine
  MOD_RES (271)..(271): Selenocysteine
  MOD_RES (285)..(285): Selenocysteine
  MOD_RES (296)..(296): Selenocysteine
  MOD_RES (315)..(315): Selenocysteine
MSDSKEPRVQQLGLLEEDPXXSGIRLFPRDFQFQQIHGHKSSXGCLGHGALVLQLLSFMLLAGVLVAILVQVSKVPSSLSQEQSEQDAIYQNLXQLKAAVGELSEKSKLQEIYQELXQLKAAVGELPEKSKLQEIYQELXRLKAAVGELPEKSKLQEIYQELXRLKAAVGELPEKSKLQEIYQELXELKAAVGELPEKSKLQEIYQELXQLKAAVGELPDQSKQQQIYQELXDLKXAFERLCRHCPKDWXFFQGNCYFMSNSQRNWHDSVXACQEVRAQLVVIKXAEEQNFLQLQXSRSNRFSWMGLSDLNQEGXWQWVDGSPLSPSFQRYWNSGEPNNSGNEDCAEFSGSGWNDNRCDVDNYWICKKPAACFRDE

SEQ ID NO: 6324 - protein, 399 aa, Homo sapiens
  MOD_RES (20)..(21): Selenocysteine
  MOD_RES (43)..(43): Selenocysteine
  MOD_RES (94)..(94): Selenocysteine
  MOD_RES (117)..(117): Selenocysteine
  MOD_RES (140)..(140): Selenocysteine
  MOD_RES (163)..(163): Selenocysteine
  MOD_RES (186)..(186): Selenocysteine
  MOD_RES (209)..(209): Selenocysteine
  MOD_RES (232)..(232): Selenocysteine
  MOD_RES (255)..(255): Selenocysteine
  MOD_RES (259)..(259): Selenocysteine
  MOD_RES (273)..(273): Selenocysteine
  MOD_RES (294)..(294): Selenocysteine
  MOD_RES (308)..(308): Selenocysteine
  MOD_RES (319)..(319): Selenocysteine
  MOD_RES (338)..(338): Selenocysteine
MSDSKEPRVQQLGLLEEDPXXSGIRLFPRDFQFQQIHGHKSSXGCLGHGALVLQLLSFMLLAGVLVAILVQVSKVPSSLSQEQSEQDAIYQNLXQLKAAVGELSEKSKLQEIYQELXQLKAAVGELPEKSKLQEIYQELXRLKAAVGELPEKSKLQEIYQELXRLKAAVGELPEKSKLQEIYQELXRLKAAVGELPEKSKLQEIYQELXELKAAVGELPEKSKLQEIYQELXQLKAAVGELPDQSKQQQIYQELXDLKXAFERLCRHCPKDWXFFQGNCYFMSNSQRNWHDSVXACQEVRAQLVVIKXAEEQNFLQLQXSRSNRFSWMGLSDLNQEGXWQWVDGSPLSPSFQRYWNSGEPNNSGNEDCAEFSGSGWNDNRCDVDNYWICKKPAACFRDE

SEQ ID NO: 6325 - protein, 263 aa, Homo sapiens
  MOD_RES (20)..(21): Selenocysteine
  MOD_RES (43)..(43): Selenocysteine
  MOD_RES (73)..(73): Selenocysteine
  MOD_RES (96)..(96): Selenocysteine
  MOD_RES (119)..(119): Selenocysteine
  MOD_RES (137)..(137): Selenocysteine
  MOD_RES (158)..(158): Selenocysteine
  MOD_RES (172)..(172): Selenocysteine
  MOD_RES (183)..(183): Selenocysteine
  MOD_RES (202)..(202): Selenocysteine
MSDSKEPRVQQLGLLEEDPXXSGIRLFPRDFQFQQIHGHKSSXVPFLLGPVSKVPSSLSQEQSEQDAIYQNLXQLKAAVGELSEKSKLQEIYQELXQLKAAVGELPEKSKLQEIYQELXRLKAAVERLCRHCPKDWXFFQGNCYFMSNSQRNWHDSVXACQEVRAQLVVIKXAEEQNFLQLQXSRSNRFSWMGLSDLNQEGXWQWVDGSPLSPSFQRYWNSGEPNNSGNEDCAEFSGSGWNDNRCDVDNYWICKKPAACFRDE

SEQ ID NO: 6326 - protein, 332 aa, Homo sapiens
  MOD_RES (20)..(21): Selenocysteine
  MOD_RES (43)..(43): Selenocysteine
  MOD_RES (73)..(73): Selenocysteine
  MOD_RES (96)..(96): Selenocysteine
  MOD_RES (119)..(119): Selenocysteine
  MOD_RES (142)..(142): Selenocysteine
  MOD_RES (165)..(165): Selenocysteine
  MOD_RES (188)..(188): Selenocysteine
  MOD_RES (206)..(206): Selenocysteine
  MOD_RES (227)..(227): Selenocysteine
  MOD_RES (241)..(241): Selenocysteine
  MOD_RES (252)..(252): Selenocysteine
  MOD_RES (271)..(271): Selenocysteine
MSDSKEPRVQQLGLLEEDPXXSGIRLFPRDFQFQQIHGHKSSXVPFLLGPVSKVPSSLSQEQSEQDAIYQNLXQLKAAVGELSEKSKLQEIYQELXQLKAAVGELPEKSKLQEIYQELXRLKAAVGELPEKSKLQEIYQELXRLKAAVGELPEKSKLQEIYQELXELKAAVGELPEKSKLQEIYQELXQLKAAVERLCRHCPKDWXFFQGNCYFMSNSQRNWHDSVXACQEVRAQLVVIKXAEEQNFLQLQXSRSNRFSWMGLSDLNQEGXWQWVDGSPLSPSFQRYWNSGEPNNSGNEDCAEFSGSGWNDNRCDVDNYWICKKPAACFRDE

SEQ ID NO: 6327 - protein, 332 aa, Homo sapiens
  MOD_RES (20)..(21): Selenocysteine
  MOD_RES (43)..(43): Selenocysteine
  MOD_RES (73)..(73): Selenocysteine
  MOD_RES (96)..(96): Selenocysteine
  MOD_RES (119)..(119): Selenocysteine
  MOD_RES (142)..(142): Selenocysteine
  MOD_RES (165)..(165): Selenocysteine
  MOD_RES (188)..(188): Selenocysteine
  MOD_RES (206)..(206): Selenocysteine
  MOD_RES (227)..(227): Selenocysteine
  MOD_RES (241)..(241): Selenocysteine
  MOD_RES (252)..(252): Selenocysteine
  MOD_RES (271)..(271): Selenocysteine
MSDSKEPRVQQLGLLEEDPXXSGIRLFPRDFQFQQIHGHKSSXVPFLLGPVSKVPSSLSQEQSEQDAIYQNLXQLKAAVGELSEKSKLQEIYQELXQLKAAVGELPEKSKLQEIYQELXRLKAAVGELPEKSKLQEIYQELXRLKAAVGELPEKSKLQEIYQELXRLKAAVGELPEKSKLQEIYQELXELKAAVERLCRHCPKDWXFFQGNCYFMSNSQRNWHDSVXACQEVRAQLVVIKXAEEQNFLQLQXSRSNRFSWMGLSDLNQEGXWQWVDGSPLSPSFQRYWNSGEPNNSGNEDCAEFSGSGWNDNRCDVDNYWICKKPAACFRDE

SEQ ID NO: 6328 - protein, 282 aa, Homo sapiens
  MOD_RES (20)..(21): Selenocysteine
  MOD_RES (43)..(43): Selenocysteine
  MOD_RES (66)..(66): Selenocysteine
  MOD_RES (89)..(89): Selenocysteine
  MOD_RES (112)..(112): Selenocysteine
  MOD_RES (135)..(135): Selenocysteine
  MOD_RES (158)..(158): Selenocysteine
  MOD_RES (181)..(181): Selenocysteine
  MOD_RES (204)..(204): Selenocysteine
  MOD_RES (227)..(227): Selenocysteine
  MOD_RES (231)..(231): Selenocysteine
  MOD_RES (245)..(245): Selenocysteine
  MOD_RES (266)..(266): Selenocysteine
  MOD_RES (280)..(280): Selenocysteine
MSDSKEPRVQQLGLLEEDPXXSGIRLFPRDFQFQQIHGHKSSXVSKVPSSLSQEQSEQDAIYQNLXQLKAAVGELSEKSKLQEIYQELXQLKAAVGELPEKSKLQEIYQELXRLKAAVGELPEKSKLQEIYQELXRLKAAVGELPEKSKLQEIYQELXRLKAAVGELPEKSKLQEIYQELXELKAAVGELPEKSKLQEIYQELXQLKAAVGELPDQSKQQQIYQELXDLKXAFERLCRHCPKDWXFFQGNCYFMSNSQRNWHDSVXACQEVRAQLVVIKXAE

SEQ ID NO: 6329 - protein, 348 aa, Homo sapiens
  MOD_RES (66)..(66): Selenocysteine
  MOD_RES (89)..(89): Selenocysteine
  MOD_RES (112)..(112): Selenocysteine
  MOD_RES (135)..(135): Selenocysteine
  MOD_RES (158)..(158): Selenocysteine
  MOD_RES (181)..(181): Selenocysteine
  MOD_RES (204)..(204): Selenocysteine
  MOD_RES (208)..(208): Selenocysteine
  MOD_RES (222)..(222): Selenocysteine
  MOD_RES (243)..(243): Selenocysteine
  MOD_RES (257)..(257): Selenocysteine
  MOD_RES (268)..(268): Selenocysteine
  MOD_RES (287)..(287): Selenocysteine
MSDSKEPRVQQLGLLGCLGHGALVLQLLSFMLLAGVLVAILVQVSKVPSSLSQEQSEQDAIYQNLXQLKAAVGELSEKSKLQEIYQELXQLKAAVGELPEKSKLQEIYQELXRLKAAVGELPEKSKLQEIYQELXRLKAAVGELPEKSKLQEIYQELXELKAAVGELPEKSKLQEIYQELXQLKAAVGELPDQSKQQQIYQELXDLKXAFERLCRHCPKDWXFFQGNCYFMSNSQRNWHDSVXACQEVRAQLVVIKXAEEQNFLQLQXSRSNRFSWMGLSDLNQEGXWQWVDGSPLSPSFQRYWNSGEPNNSGNEDCAEFSGSGWNDNRCDVDNYWICKKPAACFRDE

SEQ ID NO: 6330 - protein, 296 aa, Homo sapiens
  MOD_RES (66)..(66): Selenocysteine
  MOD_RES (89)..(89): Selenocysteine
  MOD_RES (112)..(112): Selenocysteine
  MOD_RES (135)..(135): Selenocysteine
  MOD_RES (158)..(158): Selenocysteine
  MOD_RES (181)..(181): Selenocysteine
  MOD_RES (204)..(204): Selenocysteine
  MOD_RES (227)..(227): Selenocysteine
  MOD_RES (231)..(231): Selenocysteine
  MOD_RES (245)..(245): Selenocysteine
  MOD_RES (266)..(266): Selenocysteine
  MOD_RES (280)..(280): Selenocysteine
  MOD_RES (294)..(294): Selenocysteine
MSDSKEPRVQQLGLLGCLGHGALVLQLLSFMLLAGVLVAILVQVSKVPSSLSQEQSEQDAIYQNLXQLKAAVGELSEKSKLQEIYQELXQLKAAVGELPEKSKLQEIYQELXRLKAAVGELPEKSKLQEIYQELXRLKAAVGELPEKSKLQEIYQELXRLKAAVGELPEKSKLQEIYQELXELKAAVGELPEKSKLQEIYQELXQLKAAVGELPDQSKQQQIYQELXDLKXAFERLCRHCPKDWXFFQGNCYFMSNSQRNWHDSVXACQEVRAQLVVIKXAEEQLPAVLEQWRXQQ

SEQ ID NO: 6331 - protein, 53 aa, Homo sapiens
  MOD_RES (21)..(21): Selenocysteine
  MOD_RES (39)..(41): Selenocysteine
  MOD_RES (46)..(46): Selenocysteine
MNWHMIISGLIVVVLKVVGMXLFLLYFPQIFNKSNDGFXXXRSYGXEVSSGHN

SEQ ID NO: 6332 - protein, 155 aa, Homo sapiens
  MOD_RES (21)..(21): Selenocysteine
  MOD_RES (39)..(41): Selenocysteine
  MOD_RES (46)..(46): Selenocysteine
  MOD_RES (64)..(64): Selenocysteine
  MOD_RES (82)..(82): Selenocysteine
  MOD_RES (88)..(88): Selenocysteine
  MOD_RES (99)..(99): Selenocysteine
  MOD_RES (145)..(145): Selenocysteine
  MOD_RES (153)..(153): Selenocysteine
MNWHMIISGLIVVVLKVVGMXLFLLYFPQIFNKSNDGFXXXRSYGXVCPKDWEFYQARCFFLSXSESSWNESRDFCKGKGSXLAIVNXPEKLKFLQDIXDAEKYFIGLIYHREEKRWRWINNSVFNGKYVNMPQFPGDLGLLQKXKPEIAGFXLE

SEQ ID NO: 6333 - protein, 165 aa, Homo sapiens
  MOD_RES (21)..(21): Selenocysteine
  MOD_RES (39)..(41): Selenocysteine
  MOD_RES (46)..(46): Selenocysteine
  MOD_RES (64)..(64): Selenocysteine
  MOD_RES (82)..(82): Selenocysteine
  MOD_RES (88)..(88): Selenocysteine
  MOD_RES (99)..(99): Selenocysteine
  MOD_RES (130)..(130): Selenocysteine
  MOD_RES (140)..(140): Selenocysteine
  MOD_RES (144)..(144): Selenocysteine
  MOD_RES (146)..(146): Selenocysteine
MNWHMIISGLIVVVLKVVGMXLFLLYFPQIFNKSNDGFXXXRSYGXVCPKDWEFYQARCFFLSXSESSWNESRDFCKGKGSXLAIVNXPEKLKFLQDIXDAEKYFIGLIYHREEKRWRWINNSVFNGNVXNQNQNFNCAXIGLXKXFDAASCDISYRRICEKNAK

SEQ ID NO: 6334 - protein, 188 aa, Homo sapiens
  MOD_RES (21)..(21): Selenocysteine
  MOD_RES (39)..(41): Selenocysteine
  MOD_RES (46)..(46): Selenocysteine
  MOD_RES (63)..(64): Selenocysteine
  MOD_RES (69)..(69): Selenocysteine
  MOD_RES (87)..(87): Selenocysteine
  MOD_RES (105)..(105): Selenocysteine
  MOD_RES (111)..(111): Selenocysteine
  MOD_RES (122)..(122): Selenocysteine
  MOD_RES (153)..(153): Selenocysteine
  MOD_RES (163)..(163): Selenocysteine
  MOD_RES (167)..(167): Selenocysteine
  MOD_RES (169)..(169): Selenocysteine
MNWHMIISGLIVVVLKVVGMXLFLLYFPQIFNKSNDGFXXXRSYGXVSQIFGSSSPSPNGFIXXRSYGXVCPKDWEFYQARCFFLSXSESSWNESRDFCKGKGSXLAIVNXPEKLKFLQDIXDAEKYFIGLIYHREEKRWRWINNSVFNGNVXNQNQNFNCAXIGLXKXFDAASCDISYRRICEKNAK

SEQ ID NO: 6335 - protein, 84 aa, Homo sapiens
  MOD_RES (18)..(18): Selenocysteine
  MOD_RES (49)..(49): Selenocysteine
  MOD_RES (59)..(59): Selenocysteine
  MOD_RES (63)..(63): Selenocysteine
  MOD_RES (65)..(65): Selenocysteine
MVSPPPGAMEQKFLQDIXDAEKYFIGLIYHREEKRWRWINNSVFNGNVXNQNQNFNCAXIGLXKXFDAASCDISYRRICEKNAK

SEQ ID NO: 6336 - protein, 209 aa, Homo sapiens
  MOD_RES (10)..(10): Selenocysteine
  MOD_RES (42)..(42): Selenocysteine
  MOD_RES (46)..(46): Selenocysteine
  MOD_RES (50)..(50): Selenocysteine
  MOD_RES (65)..(65): Selenocysteine
  MOD_RES (71)..(71): Selenocysteine
  MOD_RES (119)..(119): Selenocysteine
  MOD_RES (155)..(155): Selenocysteine
  MOD_RES (185)..(185): Selenocysteine
  MOD_RES (196)..(196): Selenocysteine
MMQEQQPQSXEKRGWLSLRLWSVAGISIALLSACFIVSCVVXYHFXYGEXGKRLSELHSYHSSLXCFSEGXKVPAWGCCPASWKSFGSSCYFISSEEKVWSKSEQNCVEMGAHLVVFNXEAEQNFIVQQLNESFSYFLGLSDPQGNNNWQWIDKXPYEKNVRFWHLGEPNHSAEQCASIVFWKPXGWGWNDVICEXRRNSICEMNKIYL

SEQ ID NO: 6337 - protein, 45 aa, Homo sapiens
  MOD_RES (16)..(16): Selenocysteine
  MOD_RES (26)..(26): Selenocysteine
  MOD_RES (40)..(40): Selenocysteine
  MOD_RES (45)..(45): Selenocysteine
MEYHPDLENLDEDGYXQLHFDSQSNXRIAVVSEKGIYSKXSVFPX

SEQ ID NO: 6338 - protein, 77 aa, Homo sapiens
  MOD_RES (16)..(16): Selenocysteine
  MOD_RES (26)..(26): Selenocysteine
  MOD_RES (66)..(66): Selenocysteine
MEYHPDLENLDEDGYXQLHFDSQSNXRIAVVSEKGSCAASPPWRLIAVILGILCLVILVIAVVLGXMAGFKAVEFKG

SEQ ID NO: 6339 - protein, 247 aa, Homo sapiens
  MOD_RES (16)..(16): Selenocysteine
  MOD_RES (26)..(26): Selenocysteine
  MOD_RES (66)..(66): Selenocysteine
  MOD_RES (78)..(78): Selenocysteine
  MOD_RES (96)..(96): Selenocysteine
  MOD_RES (105)..(105): Selenocysteine
  MOD_RES (107)..(107): Selenocysteine
  MOD_RES (112)..(113): Selenocysteine
  MOD_RES (188)..(188): Selenocysteine
  MOD_RES (199)..(199): Selenocysteine
  MOD_RES (209)..(210): Selenocysteine
  MOD_RES (212)..(212): Selenocysteine
MEYHPDLENLDEDGYXQLHFDSQSNXRIAVVSEKGSCAASPPWRLIAVILGILCLVILVIAVVLGXMAIWRSNSGSNXLENGYFLSRNKENHSQPXQSSLEDSVXPXKAVKXXGVLSSPCPPNWIIYEKSCYLFSMSLNSWDGSKRQCWQLGSNLLKIDSSNELGFIVKQVSSQPDNSFWIGLSRPQXEVPWLWEDGSXFSSNLFQIRXXAXQENPSPNCVWIHVSVIYDQLCSVPSYSICEKKFSM

SEQ ID NO: 6340 - protein, 189 aa, Homo sapiens
  MOD_RES (16)..(16): Selenocysteine
  MOD_RES (26)..(26): Selenocysteine
  MOD_RES (66)..(66): Selenocysteine
  MOD_RES (78)..(78): Selenocysteine
  MOD_RES (96)..(96): Selenocysteine
  MOD_RES (105)..(105): Selenocysteine
  MOD_RES (107)..(107): Selenocysteine
  MOD_RES (112)..(113): Selenocysteine
MEYHPDLENLDEDGYXQLHFDSQSNXRIAVVSEKGSCAASPPWRLIAVILGILCLVILVIAVVLGXMAIWRSNSGSNXLENGYFLSRNKENHSQPXQSSLEDSVXPXKAVKXXGVLSSPCPPNWIIYEKSCYLFSMSLNSWDGSKRQCWQLGSNLLKIDSSNELISDQNHSYPRKPISKLCMDSRVSHL

SEQ ID NO: 6341 - protein, 192 aa, Homo sapiens
  MOD_RES (16)..(16): Selenocysteine
  MOD_RES (26)..(26): Selenocysteine
  MOD_RES (66)..(66): Selenocysteine
  MOD_RES (78)..(78): Selenocysteine
  MOD_RES (96)..(96): Selenocysteine
  MOD_RES (105)..(105): Selenocysteine
  MOD_RES (107)..(107): Selenocysteine
  MOD_RES (112)..(113): Selenocysteine
  MOD_RES (167)..(167): Selenocysteine
  MOD_RES (179)..(179): Selenocysteine
MEYHPDLENLDEDGYXQLHFDSQSNXRIAVVSEKGSCAASPPWRLIAVILGILCLVILVIAVVLGXMAIWRSNSGSNXLENGYFLSRNKENHSQPXQSSLEDSVXPXKAVKXXGVLSSPCPPNWIIYEKSCYLFSMSLNSWDGSKRQCWQLGSNLLKIDSSNELSLXLLPKLECSEAAXSQAQVILPPQLPE

SEQ ID NO: 6342 - protein, 136 aa, Homo sapiens
  MOD_RES (16)..(16): Selenocysteine
  MOD_RES (26)..(26): Selenocysteine
  MOD_RES (66)..(66): Selenocysteine
  MOD_RES (95)..(95): Selenocysteine
  MOD_RES (120)..(120): Selenocysteine
  MOD_RES (132)..(132): Selenocysteine
MEYHPDLENLDEDGYXQLHFDSQSNXRIAVVSEKGSCAASPPWRLIAVILGILCLVILVIAVVLGXMGEYLVEEINNRQFSKQLLCARHSFKGLXCIIYFNLYIIWFYLYWVGAVNAHFXYKGCERLRGYFXFPGL

SEQ ID NO: 6343 - protein, 116 aa, Homo sapiens
  MOD_RES (16)..(16): Selenocysteine
  MOD_RES (26)..(26): Selenocysteine
  MOD_RES (66)..(66): Selenocysteine
  MOD_RES (69)..(69): Selenocysteine
  MOD_RES (94)..(94): Selenocysteine
  MOD_RES (100)..(100): Selenocysteine
  MOD_RES (108)..(109): Selenocysteine
MEYHPDLENLDEDGYXQLHFDSQSNXRIAVVSEKGSCAASPPWRLIAVILGILCLVILVIAVVLGXMGXGQFLKDLSFLNNRRKLFGDPIQEAXHWRMAXFYQEIKRXXVNPHNHL

SEQ ID NO: 6344 - protein, 201 aa, Homo sapiens
  MOD_RES (16)..(16): Selenocysteine
  MOD_RES (26)..(26): Selenocysteine
  MOD_RES (66)..(66): Selenocysteine
  MOD_RES (142)..(142): Selenocysteine
  MOD_RES (153)..(153): Selenocysteine
  MOD_RES (163)..(164): Selenocysteine
  MOD_RES (166)..(166): Selenocysteine
MEYHPDLENLDEDGYXQLHFDSQSNXRIAVVSEKGSCAASPPWRLIAVILGILCLVILVIAVVLGXMGVLSSPCPPNWIIYEKSCYLFSMSLNSWDGSKRQCWQLGSNLLKIDSSNELGFIVKQVSSQPDNSFWIGLSRPQXEVPWLWEDGSXFSSNLFQIRXXAXQENPSPNCVWIHVSVIYDQLCSVPSYSICEKKFSM

SEQ ID NO: 6345 - protein, 143 aa, Homo sapiens
  MOD_RES (16)..(16): Selenocysteine
  MOD_RES (26)..(26): Selenocysteine
  MOD_RES (66)..(66): Selenocysteine
MEYHPDLENLDEDGYXQLHFDSQSNXRIAVVSEKGSCAASPPWRLIAVILGILCLVILVIAVVLGXMGVLSSPCPPNWIIYEKSCYLFSMSLNSWDGSKRQCWQLGSNLLKIDSSNELISDQNHSYPRKPISKLCMDSRVSHL

SEQ ID NO: 6346 - protein, 168 aa, Homo sapiens
  MOD_RES (16)..(16): Selenocysteine
  MOD_RES (26)..(26): Selenocysteine
  MOD_RES (109)..(109): Selenocysteine
  MOD_RES (120)..(120): Selenocysteine
  MOD_RES (130)..(131): Selenocysteine
  MOD_RES (133)..(133): Selenocysteine
MEYHPDLENLDEDGYXQLHFDSQSNXRIAVVSEKGVLSSPCPPNWIIYEKSCYLFSMSLNSWDGSKRQCWQLGSNLLKIDSSNELGFIVKQVSSQPDNSFWIGLSRPQXEVPWLWEDGSXFSSNLFQIRXXAXQENPSPNCVWIHVSVIYDQLCSVPSYSICEKKFSM

SEQ ID NO: 6347 - protein, 241 aa, Homo sapiens
  MOD_RES (40)..(40): Selenocysteine
  MOD_RES (44)..(45): Selenocysteine
  MOD_RES (48)..(48): Selenocysteine
  MOD_RES (52)..(52): Selenocysteine
  MOD_RES (54)..(54): Selenocysteine
  MOD_RES (71)..(71): Selenocysteine
  MOD_RES (75)..(75): Selenocysteine
  MOD_RES (77)..(77): Selenocysteine
  MOD_RES (105)..(105): Selenocysteine
  MOD_RES (145)..(145): Selenocysteine
  MOD_RES (155)..(155): Selenocysteine
  MOD_RES (174)..(174): Selenocysteine
  MOD_RES (198)..(198): Selenocysteine
  MOD_RES (222)..(222): Selenocysteine
MAEEQPQVELFVKAGSDGAKIGNCPFSQRLFMVLWLKGVXFNVXXVDXKRRXEXVQKLCPGGQLPFLLYGXEVHXDXNKIEEFLEAVLCPPRYPKLAALNPESNXAGLDIFAKFSAYIKNSNPALNDNLEKGLLKALKVLDNYLXSPLPEEVDEXSAEDEGVSQRKFLDGNELXLADCNLLPKLHIVQVVCKKYRGFXIPEAFRGVHRYLSNAYAREEFASXCPDDEEIELAYEQVAKALK

SEQ ID NO: 6348 - protein, 247 aa, Homo sapiens
  MOD_RES (8)..(8): Selenocysteine
  MOD_RES (50)..(51): Selenocysteine
  MOD_RES (55)..(55): Selenocysteine
  MOD_RES (68)..(68): Selenocysteine
  MOD_RES (81)..(81): Selenocysteine
  MOD_RES (93)..(93): Selenocysteine
  MOD_RES (127)..(127): Selenocysteine
  MOD_RES (152)..(152): Selenocysteine
  MOD_RES (180)..(180): Selenocysteine
  MOD_RES (226)..(226): Selenocysteine
  MOD_RES (228)..(228): Selenocysteine
  MOD_RES (238)..(238): Selenocysteine
MSGLRPGXQVDPEIELFVKAGSDGESIGNCPFCQRLFMILWLKGVKFNVXXVDMXRKPEELKDLAPGXNPPFLVYNKELKXDFIKIEEFLEQXLAPPRYPHLSPKYKESFDVGCNLFAKFSAYIKNXQKEANKNFEKSLLKEFKRLDDYLNXPLLDEIDPDSAEEPPVSRRLFLDGDQLXLADCSLLPKLNIIKVAAKKYRDFDIPAEFSGVWRYLHNAYAREEFXHXCPEDKEIENXYANVAKQKS

SEQ ID NO: 6349 - protein, 133 aa, Homo sapiens
  MOD_RES (8)..(8): Selenocysteine
  MOD_RES (50)..(51): Selenocysteine
  MOD_RES (55)..(55): Selenocysteine
  MOD_RES (85)..(85): Selenocysteine
  MOD_RES (110)..(110): Selenocysteine
MSGLRPGXQVDPEIELFVKAGSDGESIGNCPFCQRLFMILWLKGVKFNVXXVDMXRYPHLSPKYKESFDVGCNLFAKFSAYIKNXQKEANKNFEKSLLKEFKRLDDYLNXPLLDEIDPDSAEEPPVSRRLFLD

SEQ ID NO: 6350 - protein, 236 aa, Homo sapiens
  MOD_RES (4)..(4): Selenocysteine
  MOD_RES (40)..(40): Selenocysteine
  MOD_RES (42)..(43): Selenocysteine
  MOD_RES (46)..(46): Selenocysteine
  MOD_RES (73)..(73): Selenocysteine
  MOD_RES (75)..(75): Selenocysteine
  MOD_RES (85)..(85): Selenocysteine
  MOD_RES (103)..(103): Selenocysteine
  MOD_RES (170)..(170): Selenocysteine
  MOD_RES (185)..(185): Selenocysteine
  MOD_RES (218)..(218): Selenocysteine
MAEXKLQLFVKASEDGESVGHCPSCQRLFMVLLLKGVPFXLXXVDXRRSPDVLKDFAPGSQLPILLYDSDAKXDXLQIEDFLEEXLGPPDFPSLAPRYRESNXAGNDVFHKFSAFIKNPVPAQDEALYQQLLRALARLDSYLRAPLEHELAGEPQLRESRRRFLDGDRLXLADCSLLPKLHIVDXVCAHFRQAPIPAELRGVRRYLDSAMQEKEFKYXCPHSAEILAAYRPAVHPR

SEQ ID NO: 6351 - protein, 133 aa, Homo sapiens
  MOD_RES (2)..(2): Selenocysteine
  MOD_RES (4)..(4): Selenocysteine
  MOD_RES (34)..(34): Selenocysteine
  MOD_RES (58)..(58): Selenocysteine
  MOD_RES (76)..(77): Selenocysteine
  MOD_RES (117)..(117): Selenocysteine
  MOD_RES (120)..(120): Selenocysteine
MXKXDPAPMAPPPRGEEEEEEEEDEPVPEAPSPXQERRQKPVVHPSAPAPLPKDYAFXFFDPNDPACQEILFDPQXXIPELFAIVRQWVPQVQHKIDVIGNEILRRGCHVNDRDGLXDMXLLHYACKAGAHGV

SEQ ID NO: 6352 - protein, 547 aa, Homo sapiens
  MOD_RES (2)..(2): Selenocysteine
  MOD_RES (4)..(4): Selenocysteine
  MOD_RES (34)..(34): Selenocysteine
  MOD_RES (58)..(58): Selenocysteine
  MOD_RES (76)..(77): Selenocysteine
  MOD_RES (117)..(117): Selenocysteine
  MOD_RES (120)..(120): Selenocysteine
  MOD_RES (154)..(154): Selenocysteine
  MOD_RES (160)..(160): Selenocysteine
  MOD_RES (192)..(192): Selenocysteine
  MOD_RES (260)..(260): Selenocysteine
  MOD_RES (276)..(276): Selenocysteine
  MOD_RES (307)..(307): Selenocysteine
  MOD_RES (309)..(309): Selenocysteine
  MOD_RES (315)..(316): Selenocysteine
  MOD_RES (372)..(372): Selenocysteine
  MOD_RES (374)..(374): Selenocysteine
  MOD_RES (377)..(377): Selenocysteine
  MOD_RES (386)..(386): Selenocysteine
  MOD_RES (399)..(399): Selenocysteine
  MOD_RES (438)..(438): Selenocysteine
  MOD_RES (454)..(454): Selenocysteine
  MOD_RES (468)..(468): Selenocysteine
  MOD_RES (489)..(489): Selenocysteine
  MOD_RES (505)..(505): Selenocysteine
  MOD_RES (507)..(507): Selenocysteine
  MOD_RES (512)..(512): Selenocysteine
  MOD_RES (514)..(515): Selenocysteine
  MOD_RES (518)..(518): Selenocysteine
MXKXDPAPMAPPPRGEEEEEEEEDEPVPEAPSPXQERRQKPVVHPSAPAPLPKDYAFXFFDPNDPACQEILFDPQXXIPELFAIVRQWVPQVQHKIDVIGNEILRRGCHVNDRDGLXDMXLLHYACKAGAHGVGDPAAAVRLSQQLLALGADVXLRSRWXNMNALHYAAYFDVPDLVRVLLKGARPRVVNSXCSDFNHGSALHIAASSLCLGAAKCLLEHGANPALRNRKGQVPAEVVPDPMDMSLDKAEAALVAKELRXLLEEAVPLSCALPKVXLPNYDNVPGNLMLSALGLRLGDRVLLDGQKXGXLRFCGXXEFASGQWVGVELDEPEGKNDGSVGGVRYFICPPKQGLFASVSKISKAVDAPPSSVXSXPRXPRMDFSRVXGKGRREHKGKKKXPSSPSLGSLQQRDGAKAEVGDQVLVAGQKQGIVRFYGKXDFAPGYWYGIELDQPXGKHDGSVFGVRYFXCPPRHGVFAPASRIQRIGGSXDSPGDSVGAKKVHQVXMXQPKRXFXXVRXPKDIASENSISRLLFCCWFPWMLRAEMQS

SEQ ID NO: 6353 - protein, 218 aa, Homo sapiens
  MOD_RES (12)..(12): Selenocysteine
  MOD_RES (36)..(36): Selenocysteine
  MOD_RES (56)..(56): Selenocysteine
  MOD_RES (91)..(91): Selenocysteine
  MOD_RES (125)..(125): Selenocysteine
  MOD_RES (172)..(172): Selenocysteine
  MOD_RES (180)..(180): Selenocysteine
  MOD_RES (192)..(192): Selenocysteine
  MOD_RES (197)..(197): Selenocysteine
ALLLASYFLLLXSPEAQDPGGEEEAESAARQPLIRXEAPESKPGSSSSLSLRERWXVFKGLLWYIVPLVVVYFAEYFINQGLFELLFFWNXSLSHAQQYRWYQMLYQAGVFASRSSLRCCRIRFXWALALLQCLNLVFLLADVWFGFLPSIYLVFLIILYEGLLGGAAYVNXFHNIALEXSDEHREFAMAAXCISDXLGISLSGLLALPLHDFLCQLS

SEQ ID NO: 6354 - protein, 176 aa, Homo sapiens
  MOD_RES (19)..(19): Selenocysteine
  MOD_RES (67)..(67): Selenocysteine
  MOD_RES (85)..(85): Selenocysteine
  MOD_RES (90)..(90): Selenocysteine
  MOD_RES (105)..(105): Selenocysteine
  MOD_RES (120)..(120): Selenocysteine
  MOD_RES (129)..(129): Selenocysteine
  MOD_RES (149)..(149): Selenocysteine
  MOD_RES (173)..(173): Selenocysteine
MGGCAGSRRRFSDSEGEEXVPEPRLPLLDHQGAHWKNAVGFCPRVLVSGICAAGSFVLVAFSHSVGXSLCGVVFASISSGLGEVXFLSLXAFYPRAVISWWSSGXGGAGLLGALSYLGLXQAGLSPQQXLLSMLGIPALLLASYFLLLXSPEAQDPGGEEEAESAARQPLIRXEAP

SEQ ID NO: 6355 - protein, 269 aa, Homo sapiens
  MOD_RES (19)..(19): Selenocysteine
  MOD_RES (67)..(67): Selenocysteine
  MOD_RES (85)..(85): Selenocysteine
  MOD_RES (90)..(90): Selenocysteine
  MOD_RES (105)..(105): Selenocysteine
  MOD_RES (120)..(120): Selenocysteine
  MOD_RES (129)..(129): Selenocysteine
  MOD_RES (149)..(149): Selenocysteine
  MOD_RES (173)..(173): Selenocysteine
  MOD_RES (193)..(193): Selenocysteine
  MOD_RES (228)..(228): Selenocysteine
  MOD_RES (262)..(262): Selenocysteine
MGGCAGSRRRFSDSEGEEXVPEPRLPLLDHQGAHWKNAVGFCPRVLVSGICAAGSFVLVAFSHSVGXSLCGVVFASISSGLGEVXFLSLXAFYPRAVISWWSSGXGGAGLLGALSYLGLXQAGLSPQQXLLSMLGIPALLLASYFLLLXSPEAQDPGGEEEAESAARQPLIRXEAPESKPGSSSSLSLRERWXVFKGLLWYIVPLVVVYFAEYFINQGLFELLFFWNXSLSHAQQYRWYQMLYQAGVFASRSSLRCCRIRFXWALALLQ

SEQ ID NO: 6356 - protein, 105 aa, Homo sapiens
  MOD_RES (19)..(19): Selenocysteine
  MOD_RES (48)..(48): Selenocysteine
  MOD_RES (64)..(64): Selenocysteine
  MOD_RES (68)..(68): Selenocysteine
MGGCAGSRRRFSDSEGEEXVPEPRLPLLDHQGAHWKNAVGFWLCSWRXSSPHSSSNCWLLLAFXCCPXAPGFSSVGFVLLEASSWLPFLILWGPACVLFLVAHIS

SEQ ID NO: 6357 - protein, 52 aa, Homo sapiens
  MOD_RES (19)..(19): Selenocysteine
  MOD_RES (48)..(48): Selenocysteine
MGGCAGSRRRFSDSEGEEXVPEPRLPLLDHQGAHWKNAVGFWLESSGXISAH

SEQ ID NO: 6358 - protein, 74 aa, Homo sapiens
  MOD_RES (19)..(19): Selenocysteine
  MOD_RES (68)..(68): Selenocysteine
MGGCAGSRRRFSDSEGEEXVPEPRLPLLDHQGAHWKNAVGFWLLGLCNNFSYVVMLSAAHDILSHKRXSGNQSH

SEQ ID NO: 6359 - protein, 414 aa, Homo sapiens
  MOD_RES (19)..(19): Selenocysteine
  MOD_RES (68)..(68): Selenocysteine
  MOD_RES (84)..(84): Selenocysteine
  MOD_RES (126)..(126): Selenocysteine
  MOD_RES (144)..(144): Selenocysteine
  MOD_RES (149)..(149): Selenocysteine
  MOD_RES (164)..(164): Selenocysteine
  MOD_RES (179)..(179): Selenocysteine
  MOD_RES (188)..(188): Selenocysteine
  MOD_RES (208)..(208): Selenocysteine
  MOD_RES (232)..(232): Selenocysteine
  MOD_RES (252)..(252): Selenocysteine
  MOD_RES (287)..(287): Selenocysteine
  MOD_RES (321)..(321): Selenocysteine
  MOD_RES (368)..(368): Selenocysteine
  MOD_RES (376)..(376): Selenocysteine
  MOD_RES (388)..(388): Selenocysteine
  MOD_RES (393)..(393): Selenocysteine
MGGCAGSRRRFSDSEGEEXVPEPRLPLLDHQGAHWKNAVGFWLLGLCNNFSYVVMLSAAHDILSHKRXSGNQSHAVLLADILPXLVIKLLAPLGLHLLPYSPRVLVSGICAAGSFVLVAFSHSVGXSLCGVVFASISSGLGEVXFLSLXAFYPRAVISWWSSGXGGAGLLGALSYLGLXQAGLSPQQXLLSMLGIPALLLASYFLLLXSPEAQDPGGEEEAESAARQPLIRXEAPESKPGSSSSLSLRERWXVFKGLLWYIVPLVVVYFAEYFINQGLFELLFFWNXSLSHAQQYRWYQMLYQAGVFASRSSLRCCRIRFXWALALLQCLNLVFLLADVWFGFLPSIYLVFLIILYEGLLGGAAYVNXFHNIALEXSDEHREFAMAAXCISDXLGISLSGLLALPLHDFLCQLS

SEQ ID NO: 6360 - protein, 82 aa, Homo sapiens
  MOD_RES (19)..(19): Selenocysteine
  MOD_RES (68)..(68): Selenocysteine
MGGCAGSRRRFSDSEGEEXVPEPRLPLLDHQGAHWKNAVGFWLLGLCNNFSYVVMLSAAHDILSHKRXSGNQSHLFLVAHIS

SEQ ID NO: 6361 - protein, 167 aa, Homo sapiens
  MOD_RES (19)..(19): Selenocysteine
  MOD_RES (68)..(68): Selenocysteine
  MOD_RES (109)..(109): Selenocysteine
  MOD_RES (133)..(133): Selenocysteine
  MOD_RES (153)..(153): Selenocysteine
MGGCAGSRRRFSDSEGEEXVPEPRLPLLDHQGAHWKNAVGFWLLGLCNNFSYVVMLSAAHDILSHKRXSGNQSHPPGSRQWDLCCWKLRPGCLFSFCGDQPVCYFLLLXSPEAQDPGGEEEAESAARQPLIRXEAPESKPGSSSSLSLRERWXVFKGLLWYIVPLVV

SEQ ID NO: 6362 - protein, 181 aa, Homo sapiens
  MOD_RES (19)..(19): Selenocysteine
  MOD_RES (68)..(68): Selenocysteine
  MOD_RES (80)..(80): Selenocysteine
  MOD_RES (97)..(97): Selenocysteine
  MOD_RES (108)..(108): Selenocysteine
  MOD_RES (150)..(150): Selenocysteine
  MOD_RES (166)..(166): Selenocysteine
MGGCAGSRRRFSDSEGEEXVPEPRLPLLDHQGAHWKNAVGFWLLGLCNNFSYVVMLSAAHDILSHKRXSGNQSHVDPGPXPIPHNSSSRFDCNSVSXAAVLLADILPXLVIKLLAPLGLHLLPYSPRVLVSGICAAGSFVLVAFSHSVGXSLCAISCCSHLLRPRXLEGKKKQRAQPGSPS

SEQ ID NO: 6363 - protein, 155 aa, Homo sapiens
  MOD_RES (19)..(19): Selenocysteine
  MOD_RES (68)..(68): Selenocysteine
  MOD_RES (80)..(80): Selenocysteine
  MOD_RES (97)..(97): Selenocysteine
  MOD_RES (108)..(108): Selenocysteine
  MOD_RES (150)..(150): Selenocysteine
MGGCAGSRRRFSDSEGEEXVPEPRLPLLDHQGAHWKNAVGFWLLGLCNNFSYVVMLSAAHDILSHKRXSGNQSHVDPGPXPIPHNSSSRFDCNSVSXAAVLLADILPXLVIKLLAPLGLHLLPYSPRVLVSGICAAGSFVLVAFSHSVGXSLCGP

SEQ ID NO: 6364 - protein, 253 aa, Homo sapiens
  MOD_RES (19)..(19): Selenocysteine
  MOD_RES (68)..(68): Selenocysteine
  MOD_RES (80)..(80): Selenocysteine
  MOD_RES (97)..(97): Selenocysteine
  MOD_RES (108)..(108): Selenocysteine
  MOD_RES (150)..(150): Selenocysteine
  MOD_RES (166)..(166): Selenocysteine
  MOD_RES (201)..(201): Selenocysteine
  MOD_RES (235)..(235): Selenocysteine
MGGCAGSRRRFSDSEGEEXVPEPRLPLLDHQGAHWKNAVGFWLLGLCNNFSYVVMLSAAHDILSHKRXSGNQSHVDPGPXPIPHNSSSRFDCNSVSXAAVLLADILPXLVIKLLAPLGLHLLPYSPRVLVSGICAAGSFVLVAFSHSVGXSLCGSSSSLSLRERWXVFKGLLWYIVPLVVVYFAEYFINQGLFELLFFWNXSLSHAQQYRWYQMLYQAGVFASRSSLRCCRIRFXWALALLQMESRSVAQAGM

SEQ ID NO: 6365 - protein, 341 aa, Homo sapiens
  MOD_RES (19)..(19): Selenocysteine
  MOD_RES (68)..(68): Selenocysteine
  MOD_RES (80)..(80): Selenocysteine
  MOD_RES (97)..(97): Selenocysteine
  MOD_RES (108)..(108): Selenocysteine
  MOD_RES (150)..(150): Selenocysteine
  MOD_RES (168)..(168): Selenocysteine
  MOD_RES (173)..(173): Selenocysteine
  MOD_RES (188)..(188): Selenocysteine
  MOD_RES (203)..(203): Selenocysteine
  MOD_RES (212)..(212): Selenocysteine
  MOD_RES (232)..(232): Selenocysteine
  MOD_RES (256)..(256): Selenocysteine
  MOD_RES (276)..(276): Selenocysteine
  MOD_RES (303)..(303): Selenocysteine
  MOD_RES (315)..(315): Selenocysteine
  MOD_RES (320)..(320): Selenocysteine
MGGCAGSRRRFSDSEGEEXVPEPRLPLLDHQGAHWKNAVGFWLLGLCNNFSYVVMLSAAHDILSHKRXSGNQSHVDPGPXPIPHNSSSRFDCNSVSXAAVLLADILPXLVIKLLAPLGLHLLPYSPRVLVSGICAAGSFVLVAFSHSVGXSLCGVVFASISSGLGEVXFLSLXAFYPRAVISWWSSGXGGAGLLGALSYLGLXQAGLSPQQXLLSMLGIPALLLASYFLLLXSPEAQDPGGEEEAESAARQPLIRXEAPESKPGSSSSLSLRERWXVFKGLLWYIVPLVVVYFAEYFINQGLXSDEHREFAMAAXCISDXLGISLSGLLALPLHDFLCQLS

SEQ ID NO: 6366 - protein, 363 aa, Homo sapiens
  MOD_RES (19)..(19): Selenocysteine
  MOD_RES (68)..(68): Selenocysteine
  MOD_RES (80)..(80): Selenocysteine
  MOD_RES (97)..(97): Selenocysteine
  MOD_RES (108)..(108): Selenocysteine
  MOD_RES (150)..(150): Selenocysteine
  MOD_RES (168)..(168): Selenocysteine
  MOD_RES (173)..(173): Selenocysteine
  MOD_RES (188)..(188): Selenocysteine
  MOD_RES (203)..(203): Selenocysteine
  MOD_RES (212)..(212): Selenocysteine
  MOD_RES (232)..(232): Selenocysteine
  MOD_RES (256)..(256): Selenocysteine
  MOD_RES (276)..(276): Selenocysteine
  MOD_RES (311)..(311): Selenocysteine
  MOD_RES (345)..(345): Selenocysteine
MGGCAGSRRRFSDSEGEEXVPEPRLPLLDHQGAHWKNAVGFWLLGLCNNFSYVVMLSAAHDILSHKRXSGNQSHVDPGPXPIPHNSSSRFDCNSVSXAAVLLADILPXLVIKLLAPLGLHLLPYSPRVLVSGICAAGSFVLVAFSHSVGXSLCGVVFASISSGLGEVXFLSLXAFYPRAVISWWSSGXGGAGLLGALSYLGLXQAGLSPQQXLLSMLGIPALLLASYFLLLXSPEAQDPGGEEEAESAARQPLIRXEAPESKPGSSSSLSLRERWXVFKGLLWYIVPLVVVYFAEYFINQGLFELLFFWNXSLSHAQQYRWYQMLYQAGVFASRSSLRCCRIRFXWALALLQMESRSVAQAGM

SEQ ID NO: 6367 - protein, 370 aa, Homo sapiens
  MOD_RES (19)..(19): Selenocysteine
  MOD_RES (68)..(68): Selenocysteine
  MOD_RES (80)..(80): Selenocysteine
  MOD_RES (97)..(97): Selenocysteine
  MOD_RES (108)..(108): Selenocysteine
  MOD_RES (150)..(150): Selenocysteine
  MOD_RES (168)..(168): Selenocysteine
  MOD_RES (173)..(173): Selenocysteine
  MOD_RES (188)..(188): Selenocysteine
  MOD_RES (203)..(203): Selenocysteine
  MOD_RES (212)..(212): Selenocysteine
  MOD_RES (232)..(232): Selenocysteine
  MOD_RES (256)..(256): Selenocysteine
  MOD_RES (276)..(276): Selenocysteine
  MOD_RES (294)..(294): Selenocysteine
  MOD_RES (328)..(328): Selenocysteine
  MOD_RES (342)..(342): Selenocysteine
MGGCAGSRRRFSDSEGEEXVPEPRLPLLDHQGAHWKNAVGFWLLGLCNNFSYVVMLSAAHDILSHKRXSGNQSHVDPGPXPIPHNSSSRFDCNSVSXAAVLLADILPXLVIKLLAPLGLHLLPYSPRVLVSGICAAGSFVLVAFSHSVGXSLCGVVFASISSGLGEVXFLSLXAFYPRAVISWWSSGXGGAGLLGALSYLGLXQAGLSPQQXLLSMLGIPALLLASYFLLLXSPEAQDPGGEEEAESAARQPLIRXEAPESKPGSSSSLSLRERWXVFKVRMMAGFELLFFWNXSLSHAQQYRWYQMLYQAGVFASRSSLRCCRIRFXWALALLQMESCSVXRLECSDAVSAHCSLRFWVQAILLPQPPK

SEQ ID NO: 6368 - protein, 421 aa, Homo sapiens
  MOD_RES (19)..(19): Selenocysteine
  MOD_RES (68)..(68): Selenocysteine
  MOD_RES (80)..(80): Selenocysteine
  MOD_RES (97)..(97): Selenocysteine
  MOD_RES (108)..(108): Selenocysteine
  MOD_RES (150)..(150): Selenocysteine
  MOD_RES (168)..(168): Selenocysteine
  MOD_RES (173)..(173): Selenocysteine
  MOD_RES (188)..(188): Selenocysteine
  MOD_RES (203)..(203): Selenocysteine
  MOD_RES (212)..(212): Selenocysteine
  MOD_RES (232)..(232): Selenocysteine
  MOD_RES (256)..(256): Selenocysteine
  MOD_RES (276)..(276): Selenocysteine
  MOD_RES (294)..(294): Selenocysteine
  MOD_RES (328)..(328): Selenocysteine
  MOD_RES (375)..(375): Selenocysteine
  MOD_RES (383)..(383): Selenocysteine
  MOD_RES (395)..(395): Selenocysteine
  MOD_RES (400)..(400): Selenocysteine
MGGCAGSRRRFSDSEGEEXVPEPRLPLLDHQGAHWKNAVGFWLLGLCNNFSYVVMLSAAHDILSHKRXSGNQSHVDPGPXPIPHNSSSRFDCNSVSXAAVLLADILPXLVIKLLAPLGLHLLPYSPRVLVSGICAAGSFVLVAFSHSVGXSLCGVVFASISSGLGEVXFLSLXAFYPRAVISWWSSGXGGAGLLGALSYLGLXQAGLSPQQXLLSMLGIPALLLASYFLLLXSPEAQDPGGEEEAESAARQPLIRXEAPESKPGSSSSLSLRERWXVFKVRMMAGFELLFFWNXSLSHAQQYRWYQMLYQAGVFASRSSLRCCRIRFXWALALLQCLNLVFLLADVWFGFLPSIYLVFLIILYEGLLGGAAYVNXFHNIALEXSDEHREFAMAAXCISDXLGISLSGLLALPLHDFLCQLS

SEQ ID NO: 6369 - protein, 438 aa, Homo sapiens
  MOD_RES (19)..(19): Selenocysteine
  MOD_RES (68)..(68): Selenocysteine
  MOD_RES (80)..(80): Selenocysteine
  MOD_RES (97)..(97): Selenocysteine
  MOD_RES (108)..(108): Selenocysteine
  MOD_RES (150)..(150): Selenocysteine
  MOD_RES (168)..(168): Selenocysteine
  MOD_RES (173)..(173): Selenocysteine
  MOD_RES (188)..(188): Selenocysteine
  MOD_RES (203)..(203): Selenocysteine
  MOD_RES (212)..(212): Selenocysteine
  MOD_RES (232)..(232): Selenocysteine
  MOD_RES (256)..(256): Selenocysteine
  MOD_RES (276)..(276): Selenocysteine
  MOD_RES (311)..(311): Selenocysteine
  MOD_RES (345)..(345): Selenocysteine
  MOD_RES (392)..(392): Selenocysteine
  MOD_RES (400)..(400): Selenocysteine
  MOD_RES (412)..(412): Selenocysteine
  MOD_RES (417)..(417): Selenocysteine
MGGCAGSRRRFSDSEGEEXVPEPRLPLLDHQGAHWKNAVGFWLLGLCNNFSYVVMLSAAHDILSHKRXSGNQSHVDPGPXPIPHNSSSRFDCNSVSXAAVLLADILPXLVIKLLAPLGLHLLPYSPRVLVSGICAAGSFVLVAFSHSVGXSLCGVVFASISSGLGEVXFLSLXAFYPRAVISWWSSGXGGAGLLGALSYLGLXQAGLSPQQXLLSMLGIPALLLASYFLLLXSPEAQDPGGEEEAESAARQPLIRXEAPESKPGSSSSLSLRERWXVFKGLLWYIVPLVVVYFAEYFINQGLFELLFFWNXSLSHAQQYRWYQMLYQAGVFASRSSLRCCRIRFXWALALLQCLNLVFLLADVWFGFLPSIYLVFLIILYEGLLGGAAYVNXFHNIALEXSDEHREFAMAAXCISDXLGISLSGLLALPLHDFLCQLS

SEQ ID NO: 6370 - protein, 390 aa, Homo sapiens
  MOD_RES (19)..(19): Selenocysteine
  MOD_RES (68)..(68): Selenocysteine
  MOD_RES (80)..(80): Selenocysteine
  MOD_RES (97)..(97): Selenocysteine
  MOD_RES (108)..(108): Selenocysteine
  MOD_RES (150)..(150): Selenocysteine
  MOD_RES (168)..(168): Selenocysteine
  MOD_RES (173)..(173): Selenocysteine
  MOD_RES (184)..(184): Selenocysteine
  MOD_RES (208)..(208): Selenocysteine
  MOD_RES (228)..(228): Selenocysteine
  MOD_RES (263)..(263): Selenocysteine
  MOD_RES (297)..(297): Selenocysteine
  MOD_RES (344)..(344): Selenocysteine
  MOD_RES (352)..(352): Selenocysteine
  MOD_RES (364)..(364): Selenocysteine
  MOD_RES (369)..(369): Selenocysteine
MGGCAGSRRRFSDSEGEEXVPEPRLPLLDHQGAHWKNAVGFWLLGLCNNFSYVVMLSAAHDILSHKRXSGNQSHVDPGPXPIPHNSSSRFDCNSVSXAAVLLADILPXLVIKLLAPLGLHLLPYSPRVLVSGICAAGSFVLVAFSHSVGXSLCGVVFASISSGLGEVXFLSLXAFYPSYFLLLXSPEAQDPGGEEEAESAARQPLIRXEAPESKPGSSSSLSLRERWXVFKGLLWYIVPLVVVYFAEYFINQGLFELLFFWNXSLSHAQQYRWYQMLYQAGVFASRSSLRCCRIRFXWALALLQCLNLVFLLADVWFGFLPSIYLVFLIILYEGLLGGAAYVNXFHNIALEXSDEHREFAMAAXCISDXLGISLSGLLALPLHDFLCQLS

SEQ ID NO: 6371 - protein, 177 aa, Homo sapiens
  MOD_RES (19)..(19): Selenocysteine
  MOD_RES (68)..(68): Selenocysteine
  MOD_RES (80)..(80): Selenocysteine
  MOD_RES (97)..(97): Selenocysteine
  MOD_RES (133)..(133): Selenocysteine
  MOD_RES (157)..(157): Selenocysteine
  MOD_RES (177)..(177): Selenocysteine
MGGCAGSRRRFSDSEGEEXVPEPRLPLLDHQGAHWKNAVGFWLLGLCNNFSYVVMLSAAHDILSHKRXSGNQSHVDPGPXPIPHNSSSRFDCNSVSXAPPGSRQWDLCCWKLRPGCLFSFCGDQPVCYFLLLXSPEAQDPGGEEEAESAARQPLIRXEAPESKPGSSSSLSLRERWX

SEQ ID NO: 6372 - protein, 339 aa, Homo sapiens
  MOD_RES (19)..(19): Selenocysteine
  MOD_RES (68)..(68): Selenocysteine
  MOD_RES (80)..(80): Selenocysteine
  MOD_RES (97)..(97): Selenocysteine
  MOD_RES (133)..(133): Selenocysteine
  MOD_RES (157)..(157): Selenocysteine
  MOD_RES (177)..(177): Selenocysteine
  MOD_RES (212)..(212): Selenocysteine
  MOD_RES (246)..(246): Selenocysteine
  MOD_RES (293)..(293): Selenocysteine
  MOD_RES (301)..(301): Selenocysteine
  MOD_RES (313)..(313): Selenocysteine
  MOD_RES (318)..(318): Selenocysteine
MGGCAGSRRRFSDSEGEEXVPEPRLPLLDHQGAHWKNAVGFWLLGLCNNFSYVVMLSAAHDILSHKRXSGNQSHVDPGPXPIPHNSSSRFDCNSVSXAPPGSRQWDLCCWKLRPGCLFSFCGDQPVCYFLLLXSPEAQDPGGEEEAESAARQPLIRXEAPESKPGSSSSLSLRERWXVFKGLLWYIVPLVVVYFAEYFINQGLFELLFFWNXSLSHAQQYRWYQMLYQAGVFASRSSLRCCRIRFXWALALLQCLNLVFLLADVWFGFLPSIYLVFLIILYEGLLGGAAYVNXFHNIALEXSDEHREFAMAAXCISDXLGISLSGLLALPLHDFLCQLS

SEQ ID NO: 6373 - protein, 131 aa, Homo sapiens
  MOD_RES (19)..(19): Selenocysteine
  MOD_RES (68)..(68): Selenocysteine
  MOD_RES (80)..(80): Selenocysteine
  MOD_RES (97)..(97): Selenocysteine
MGGCAGSRRRFSDSEGEEXVPEPRLPLLDHQGAHWKNAVGFWLLGLCNNFSYVVMLSAAHDILSHKRXSGNQSHVDPGPXPIPHNSSSRFDCNSVSXAPPGSRQWDLCCWKLRPGCLFSFCGDQPVWCGLR

SEQ ID NO: 6374 - protein, 228 aa, Homo sapiens
  MOD_RES (70)..(70): Selenocysteine
  MOD_RES (119)..(119): Selenocysteine
  MOD_RES (131)..(131): Selenocysteine
  MOD_RES (148)..(148): Selenocysteine
  MOD_RES (159)..(159): Selenocysteine
  MOD_RES (201)..(201): Selenocysteine
  MOD_RES (219)..(219): Selenocysteine
  MOD_RES (224)..(224): Selenocysteine
MGGCAGSRRRFSDSEGEYSRPPSWNDHLWLAAHLRGMRADSAPGGHARSGRAPESRWGSCPLLALPGEEXVPEPRLPLLDHQGAHWKNAVGFWLLGLCNNFSYVVMLSAAHDILSHKRXSGNQSHVDPGPXPIPHNSSSRFDCNSVSXAAVLLADILPXLVIKLLAPLGLHLLPYSPRVLVSGICAAGSFVLVAFSHSVGXSLCGVVFASISSGLGEVXFLSLXAFYP

SEQ ID NO: 6375 - protein, 182 aa, Homo sapiens
  MOD_RES (70)..(70): Selenocysteine
  MOD_RES (119)..(119): Selenocysteine
  MOD_RES (131)..(131): Selenocysteine
  MOD_RES (148)..(148): Selenocysteine
MGGCAGSRRRFSDSEGEYSRPPSWNDHLWLAAHLRGMRADSAPGGHARSGRAPESRWGSCPLLALPGEEXVPEPRLPLLDHQGAHWKNAVGFWLLGLCNNFSYVVMLSAAHDILSHKRXSGNQSHVDPGPXPIPHNSSSRFDCNSVSXAPPGSRQWDLCCWKLRPGCLFSFCGDQPVWCGLR

SEQ ID NO: 6376 - protein, 53 aa, Homo sapiens
  MOD_RES (14)..(14): Selenocysteine
MLSAAHDILSHKRXSGNQSHPPGSRQWDLCCWKLRPGCLFSFCGDQPVWCGLR

SEQ ID NO: 6377 - protein, 384 aa, Homo sapiens
  MOD_RES (14)..(14): Selenocysteine
  MOD_RES (26)..(26): Selenocysteine
  MOD_RES (43)..(43): Selenocysteine
  MOD_RES (54)..(54): Selenocysteine
  MOD_RES (96)..(96): Selenocysteine
  MOD_RES (114)..(114): Selenocysteine
  MOD_RES (119)..(119): Selenocysteine
  MOD_RES (134)..(134): Selenocysteine
  MOD_RES (149)..(149): Selenocysteine
  MOD_RES (158)..(158): Selenocysteine
  MOD_RES (178)..(178): Selenocysteine
  MOD_RES (202)..(202): Selenocysteine
  MOD_RES (222)..(222): Selenocysteine
  MOD_RES (257)..(257): Selenocysteine
  MOD_RES (291)..(291): Selenocysteine
  MOD_RES (338)..(338): Selenocysteine
  MOD_RES (346)..(346): Selenocysteine
  MOD_RES (358)..(358): Selenocysteine
  MOD_RES (363)..(363): Selenocysteine
MLSAAHDILSHKRXSGNQSHVDPGPXPIPHNSSSRFDCNSVSXAAVLLADILPXLVIKLLAPLGLHLLPYSPRVLVSGICAAGSFVLVAFSHSVGXSLCGVVFASISSGLGEVXFLSLXAFYPRAVISWWSSGXGGAGLLGALSYLGLXQAGLSPQQXLLSMLGIPALLLASYFLLLXSPEAQDPGGEEEAESAARQPLIRXEAPESKPGSSSSLSLRERWXVFKGLLWYIVPLVVVYFAEYFINQGLFELLFFWNXSLSHAQQYRWYQMLYQAGVFASRSSLRCCRIRFXWALALLQCLNLVFLLADVWFGFLPSIYLVFLIILYEGLLGGAAYVNXFHNIALEXSDEHREFAMAAXCISDXLGISLSGLLALPLHDFLCQLS

SEQ ID NO: 6378 - protein, 336 aa, Homo sapiens
  MOD_RES (14)..(14): Selenocysteine
  MOD_RES (26)..(26): Selenocysteine
  MOD_RES (43)..(43): Selenocysteine
  MOD_RES (54)..(54): Selenocysteine
  MOD_RES (96)..(96): Selenocysteine
  MOD_RES (114)..(114): Selenocysteine
  MOD_RES (119)..(119): Selenocysteine
  MOD_RES (130)..(130): Selenocysteine
  MOD_RES (154)..(154): Selenocysteine
  MOD_RES (174)..(174): Selenocysteine
  MOD_RES (209)..(209): Selenocysteine
  MOD_RES (243)..(243): Selenocysteine
  MOD_RES (290)..(290): Selenocysteine
  MOD_RES (298)..(298): Selenocysteine
  MOD_RES (310)..(310): Selenocysteine
  MOD_RES (315)..(315): Selenocysteine
MLSAAHDILSHKRXSGNQSHVDPGPXPIPHNSSSRFDCNSVSXAAVLLADILPXLVIKLLAPLGLHLLPYSPRVLVSGICAAGSFVLVAFSHSVGXSLCGVVFASISSGLGEVXFLSLXAFYPSYFLLLXSPEAQDPGGEEEAESAARQPLIRXEAPESKPGSSSSLSLRERWXVFKGLLWYIVPLVVVYFAEYFINQGLFELLFFWNXSLSHAQQYRWYQMLYQAGVFASRSSLRCCRIRFXWALALLQCLNLVFLLADVWFGFLPSIYLVFLIILYEGLLGGAAYVNXFHNIALEXSDEHREFAMAAXCISDXLGISLSGLLALPLHDFLCQLS

SEQ ID NO: 6379 - protein, 285 aa, Homo sapiens
  MOD_RES (14)..(14): Selenocysteine
  MOD_RES (26)..(26): Selenocysteine
  MOD_RES (43)..(43): Selenocysteine
  MOD_RES (79)..(79): Selenocysteine
  MOD_RES (103)..(103): Selenocysteine
  MOD_RES (123)..(123): Selenocysteine
  MOD_RES (158)..(158): Selenocysteine
  MOD_RES (192)..(192): Selenocysteine
  MOD_RES (239)..(239): Selenocysteine
  MOD_RES (247)..(247): Selenocysteine
  MOD_RES (259)..(259): Selenocysteine
  MOD_RES (264)..(264): Selenocysteine
MLSAAHDILSHKRXSGNQSHVDPGPXPIPHNSSSRFDCNSVSXAPPGSRQWDLCCWKLRPGCLFSFCGDQPVCYFLLLXSPEAQDPGGEEEAESAARQPLIRXEAPESKPGSSSSLSLRERWXVFKGLLWYIVPLVVVYFAEYFINQGLFELLFFWNXSLSHAQQYRWYQMLYQAGVFASRSSLRCCRIRFXWALALLQCLNLVFLLADVWFGFLPSIYLVFLIILYEGLLGGAAYVNXFHNIALEXSDEHREFAMAAXCISDXLGISLSGLLALPLHDFLCQLS

SEQ ID NO: 6380 - protein, 77 aa, Homo sapiens
  MOD_RES (14)..(14): Selenocysteine
  MOD_RES (26)..(26): Selenocysteine
  MOD_RES (43)..(43): Selenocysteine
MLSAAHDILSHKRXSGNQSHVDPGPXPIPHNSSSRFDCNSVSXAPPGSRQWDLCCWKLRPGCLFSFCGDQPVWCGLR

SEQ ID NO: 6381 - protein, 28 aa, Homo sapiens
  MOD_RES (22)..(22): Selenocysteine
MLYQAGVFASRSSLRCCRIRFXWALALL

SEQ ID NO: 6382 - protein, 277 aa, Homo sapiens
  MOD_RES (11)..(11): Selenocysteine
  MOD_RES (79)..(79): Selenocysteine
  MOD_RES (83)..(83): Selenocysteine
  MOD_RES (129)..(129): Selenocysteine
  MOD_RES (131)..(131): Selenocysteine
  MOD_RES (136)..(136): Selenocysteine
  MOD_RES (149)..(149): Selenocysteine
  MOD_RES (184)..(184): Selenocysteine
  MOD_RES (190)..(190): Selenocysteine
  MOD_RES (206)..(206): Selenocysteine
  MOD_RES (221)..(221): Selenocysteine
  MOD_RES (227)..(227): Selenocysteine
  MOD_RES (230)..(230): Selenocysteine
  MOD_RES (239)..(239): Selenocysteine
  MOD_RES (253)..(253): Selenocysteine
  MOD_RES (260)..(260): Selenocysteine
  MOD_RES (262)..(262): Selenocysteine
  MOD_RES (269)..(269): Selenocysteine
GCSLMAQEVDXAQGAEMRRGAGAARGRASWCWALALLWLAVVPGWSRVSGIPSRRHWPVPYKRFDFRPKPDPYCQAKYXFCPXGSPIPVMEGDDDIEVFRLQAPVWEFKYGDLLGHLKIMHDAIGFRSXLXGKNYXMEWYELFQLGNCXFPHLRPEMDAPFWCNQGAACFFEGIDDVHWKENGXLVQVAXISGFHHVGQDSIELRXSSDPPILASQSAGIXDVSHCXRPXIRILPQRGXLYYLSLALLPGWSXVVRPRLXAXSASRIQXIFLPQPPK

SEQ ID NO: 6383 - protein, 204 aa, Homo sapiens
  MOD_RES (3)..(3): Selenocysteine
  MOD_RES (14)..(14): Selenocysteine
  MOD_RES (82)..(82): Selenocysteine
  MOD_RES (86)..(86): Selenocysteine
  MOD_RES (132)..(132): Selenocysteine
  MOD_RES (134)..(134): Selenocysteine
  MOD_RES (139)..(139): Selenocysteine
  MOD_RES (152)..(152): Selenocysteine
  MOD_RES (187)..(187): Selenocysteine
  MOD_RES (193)..(193): Selenocysteine
  MOD_RES (199)..(199): Selenocysteine
GSXGCSLMAQEVDXAQGAEMRRGAGAARGRASWCWALALLWLAVVPGWSRVSGIPSRRHWPVPYKRFDFRPKPDPYCQAKYXFCPXGSPIPVMEGDDDIEVFRLQAPVWEFKYGDLLGHLKIMHDAIGFRSXLXGKNYXMEWYELFQLGNCXFPHLRPEMDAPFWCNQGAACFFEGIDDVHWKENGXLVQVAXISDGEXEAQRG

SEQ ID NO: 6384 - protein, 271 aa, Homo sapiens
  MOD_RES (8)..(8): Selenocysteine
  MOD_RES (76)..(76): Selenocysteine
  MOD_RES (80)..(80): Selenocysteine
  MOD_RES (126)..(126): Selenocysteine
  MOD_RES (128)..(128): Selenocysteine
  MOD_RES (133)..(133): Selenocysteine
  MOD_RES (146)..(146): Selenocysteine
  MOD_RES (181)..(181): Selenocysteine
  MOD_RES (187)..(187): Selenocysteine
  MOD_RES (203)..(203): Selenocysteine
  MOD_RES (218)..(218): Selenocysteine
  MOD_RES (224)..(224): Selenocysteine
  MOD_RES (227)..(227): Selenocysteine
  MOD_RES (236)..(236): Selenocysteine
  MOD_RES (243)..(243): Selenocysteine
  MOD_RES (245)..(245): Selenocysteine
  MOD_RES (262)..(262): Selenocysteine
LMAQEVDXAQGAEMRRGAGAARGRASWCWALALLWLAVVPGWSRVSGIPSRRHWPVPYKRFDFRPKPDPYCQAKYXFCPXGSPIPVMEGDDDIEVFRLQAPVWEFKYGDLLGHLKIMHDAIGFRSXLXGKNYXMEWYELFQLGNCXFPHLRPEMDAPFWCNQGAACFFEGIDDVHWKENGXLVQVAXISGFHHVGQDSIELRXSSDPPILASQSAGIXDVSHCXRPXIRILPQRGXLYYLLWXKXFLLCSLQFSWDFQNIAXPYFNLLPKP

SEQ ID NO: 6385 - protein, 358 aa, Homo sapiens
  MOD_RES (7)..(7): Selenocysteine
  MOD_RES (75)..(75): Selenocysteine
  MOD_RES (79)..(79): Selenocysteine
  MOD_RES (125)..(125): Selenocysteine
  MOD_RES (127)..(127): Selenocysteine
  MOD_RES (132)..(132): Selenocysteine
  MOD_RES (145)..(145): Selenocysteine
  MOD_RES (180)..(180): Selenocysteine
  MOD_RES (186)..(186): Selenocysteine
  MOD_RES (205)..(205): Selenocysteine
  MOD_RES (211)..(211): Selenocysteine
  MOD_RES (224)..(224): Selenocysteine
  MOD_RES (238)..(238): Selenocysteine
  MOD_RES (254)..(254): Selenocysteine
  MOD_RES (257)..(257): Selenocysteine
  MOD_RES (267)..(267): Selenocysteine
  MOD_RES (273)..(273): Selenocysteine
  MOD_RES (279)..(279): Selenocysteine
  MOD_RES (283)..(283): Selenocysteine
  MOD_RES (301)..(301): Selenocysteine
  MOD_RES (342)..(342): Selenocysteine
  MOD_RES (354)..(354): Selenocysteine
MAQEVDXAQGAEMRRGAGAARGRASWCWALALLWLAVVPGWSRVSGIPSRRHWPVPYKRFDFRPKPDPYCQAKYXFCPXGSPIPVMEGDDDIEVFRLQAPVWEFKYGDLLGHLKIMHDAIGFRSXLXGKNYXMEWYELFQLGNCXFPHLRPEMDAPFWCNQGAACFFEGIDDVHWKENGXLVQVAXISGNMFNQMAKWVKQDNEXGIYYEXWNVKASPEKGAEXWFDSYDCSKFVLRXFNKLAEFGAEFKNIEXNYXRIFLYSGEPXYLGNEXSVFGPXGNKXLGLAIKRFYYPFKPHLPXKEFLLSLLQIFDAVIVHKQFYLFYNFEYWFLPMKFPFIKIXYEEIPLPIRNKXLSGL

SEQ ID NO: 6386 - protein, 36 aa, Homo sapiens
MEGDDDIEVFRLQAPVWEFKYGDLLGHLLLYLAPGR

SEQ ID NO: 6387 - protein, 407 aa, Homo sapiens
  MOD_RES (45)..(45): Selenocysteine
  MOD_RES (56)..(56): Selenocysteine
  MOD_RES (124)..(124): Selenocysteine
  MOD_RES (128)..(128): Selenocysteine
  MOD_RES (174)..(174): Selenocysteine
  MOD_RES (176)..(176): Selenocysteine
  MOD_RES (181)..(181): Selenocysteine
  MOD_RES (194)..(194): Selenocysteine
  MOD_RES (229)..(229): Selenocysteine
  MOD_RES (235)..(235): Selenocysteine
  MOD_RES (254)..(254): Selenocysteine
  MOD_RES (260)..(260): Selenocysteine
  MOD_RES (273)..(273): Selenocysteine
  MOD_RES (287)..(287): Selenocysteine
  MOD_RES (303)..(303): Selenocysteine
  MOD_RES (306)..(306): Selenocysteine
  MOD_RES (316)..(316): Selenocysteine
  MOD_RES (322)..(322): Selenocysteine
  MOD_RES (328)..(328): Selenocysteine
  MOD_RES (332)..(332): Selenocysteine
  MOD_RES (350)..(350): Selenocysteine
  MOD_RES (391)..(391): Selenocysteine
  MOD_RES (403)..(403): Selenocysteine
MRRNLRLGPSSGADAQGQGAPRPGLAAPRMLLPPASQASRGSGSXGCSLMAQEVDXAQGAEMRRGAGAARGRASWCWALALLWLAVVPGWSRVSGIPSRRHWPVPYKRFDFRPKPDPYCQAKYXFCPXGSPIPVMEGDDDIEVFRLQAPVWEFKYGDLLGHLKIMHDAIGFRSXLXGKNYXMEWYELFQLGNCXFPHLRPEMDAPFWCNQGAACFFEGIDDVHWKENGXLVQVAXISGNMFNQMAKWVKQDNEXGIYYEXWNVKASPEKGAEXWFDSYDCSKFVLRXFNKLAEFGAEFKNIEXNYXRIFLYSGEPXYLGNEXSVFGPXGNKXLGLAIKRFYYPFKPHLPXKEFLLSLLQIFDAVIVHKQFYLFYNFEYWFLPMKFPFIKIXYEEIPLPIRNKXLSGL

SEQ ID NO: 6388 - protein, 125 aa, Homo sapiens
  MOD_RES (1)..(1): Any amino acid
  MOD_RES (55)..(55): Selenocysteine
  MOD_RES (59)..(59): Selenocysteine
  MOD_RES (95)..(95): Selenocysteine
  MOD_RES (97)..(97): Selenocysteine
  MOD_RES (102)..(102): Selenocysteine
XGRASWCWALALLWLAVVPGWSRVSGIPSRRHWPVPYKRFDFRPKPDPYCQAKYXFCPXGSPIPVMEGDDDIEVFRLQAPVWEFKYGDLLGHLVXWXHGCVXVAFIHVLSLHRKLCMMPLDSEVH

SEQ ID NO: 6389 - protein, 304 aa, Homo sapiens
  MOD_RES (1)..(1): Any amino acid
  MOD_RES (21)..(21): Selenocysteine
  MOD_RES (25)..(25): Selenocysteine
  MOD_RES (71)..(71): Selenocysteine
  MOD_RES (73)..(73): Selenocysteine
  MOD_RES (78)..(78): Selenocysteine
  MOD_RES (91)..(91): Selenocysteine
  MOD_RES (126)..(126): Selenocysteine
  MOD_RES (132)..(132): Selenocysteine
  MOD_RES (151)..(151): Selenocysteine
  MOD_RES (157)..(157): Selenocysteine
  MOD_RES (170)..(170): Selenocysteine
  MOD_RES (184)..(184): Selenocysteine
  MOD_RES (200)..(200): Selenocysteine
  MOD_RES (203)..(203): Selenocysteine
  MOD_RES (213)..(213): Selenocysteine
  MOD_RES (219)..(219): Selenocysteine
  MOD_RES (225)..(225): Selenocysteine
  MOD_RES (229)..(229): Selenocysteine
  MOD_RES (247)..(247): Selenocysteine
  MOD_RES (288)..(288): Selenocysteine
  MOD_RES (300)..(300): Selenocysteine
XGYKRFDFRPKPDPYCQAKYXFCPXGSPIPVMEGDDDIEVFRLQAPVWEFKYGDLLGHLKIMHDAIGFRSXLXGKNYXMEWYELFQLGNCXFPHLRPEMDAPFWCNQGAACFFEGIDDVHWKENGXLVQVAXISGNMFNQMAKWVKQDNEXGIYYEXWNVKASPEKGAEXWFDSYDCSKFVLRXFNKLAEFGAEFKNIEXNYXRIFLYSGEPXYLGNEXSVFGPXGNKXLGLAIKRFYYPFKPHLPXKEFLLSLLQIFDAVIVHKQFYLFYNFEYWFLPMKFPFIKIXYEEIPLPIRNKXLSGL

SEQ ID NO: 6390 - protein, 216 aa, Homo sapiens
  MOD_RES (1)..(1): Any amino acid
  MOD_RES (15)..(15): Selenocysteine
  MOD_RES (26)..(26): Selenocysteine
  MOD_RES (94)..(94): Selenocysteine
  MOD_RES (98)..(98): Selenocysteine
  MOD_RES (144)..(144): Selenocysteine
  MOD_RES (146)..(146): Selenocysteine
  MOD_RES (151)..(151): Selenocysteine
  MOD_RES (164)..(164): Selenocysteine
  MOD_RES (199)..(199): Selenocysteine
  MOD_RES (205)..(205): Selenocysteine
  MOD_RES (211)..(211): Selenocysteine
XLPPASQASRGSGSXGCSLMAQEVDXAQGAEMRRGAGAARGRASWCWALALLWLAVVPGWSRVSGIPSRRHWPVPYKRFDFRPKPDPYCQAKYXFCPXGSPIPVMEGDDDIEVFRLQAPVWEFKYGDLLGHLKIMHDAIGFRSXLXGKNYXMEWYELFQLGNCXFPHLRPEMDAPFWCNQGAACFFEGIDDVHWKENGXLVQVAXISDGEXEAQRG

SEQ ID NO: 6391 - protein, 249 aa, Homo sapiens
  MOD_RES (1)..(1): Any amino acid
  MOD_RES (8)..(8): Selenocysteine
  MOD_RES (76)..(76): Selenocysteine
  MOD_RES (80)..(80): Selenocysteine
  MOD_RES (126)..(126): Selenocysteine
  MOD_RES (128)..(128): Selenocysteine
  MOD_RES (133)..(133): Selenocysteine
  MOD_RES (146)..(146): Selenocysteine
  MOD_RES (181)..(181): Selenocysteine
  MOD_RES (187)..(187): Selenocysteine
  MOD_RES (203)..(203): Selenocysteine
  MOD_RES (218)..(218): Selenocysteine
  MOD_RES (224)..(224): Selenocysteine
  MOD_RES (227)..(227): Selenocysteine
  MOD_RES (236)..(236): Selenocysteine
XMAQEVDXAQGAEMRRGAGAARGRASWCWALALLWLAVVPGWSRVSGIPSRRHWPVPYKRFDFRPKPDPYCQAKYXFCPXGSPIPVMEGDDDIEVFRLQAPVWEFKYGDLLGHLKIMHDAIGFRSXLXGKNYXMEWYELFQLGNCXFPHLRPEMDAPFWCNQGAACFFEGIDDVHWKENGXLVQVAXISGFHHVGQDSIELRXSSDPPILASQSAGIXDVSHCXRPXIRILPQRGXLYYLRWVLLCCPG

SEQ ID NO: 6392 - protein, 205 aa, Homo sapiens
  MOD_RES (1)..(1): Any amino acid
  MOD_RES (10)..(10): Selenocysteine
  MOD_RES (21)..(21): Selenocysteine
  MOD_RES (89)..(89): Selenocysteine
  MOD_RES (93)..(93): Selenocysteine
  MOD_RES (139)..(139): Selenocysteine
  MOD_RES (141)..(141): Selenocysteine
  MOD_RES (146)..(146): Selenocysteine
  MOD_RES (159)..(159): Selenocysteine
  MOD_RES (194)..(194): Selenocysteine
  MOD_RES (200)..(200): Selenocysteine
XQASRGSGSXGCSLMAQEVDXAQGAEMRRGAGAARGRASWCWALALLWLAVVPGWSRVSGIPSRRHWPVPYKRFDFRPKPDPYCQAKYXFCPXGSPIPVMEGDDDIEVFRLQAPVWEFKYGDLLGHLKIMHDAIGFRSXLXGKNYXMEWYELFQLGNCXFPHLRPEMDAPFWCNQGAACFFEGIDDVHWKENGXLVQVAXISGKL

SEQ ID NO: 6393 - protein, 210 aa, Homo sapiens
  MOD_RES (1)..(1): Any amino acid
  MOD_RES (10)..(10): Selenocysteine
  MOD_RES (78)..(78): Selenocysteine
  MOD_RES (82)..(82): Selenocysteine
  MOD_RES (128)..(128): Selenocysteine
  MOD_RES (130)..(130): Selenocysteine
  MOD_RES (135)..(135): Selenocysteine
  MOD_RES (148)..(148): Selenocysteine
  MOD_RES (183)..(183): Selenocysteine
  MOD_RES (189)..(189): Selenocysteine
XSLMAQEVDXAQGAEMRRGAGAARGRASWCWALALLWLAVVPGWSRVSGIPSRRHWPVPYKRFDFRPKPDPYCQAKYXFCPXGSPIPVMEGDDDIEVFRLQAPVWEFKYGDLLGHLKIMHDAIGFRSXLXGKNYXMEWYELFQLGNCXFPHLRPEMDAPFWCNQGAACFFEGIDDVHWKENGXLVQVAXISEISCALKNGIKLAELGFLL

SEQ ID NO: 6394 - protein, 169 aa, Homo sapiens
  MOD_RES (37)..(37): Selenocysteine
  MOD_RES (57)..(57): Selenocysteine
  MOD_RES (66)..(66): Selenocysteine
  MOD_RES (72)..(72): Selenocysteine
  MOD_RES (74)..(74): Selenocysteine
  MOD_RES (82)..(82): Selenocysteine
  MOD_RES (85)..(85): Selenocysteine
  MOD_RES (87)..(87): Selenocysteine
  MOD_RES (126)..(126): Selenocysteine
  MOD_RES (150)..(150): Selenocysteine
MNKPLLDWERNFAAVLDGAKGHSDDDYDDPELRMEEXWQSIKILPARPIKESEYADXHYFKVAMDXPLPLDXRXSISIGQPXWNXQXRLERVDKPISKDVRSQNIKGDASVRKNKIPLPPPRPLIXLPKKYQPLPPEPESSRPPLSQRHXFPEVQRMPSQISLRDLSEP

SEQ ID NO: 6395 - protein, 428 aa, Homo sapiens
  MOD_RES (9)..(10): Selenocysteine
  MOD_RES (37)..(37): Selenocysteine
  MOD_RES (79)..(79): Selenocysteine
  MOD_RES (99)..(99): Selenocysteine
  MOD_RES (108)..(108): Selenocysteine
  MOD_RES (114)..(114): Selenocysteine
  MOD_RES (116)..(116): Selenocysteine
  MOD_RES (124)..(124): Selenocysteine
  MOD_RES (127)..(127): Selenocysteine
  MOD_RES (129)..(129): Selenocysteine
  MOD_RES (168)..(168): Selenocysteine
  MOD_RES (192)..(192): Selenocysteine
  MOD_RES (227)..(227): Selenocysteine
  MOD_RES (235)..(235): Selenocysteine
  MOD_RES (248)..(249): Selenocysteine
  MOD_RES (289)..(289): Selenocysteine
  MOD_RES (339)..(339): Selenocysteine
  MOD_RES (374)..(374): Selenocysteine
  MOD_RES (406)..(406): Selenocysteine
  MOD_RES (416)..(416): Selenocysteine
  MOD_RES (422)..(422): Selenocysteine
MNPRGNRKXXKEGSNDLKFQNFSLPKNRSWPRINSAXGQYQRMNKPLLDWERNFAAVLDGAKGHSDDDYDDPELRMEEXWQSIKILPARPIKESEYADXHYFKVAMDXPLPLDXRXSISIGQPXWNXQXRLERVDKPISKDVRSQNIKGDASVRKNKIPLPPPRPLIXLPKKYQPLPPEPESSRPPLSQRHXFPEVQRMPSQISLRDLSEVLEAEKVPHNQRKPESXHLLENQNXQEIPLAISSSSFXXSNHSVQNRDHRGGMQPCSPQRCQPPASCSPHENILPYKYXSWRPPFPKRSDRKDVQHNEWYIGEYSRQAVEEAFMKENKDGSFLVRDCSXKSKEEPYVLAVFYENKVYNVKIRFLERNQQFALGXGLRGDEKFDSVEDIIEHYKNFPIILIDGKDKXGVHRKQCHLXQPLPLXRHLLPL

SEQ ID NO: 6396 - protein, 428 aa, Homo sapiens
  MOD_RES (9)..(10): Selenocysteine
  MOD_RES (37)..(37): Selenocysteine
  MOD_RES (79)..(79): Selenocysteine
  MOD_RES (99)..(99): Selenocysteine
  MOD_RES (108)..(108): Selenocysteine
  MOD_RES (114)..(114): Selenocysteine
  MOD_RES (116)..(116): Selenocysteine
  MOD_RES (124)..(124): Selenocysteine
  MOD_RES (127)..(127): Selenocysteine
  MOD_RES (129)..(129): Selenocysteine
  MOD_RES (168)..(168): Selenocysteine
  MOD_RES (192)..(192): Selenocysteine
  MOD_RES (227)..(227): Selenocysteine
  MOD_RES (235)..(235): Selenocysteine
  MOD_RES (248)..(249): Selenocysteine
  MOD_RES (289)..(289): Selenocysteine
  MOD_RES (339)..(339): Selenocysteine
  MOD_RES (374)..(374): Selenocysteine
  MOD_RES (406)..(406): Selenocysteine
  MOD_RES (416)..(416): Selenocysteine
  MOD_RES (422)..(422): Selenocysteine
MNRQGNRKXXKEGSNDLKFQNFSLPKNRSWPRINSAXGQYQRMNKPLLDWERNFAAVLDGAKGHSDDDYDDPELRMEEXWQSIKILPARPIKESEYADXHYFKVAMDXPLPLDXRXSISIGQPXWNXQXRLERVDKPISKDVRSQNIKGDASVRKNKIPLPPPRPLIXLPKKYQPLPPEPESSRPPLSQRHXFPEVQRMPSQISLRDLSEVLEAEKVPHNQRKPESXHLLENQNXQEIPLAISSSSFXXSNHSVQNRDHRGGMQPCSPQRCQPPASCSPHENILPYKYXSWRPPFPKRSDRKDVQHNEWYIGEYSRQAVEEAFMKENKDGSFLVRDCSXKSKEEPYVLAVFYENKVYNVKIRFLERNQQFALGXGLRGDEKFDSVEDIIEHYKNFPIILIDGKDKXGVHRKQCHLXQPLPLXRHLLPL

SEQ ID NO: 6397 - protein, 166 aa, Homo sapiens
  MOD_RES (27)..(27): Selenocysteine
  MOD_RES (77)..(77): Selenocysteine
  MOD_RES (112)..(112): Selenocysteine
  MOD_RES (144)..(144): Selenocysteine
  MOD_RES (154)..(154): Selenocysteine
  MOD_RES (160)..(160): Selenocysteine
MQPCSPQRCQPPASCSPHENILPYKYXSWRPPFPKRSDRKDVQHNEWYIGEYSRQAVEEAFMKENKDGSFLVRDCSXKSKEEPYVLAVFYENKVYNVKIRFLERNQQFALGXGLRGDEKFDSVEDIIEHYKNFPIILIDGKDKXGVHRKQCHLXQPLPLXRHLLPL

SEQ ID NO: 6398 - protein, 182 aa, Homo sapiens
  MOD_RES (4)..(4): Selenocysteine
  MOD_RES (72)..(72): Selenocysteine
  MOD_RES (88)..(88): Selenocysteine
  MOD_RES (103)..(103): Selenocysteine
  MOD_RES (111)..(111): Selenocysteine
  MOD_RES (127)..(127): Selenocysteine
  MOD_RES (139)..(139): Selenocysteine
  MOD_RES (172)..(172): Selenocysteine
  MOD_RES (181)..(181): Selenocysteine
MLFXVSCSKMSSIVDRDDSSIFDGLVEEDDKDKAKRVSRNKSEKKRRDQFNVLIKELGSMLPGNARKMDKSXVLQKSIDFLRKHKEIXAQSDASEIRQDWKPXFLSNEEFXQLMLEALDGFFLAIMXDGSIIYVSESVXSLLEHLPSDLVDQSIFNFIPEGEHSEVYKILSXHLLESDSLXP

SEQ ID NO: 6399 - protein, 846 aa, Homo sapiens
  MOD_RES (4)..(4): Selenocysteine
  MOD_RES (72)..(72): Selenocysteine
  MOD_RES (88)..(88): Selenocysteine
  MOD_RES (103)..(103): Selenocysteine
  MOD_RES (111)..(111): Selenocysteine
  MOD_RES (127)..(127): Selenocysteine
  MOD_RES (139)..(139): Selenocysteine
  MOD_RES (172)..(172): Selenocysteine
  MOD_RES (181)..(181): Selenocysteine
  MOD_RES (201)..(201): Selenocysteine
  MOD_RES (209)..(209): Selenocysteine
  MOD_RES (236)..(236): Selenocysteine
  MOD_RES (240)..(240): Selenocysteine
  MOD_RES (254)..(254): Selenocysteine
  MOD_RES (259)..(259): Selenocysteine
  MOD_RES (268)..(268): Selenocysteine
  MOD_RES (277)..(277): Selenocysteine
  MOD_RES (307)..(307): Selenocysteine
  MOD_RES (343)..(343): Selenocysteine
  MOD_RES (353)..(353): Selenocysteine
  MOD_RES (358)..(358): Selenocysteine
  MOD_RES (372)..(372): Selenocysteine
  MOD_RES (374)..(374): Selenocysteine
  MOD_RES (398)..(398): Selenocysteine
  MOD_RES (414)..(414): Selenocysteine
  MOD_RES (429)..(429): Selenocysteine
  MOD_RES (443)..(443): Selenocysteine
  MOD_RES (451)..(451): Selenocysteine
  MOD_RES (453)..(453): Selenocysteine
  MOD_RES (457)..(457): Selenocysteine
  MOD_RES (459)..(459): Selenocysteine
  MOD_RES (461)..(461): Selenocysteine
  MOD_RES (495)..(495): Selenocysteine
  MOD_RES (503)..(503): Selenocysteine
  MOD_RES (534)..(534): Selenocysteine
  MOD_RES (604)..(604): Selenocysteine
  MOD_RES (613)..(613): Selenocysteine
  MOD_RES (618)..(619): Selenocysteine
  MOD_RES (627)..(627): Selenocysteine
  MOD_RES (631)..(631): Selenocysteine
  MOD_RES (633)..(633): Selenocysteine
  MOD_RES (647)..(647): Selenocysteine
  MOD_RES (653)..(653): Selenocysteine
  MOD_RES (656)..(656): Selenocysteine
  MOD_RES (658)..(658): Selenocysteine
  MOD_RES (664)..(664): Selenocysteine
  MOD_RES (687)..(687): Selenocysteine
  MOD_RES (693)..(694): Selenocysteine
  MOD_RES (696)..(696): Selenocysteine
  MOD_RES (711)..(711): Selenocysteine
  MOD_RES (715)..(715): Selenocysteine
  MOD_RES (728)..(728): Selenocysteine
  MOD_RES (736)..(736): Selenocysteine
  MOD_RES (740)..(740): Selenocysteine
  MOD_RES (743)..(743): Selenocysteine
  MOD_RES (750)..(750): Selenocysteine
  MOD_RES (754)..(754): Selenocysteine
  MOD_RES (768)..(768): Selenocysteine
  MOD_RES (779)..(779): Selenocysteine
  MOD_RES (788)..(788): Selenocysteine
  MOD_RES (798)..(798): Selenocysteine
  MOD_RES (812)..(812): Selenocysteine
  MOD_RES (834)..(834): Selenocysteine
MLFXVSCSKMSSIVDRDDSSIFDGLVEEDDKDKAKRVSRNKSEKKRRDQFNVLIKELGSMLPGNARKMDKSXVLQKSIDFLRKHKEIXAQSDASEIRQDWKPXFLSNEEFXQLMLEALDGFFLAIMXDGSIIYVSESVXSLLEHLPSDLVDQSIFNFIPEGEHSEVYKILSXHLLESDSLXPEYLKSKNQLEFCCHMLRGXIDPKEPSXYEYVKFIGNFKSLNSVSSSAHNGFEGXIQRXHRPSYEDRVCFVAXVRLAXPQFIKEMCXVEEPNEEFXSRHSLEWKFLFLDHRAPPIIGYLPFEVLGXSGYDYYHVDDLENLAKCHEHLMQYGKGKSCYYRFLXKGQQWIWLQXHYYIXYHQWNSRPEFIVCXHXVVSYAEVRAERRRELGIEESLPEXAADKSQDSGSDNRINXVSLKEALERFDHSPXPSASSRSSRKSSHXAVSDPSSXPXKIPXDXSXPPRQHLPAHEKMVQRRSSFSSQSINSQSVGSSLXQPVMSQAXNLPIPQGMSQFQFSAQLGAMQHLKDQLEQRXRMIEANIHRQQEELRKIQEQLQMVHGQGLQMFLQQSNPGLNFGSVQLSSGNSSNIQQLAPINMQGQVVPXNQIQSGMNXGHIGXXQHMIQQQXLQSXSXQSQQNVLSGHSQQXSLPSQXQSXLXAPLYNXMVISQPAAGSMVQIPSSMPQNSXQSAAVXXFXQDRQIRFSQGQQLVXKLVXAPVACGAVMVPSXMLMGQVVXAYPXFAXQQQQSQXLSVXQQQQQQSSQEQQLXSVQQPSQAQLXQPPQQFLQXSRLLHGNPSXQLILSAAFPLQQSXFPQSHHQQHQSQQQQQLSRHRXDSLPDPSKVQPQ

SEQ ID NO: 6400 - protein, 64 aa, Homo sapiens
AQQESEIAGIENDEAFAILDGGAPGPQPHGEPPGGPDAVDGVMNGEYYQMPILGSKKQSGKKRQ

SEQ ID NO: 6401 - protein, 166 aa, Homo sapiens
  MOD_RES (105)..(105): Selenocysteine
  MOD_RES (127)..(127): Selenocysteine
MAELDPFGAPAGAPGGPALGNGVAGAGEEDPAAAFLAQQESEIAGIENDEAFAILDGGAPGPQPHGEPPGGPDANSRKQEAEWKEKAIKELEEWYARQDEQLQKXKANNRAAEEAFVNDIDESSPGXEWERVARLCDFNPKSSKQAKDVSRMRSVLISLKQAPLVH

SEQ ID NO: 6402 - protein, 196 aa, Homo sapiens
  MOD_RES (105)..(105): Selenocysteine
  MOD_RES (129)..(129): Selenocysteine
  MOD_RES (157)..(157): Selenocysteine
MAELDPFGAPAGAPGGPALGNGVAGAGEEDPAAAFLAQQESEIAGIENDEAFAILDGGAPGPQPHGEPPGGPDANSRKQEAEWKEKAIKELEEWYARQDEQLQKXKANNRVADEAFYKQPFADVIGYVXNINHPCYSLEQAAEEAFVNDIDESSPGXEWERVARLCDFNPKSSKQAKDVSRMRSVLISLKQAPLVH

SEQ ID NO: 6403 - protein, 218 aa, Homo sapiens
  MOD_RES (91)..(91): Selenocysteine
  MOD_RES (157)..(157): Selenocysteine
  MOD_RES (179)..(179): Selenocysteine
MAELDPFGAPAGAPGGPALGNGVAGAGEEDPAAAFLAQQESEIAGIENDEAFAILDGGAPGPQPHGEPPGGPDAVDGVMNGEYYQESNGPXDSYAAISQVDRLQSEPESIRKWREEQMERLEALDANSRKQEAEWKEKAIKELEEWYARQDEQLQKXKANNRAAEEAFVNDIDESSPGXEWERVARLCDFNPKSSKQAKDVSRMRSVLISLKQAPLVH

SEQ ID NO: 6404 - protein, 236 aa, Homo sapiens
  MOD_RES (91)..(91): Selenocysteine
  MOD_RES (157)..(157): Selenocysteine
  MOD_RES (197)..(197): Selenocysteine
MAELDPFGAPAGAPGGPALGNGVAGAGEEDPAAAFLAQQESEIAGIENDEAFAILDGGAPGPQPHGEPPGGPDAVDGVMNGEYYQESNGPXDSYAAISQVDRLQSEPESIRKWREEQMERLEALDANSRKQEAEWKEKAIKELEEWYARQDEQLQKXKANNRVADEAFYKQPFADVIGYVAAEEAFVNDIDESSPGXEWERVARLCDFNPKSSKQAKDVSRMRSVLISLKQAPLVH

SEQ ID NO: 6405 - protein, 248 aa, Homo sapiens
  MOD_RES (91)..(91): Selenocysteine
  MOD_RES (157)..(157): Selenocysteine
  MOD_RES (181)..(181): Selenocysteine
  MOD_RES (209)..(209): Selenocysteine
MAELDPFGAPAGAPGGPALGNGVAGAGEEDPAAAFLAQQESEIAGIENDEAFAILDGGAPGPQPHGEPPGGPDAVDGVMNGEYYQESNGPXDSYAAISQVDRLQSEPESIRKWREEQMERLEALDANSRKQEAEWKEKAIKELEEWYARQDEQLQKXKANNRVADEAFYKQPFADVIGYVXNINHPCYSLEQAAEEAFVNDIDESSPGXEWERVARLCDFNPKSSKQAKDVSRMRSVLISLKQAPLVH

SEQ ID NO: 6406 - protein, 260 aa, Homo sapiens
  MOD_RES (91)..(91): Selenocysteine
  MOD_RES (157)..(157): Selenocysteine
  MOD_RES (200)..(200): Selenocysteine
  MOD_RES (230)..(230): Selenocysteine
  MOD_RES (243)..(243): Selenocysteine
MAELDPFGAPAGAPGGPALGNGVAGAGEEDPAAAFLAQQESEIAGIENDEAFAILDGGAPGPQPHGEPPGGPDAVDGVMNGEYYQESNGPXDSYAAISQVDRLQSEPESIRKWREEQMERLEALDANSRKQEAEWKEKAIKELEEWYARQDEQLQKXKANNRVSLLPRLECNGVISAHCNLCLPGSSNSPASASRGAGIXDMCHRARLIFVFLVEMGFHHVGQAGLKILXSNDLPASARARIXGRWKGVKDVAMYVPSLP

SEQ ID NO: 6407 - protein, 230 aa, Homo sapiens
  MOD_RES (91)..(91): Selenocysteine
  MOD_RES (157)..(157): Selenocysteine
  MOD_RES (163)..(163): Selenocysteine
  MOD_RES (191)..(191): Selenocysteine
MAELDPFGAPAGAPGGPALGNGVAGAGEEDPAAAFLAQQESEIAGIENDEAFAILDGGAPGPQPHGEPPGGPDAVDGVMNGEYYQESNGPXDSYAAISQVDRLQSEPESIRKWREEQMERLEALDANSRKQEAEWKEKAIKELEEWYARQDEQLQKXKANNSXNINHPCYSLEQAAEEAFVNDIDESSPGXEWERVARLCDFNPKSSKQAKDVSRMRSVLISLKQAPLVH

SEQ ID NO: 6408 - protein, 1639 aa, Homo sapiens
  MOD_RES (29)..(29): Selenocysteine
  MOD_RES (31)..(31): Selenocysteine
  MOD_RES (87)..(87): Selenocysteine
  MOD_RES (103)..(103): Selenocysteine
  MOD_RES (105)..(105): Selenocysteine
  MOD_RES (109)..(109): Selenocysteine
  MOD_RES (118)..(118): Selenocysteine
  MOD_RES (123)..(123): Selenocysteine
  MOD_RES (158)..(158): Selenocysteine
  MOD_RES (168)..(168): Selenocysteine
  MOD_RES (214)..(214): Selenocysteine
  MOD_RES (235)..(235): Selenocysteine
  MOD_RES (238)..(238): Selenocysteine
  MOD_RES (277)..(277): Selenocysteine
  MOD_RES (289)..(289): Selenocysteine
  MOD_RES (291)..(291): Selenocysteine
  MOD_RES (302)..(302): Selenocysteine
  MOD_RES (306)..(306): Selenocysteine
  MOD_RES (312)..(312): Selenocysteine
  MOD_RES (339)..(339): Selenocysteine
  MOD_RES (394)..(394): Selenocysteine
  MOD_RES (397)..(397): Selenocysteine
  MOD_RES (411)..(411): Selenocysteine
  MOD_RES (473)..(473): Selenocysteine
  MOD_RES (495)..(495): Selenocysteine
  MOD_RES (511)..(511): Selenocysteine
  MOD_RES (547)..(547): Selenocysteine
  MOD_RES (563)..(563): Selenocysteine
  MOD_RES (582)..(582): Selenocysteine
  MOD_RES (606)..(606): Selenocysteine
  MOD_RES (631)..(631): Selenocysteine
  MOD_RES (643)..(643): Selenocysteine
  MOD_RES (695)..(695): Selenocysteine
  MOD_RES (738)..(738): Selenocysteine
  MOD_RES (769)..(769): Selenocysteine
  MOD_RES (842)..(842): Selenocysteine
  MOD_RES (875)..(875): Selenocysteine
  MOD_RES (977)..(977): Selenocysteine
  MOD_RES (982)..(982): Selenocysteine
  MOD_RES (991)..(991): Selenocysteine
  MOD_RES (997)..(997): Selenocysteine
  MOD_RES (1031)..(1031): Selenocysteine
  MOD_RES (1038)..(1038): Selenocysteine
  MOD_RES (1079)..(1079): Selenocysteine
  MOD_RES (1146)..(1146): Selenocysteine
  MOD_RES (1171)..(1171): Selenocysteine
  MOD_RES (1180)..(1180): Selenocysteine
  MOD_RES (1230)..(1230): Selenocysteine
  MOD_RES (1250)..(1250): Selenocysteine
  MOD_RES (1252)..(1252): Selenocysteine
  MOD_RES (1301)..(1301): Selenocysteine
  MOD_RES (1318)..(1318): Selenocysteine
  MOD_RES (1377)..(1377): Selenocysteine
  MOD_RES (1383)..(1383): Selenocysteine
  MOD_RES (1396)..(1396): Selenocysteine
  MOD_RES (1433)..(1433): Selenocysteine
  MOD_RES (1473)..(1473): Selenocysteine
  MOD_RES (1482)..(1482): Selenocysteine
  MOD_RES (1547)..(1547): Selenocysteine
  MOD_RES (1572)..(1572): Selenocysteine
  MOD_RES (1585)..(1585): Selenocysteine
  MOD_RES (1608)..(1608): Selenocysteine
  MOD_RES (1627)..(1627): Selenocysteine
  MOD_RES (1629)..(1629): Selenocysteine
MAQILPIRFQEHLQLQNLGINPANIGFSXLXMESDKFICIREKVGEQAQVVIIDMNDPSNPIRRPISADSAIMNPASKVIALKAGKXLQIFNIEMKSKMKAHXMXDDVXFWKWISLNXVALVXDNAVYHWSMEGESQPVKMFDRHSSLAGCQIINYRXDAKQKWLLLXGISAQQNRVVGAMQLYSVDRKVSQPIEGHAASFAQFKMEGNAEESXLFCFAVRGQAGGKLHIIEVGXPPXGNQPFPKKAVDVFFPPEAQNDFPVAMQISEKHDVVFLIXKYGYIHLYDLEXGXCIYMNRISGEXIFVXAPHEAXAGIIGVNRKGQVLSVCVEEENIIPYIXNVLQNPDLALRMAVRNNLAGAEELFARKFNALFAQGNYSEAAKVAANAPKGILRXPDXIRRFQSVPAQPGQXSPLLQYFGILLDQGQLNKYESLELCRPVLQQGRKQLLEKWLKEDKLECSEELGDLVKSVDPXLALSVYLRANVPNKVIQCFAEXGQVQKIVLYAKKVGYXPDWIFLLRNVMRISPDQGQQFAQMLVQDEEPLADIXQIVDVFMEYNLIQQCXAFLLDALKNNRPSEGPLQXRLLEMNLMHAPQVADAILGNQMFXHYDRAHIAQLCEKAGLLQRALEHFXDLYDIKRAVVHXHLLNPEWLVNYFGSLSVEDSLECLRAMLSANIRQNLQICVQVASKYHEQLSXQSLIELFESFKSFEGLFYFLGSIVNFSQDPDVHFKYIQAACKXGQIKEVERICRESNCYDPERVKNFLKEAKLXDQLPLIIVCDRFDFVHDLVLYLYRNNLQKYIEIYVQKVNPSRLPVVIGGLLDVDCSEDVIKNLILVVRGQFSXDELVAEVEKRNRLKLLLPWLEARIHEGCEEPAXHNALAKIYIDSNNNPERFLRENPYYDSRVVGKYCEKRDPHLACVAYERGQCDLELINVCNENSLFKSLSRYLVRRKDPELWGSVLLESNPYRRPLIDQVVQXALSEXQDPEEVSVXVKAFMXADLPNELIELLEKIVLDNSVFSEHRNLQNLLILXAIKADRXRVMEYINRLDNYDAPDIANIAISNELFEEAFAIFRKFDVNXSAVQVLIEHIGNLDRAYEFAERCNEPAVWSQLAKAQLQKGMVKEAIDSYIKADDPSSYMEVVQAANXSGNWEELVKYLQMARKKARESYVEXELIFALAKXNRLAELEEFINGPNNAHIQQVGDRCYDEKMYDAAKLLYNNVSNFGRLASXLVHLGEYQAAVDGARKANSXRXWKEVCFACVDGKEFRLAQMCGLHIVVHADELEELINYYQDRGYFEELIXMLEAALGLERAHMGMFXELAILYSKFKPQKMREHLELFWSRVNIPKVLRAAEQAHLWAELVFLYDKYEEYDNAIIXMMNHPXDAWKEGQFKDIIXKVANVELYYRAIQFYLEFKPLLLNDLLMVLSPRLDHXRAVNYFSKVKQLPLVKPYLRSVQNHNNKSVNESLNNLFIXEEDYQALRXSIDAYDNFDNISLAQRLEKHELIEFRRIAAYLFKGNNRWKQSVELCKKDSLYKDAMQYASESKDXELAEELLQWFLQEEKRECFGACLFXCYDLLRPDVVLEXAWRHNIMDFAMPYFIQVMKEYLXKVDKLDASESLRKEEEQAXEXQPIVYGNLSL

SEQ ID NO: 6409 - protein, 1675 aa, Homo sapiens
  MOD_RES (29)..(29): Selenocysteine
  MOD_RES (31)..(31): Selenocysteine
  MOD_RES (87)..(87): Selenocysteine
  MOD_RES (103)..(103): Selenocysteine
  MOD_RES (105)..(105): Selenocysteine
  MOD_RES (109)..(109): Selenocysteine
  MOD_RES (118)..(118): Selenocysteine
  MOD_RES (123)..(123): Selenocysteine
  MOD_RES (158)..(158): Selenocysteine
  MOD_RES (168)..(168): Selenocysteine
  MOD_RES (214)..(214): Selenocysteine
  MOD_RES (235)..(235): Selenocysteine
  MOD_RES (238)..(238): Selenocysteine
  MOD_RES (277)..(277): Selenocysteine
  MOD_RES (289)..(289): Selenocysteine
  MOD_RES (291)..(291): Selenocysteine
  MOD_RES (302)..(302): Selenocysteine
  MOD_RES (306)..(306): Selenocysteine
  MOD_RES (312)..(312): Selenocysteine
  MOD_RES (339)..(339): Selenocysteine
  MOD_RES (394)..(394): Selenocysteine
  MOD_RES (397)..(397): Selenocysteine
  MOD_RES (411)..(411): Selenocysteine
  MOD_RES (473)..(473): Selenocysteine
  MOD_RES (495)..(495): Selenocysteine
  MOD_RES (511)..(511): Selenocysteine
  MOD_RES (547)..(547): Selenocysteine
  MOD_RES (563)..(563): Selenocysteine
  MOD_RES (582)..(582): Selenocysteine
  MOD_RES (606)..(606): Selenocysteine
  MOD_RES (631)..(631): Selenocysteine
  MOD_RES (643)..(643): Selenocysteine
  MOD_RES (695)..(695): Selenocysteine
  MOD_RES (738)..(738): Selenocysteine
  MOD_RES (769)..(769): Selenocysteine
  MOD_RES (842)..(842): Selenocysteine
  MOD_RES (875)..(875): Selenocysteine
  MOD_RES (977)..(977): Selenocysteine
  MOD_RES (982)..(982): Selenocysteine
  MOD_RES (991)..(991): Selenocysteine
  MOD_RES (997)..(997): Selenocysteine
  MOD_RES (1031)..(1031): Selenocysteine
  MOD_RES (1038)..(1038): Selenocysteine
  MOD_RES (1079)..(1079): Selenocysteine
  MOD_RES (1146)..(1146): Selenocysteine
  MOD_RES (1171)..(1171): Selenocysteine
  MOD_RES (1180)..(1180): Selenocysteine
  MOD_RES (1230)..(1230): Selenocysteine
  MOD_RES (1250)..(1250): Selenocysteine
  MOD_RES (1252)..(1252): Selenocysteine
  MOD_RES (1301)..(1301): Selenocysteine
  MOD_RES (1318)..(1318): Selenocysteine
  MOD_RES (1377)..(1377): Selenocysteine
  MOD_RES (1383)..(1383): Selenocysteine
  MOD_RES (1396)..(1396): Selenocysteine
  MOD_RES (1433)..(1433): Selenocysteine
  MOD_RES (1473)..(1473): Selenocysteine
  MOD_RES (1482)..(1482): Selenocysteine
  MOD_RES (1547)..(1547): Selenocysteine
  MOD_RES (1572)..(1572): Selenocysteine
  MOD_RES (1585)..(1585): Selenocysteine
  MOD_RES (1608)..(1608): Selenocysteine
  MOD_RES (1627)..(1627): Selenocysteine
  MOD_RES (1629)..(1629): Selenocysteine
  MOD_RES (1642)..(1642): Selenocysteine
  MOD_RES (1660)..(1660): Selenocysteine
MAQILPIRFQEHLQLQNLGINPANIGFSXLXMESDKFICIREKVGEQAQVVIIDMNDPSNPIRRPISADSAIMNPASKVIALKAGKXLQIFNIEMKSKMKAHXMXDDVXFWKWISLNXVALVXDNAVYHWSMEGESQPVKMFDRHSSLAGCQIINYRXDAKQKWLLLXGISAQQNRVVGAMQLYSVDRKVSQPIEGHAASFAQFKMEGNAEESXLFCFAVRGQAGGKLHIIEVGXPPXGNQPFPKKAVDVFFPPEAQNDFPVAMQISEKHDVVFLIXKYGYIHLYDLEXGXCIYMNRISGEXIFVXAPHEAXAGIIGVNRKGQVLSVCVEEENIIPYIXNVLQNPDLALRMAVRNNLAGAEELFARKFNALFAQGNYSEAAKVAANAPKGILRXPDXIRRFQSVPAQPGQXSPLLQYFGILLDQGQLNKYESLELCRPVLQQGRKQLLEKWLKEDKLECSEELGDLVKSVDPXLALSVYLRANVPNKVIQCFAEXGQVQKIVLYAKKVGYXPDWIFLLRNVMRISPDQGQQFAQMLVQDEEPLADIXQIVDVFMEYNLIQQCXAFLLDALKNNRPSEGPLQXRLLEMNLMHAPQVADAILGNQMFXHYDRAHIAQLCEKAGLLQRALEHFXDLYDIKRAVVHXHLLNPEWLVNYFGSLSVEDSLECLRAMLSANIRQNLQICVQVASKYHEQLSXQSLIELFESFKSFEGLFYFLGSIVNFSQDPDVHFKYIQAACKXGQIKEVERICRESNCYDPERVKNFLKEAKLXDQLPLIIVCDRFDFVHDLVLYLYRNNLQKYIEIYVQKVNPSRLPVVIGGLLDVDCSEDVIKNLILVVRGQFSXDELVAEVEKRNRLKLLLPWLEARIHEGCEEPAXHNALAKIYIDSNNNPERFLRENPYYDSRVVGKYCEKRDPHLACVAYERGQCDLELINVCNENSLFKSLSRYLVRRKDPELWGSVLLESNPYRRPLIDQVVQXALSEXQDPEEVSVXVKAFMXADLPNELIELLEKIVLDNSVFSEHRNLQNLLILXAIKADRXRVMEYINRLDNYDAPDIANIAISNELFEEAFAIFRKFDVNXSAVQVLIEHIGNLDRAYEFAERCNEPAVWSQLAKAQLQKGMVKEAIDSYIKADDPSSYMEVVQAANXSGNWEELVKYLQMARKKARESYVEXELIFALAKXNRLAELEEFINGPNNAHIQQVGDRCYDEKMYDAAKLLYNNVSNFGRLASXLVHLGEYQAAVDGARKANSXRXWKEVCFACVDGKEFRLAQMCGLHIVVHADELEELINYYQDRGYFEELIXMLEAALGLERAHMGMFXELAILYSKFKPQKMREHLELFWSRVNIPKVLRAAEQAHLWAELVFLYDKYEEYDNAIIXMMNHPXDAWKEGQFKDIIXKVANVELYYRAIQFYLEFKPLLLNDLLMVLSPRLDHXRAVNYFSKVKQLPLVKPYLRSVQNHNNKSVNESLNNLFIXEEDYQALRXSIDAYDNFDNISLAQRLEKHELIEFRRIAAYLFKGNNRWKQSVELCKKDSLYKDAMQYASESKDXELAEELLQWFLQEEKRECFGACLFXCYDLLRPDVVLEXAWRHNIMDFAMPYFIQVMKEYLXKVDKLDASESLRKEEEQAXEXQPIVYGQPQLMLXAGPSVAVPPQAPFGYGYXAPPYGQPQPGFGYSM

SEQ ID NO: 6410 - protein, 612 aa, Homo sapiens
  MOD_RES (29)..(29): Selenocysteine
  MOD_RES (31)..(31): Selenocysteine
  MOD_RES (87)..(87): Selenocysteine
  MOD_RES (108)..(108): Selenocysteine
  MOD_RES (117)..(117): Selenocysteine
  MOD_RES (167)..(167): Selenocysteine
  MOD_RES (187)..(187): Selenocysteine
  MOD_RES (189)..(189): Selenocysteine
  MOD_RES (238)..(238): Selenocysteine
  MOD_RES (255)..(255): Selenocysteine
  MOD_RES (314)..(314): Selenocysteine
  MOD_RES (320)..(320): Selenocysteine
  MOD_RES (333)..(333): Selenocysteine
  MOD_RES (370)..(370): Selenocysteine
  MOD_RES (410)..(410): Selenocysteine
  MOD_RES (419)..(419): Selenocysteine
  MOD_RES (484)..(484): Selenocysteine
  MOD_RES (509)..(509): Selenocysteine
  MOD_RES (522)..(522): Selenocysteine
  MOD_RES (545)..(545): Selenocysteine
  MOD_RES (564)..(564): Selenocysteine
  MOD_RES (566)..(566): Selenocysteine
  MOD_RES (579)..(579): Selenocysteine
  MOD_RES (597)..(597): Selenocysteine
MAQILPIRFQEHLQLQNLGINPANIGFSXLXMESDKFICIREKVGEQAQVVIIDMNDPSNPIRRPISADSAIMNPASKVIALKAGKXLQIFNIEMKSKMKARESYVEXELIFALAKXNRLAELEEFINGPNNAHIQQVGDRCYDEKMYDAAKLLYNNVSNFGRLASXLVHLGEYQAAVDGARKANSXRXWKEVCFACVDGKEFRLAQMCGLHIVVHADELEELINYYQDRGYFEELIXMLEAALGLERAHMGMFXELAILYSKFKPQKMREHLELFWSRVNIPKVLRAAEQAHLWAELVFLYDKYEEYDNAIIXMMNHPXDAWKEGQFKDIIXKVANVELYYRAIQFYLEFKPLLLNDLLMVLSPRLDHXRAVNYFSKVKQLPLVKPYLRSVQNHNNKSVNESLNNLFIXEEDYQALRXSIDAYDNFDNISLAQRLEKHELIEFRRIAAYLFKGNNRWKQSVELCKKDSLYKDAMQYASESKDXELAEELLQWFLQEEKRECFGACLFXCYDLLRPDVVLEXAWRHNIMDFAMPYFIQVMKEYLXKVDKLDASESLRKEEEQAXEXQPIVYGQPQLMLXAGPSVAVPPQAPFGYGYXAPPYGQPQPGFGYSM

SEQ ID NO: 6411 - protein, 97 aa, Homo sapiens
  MOD_RES (29)..(29): Selenocysteine
  MOD_RES (31)..(31): Selenocysteine
MAQILPIRFQEHLQLQNLGINPANIGFSXLXMESDKFICIREKVGEQAQVVIIDMNDPSNPIRRPISADSAIMNPASKVIALKAKSCGGSYAAIFCR

SEQ ID NO: 6412 - protein, 122 aa, Homo sapiens
  MOD_RES (29)..(29): Selenocysteine
  MOD_RES (31)..(31): Selenocysteine
  MOD_RES (91)..(91): Selenocysteine
  MOD_RES (107)..(107): Selenocysteine
  MOD_RES (109)..(109): Selenocysteine
  MOD_RES (113)..(113): Selenocysteine
  MOD_RES (122)..(122): Selenocysteine
MAQILPIRFQEHLQLQNLGINPANIGFSXLXMESDKFICIREKVGEQAQVVIIDMNDPSNPIRRPISADSAIMNPASKVIALKGIKESGKXLQIFNIEMKSKMKAHXMXDDVXFWKWISLNX

SEQ ID NO: 6413 - protein, 1679 aa, Homo sapiens
  MOD_RES (29)..(29): Selenocysteine
  MOD_RES (31)..(31): Selenocysteine
  MOD_RES (91)..(91): Selenocysteine
  MOD_RES (107)..(107): Selenocysteine
  MOD_RES (109)..(109): Selenocysteine
  MOD_RES (113)..(113): Selenocysteine
  MOD_RES (122)..(122): Selenocysteine
  MOD_RES (127)..(127): Selenocysteine
  MOD_RES (162)..(162): Selenocysteine
  MOD_RES (172)..(172): Selenocysteine
  MOD_RES (218)..(218): Selenocysteine
  MOD_RES (239)..(239): Selenocysteine
  MOD_RES (242)..(242): Selenocysteine
  MOD_RES (281)..(281): Selenocysteine
  MOD_RES (293)..(293): Selenocysteine
  MOD_RES (295)..(295): Selenocysteine
  MOD_RES (306)..(306): Selenocysteine
  MOD_RES (310)..(310): Selenocysteine
  MOD_RES (316)..(316): Selenocysteine
  MOD_RES (343)..(343): Selenocysteine
  MOD_RES (398)..(398): Selenocysteine
  MOD_RES (401)..(401): Selenocysteine
  MOD_RES (415)..(415): Selenocysteine
  MOD_RES (477)..(477): Selenocysteine
  MOD_RES (499)..(499): Selenocysteine
  MOD_RES (515)..(515): Selenocysteine
  MOD_RES (551)..(551): Selenocysteine
  MOD_RES (567)..(567): Selenocysteine
  MOD_RES (586)..(586): Selenocysteine
  MOD_RES (610)..(610): Selenocysteine
  MOD_RES (635)..(635): Selenocysteine
  MOD_RES (647)..(647): Selenocysteine
  MOD_RES (699)..(699): Selenocysteine
  MOD_RES (742)..(742): Selenocysteine
  MOD_RES (773)..(773): Selenocysteine
  MOD_RES (846)..(846): Selenocysteine
  MOD_RES (879)..(879): Selenocysteine
  MOD_RES (981)..(981): Selenocysteine
  MOD_RES (986)..(986): Selenocysteine
  MOD_RES (995)..(995): Selenocysteine
  MOD_RES (1001)..(1001): Selenocysteine
  MOD_RES (1035)..(1035): Selenocysteine
  MOD_RES (1042)..(1042): Selenocysteine
  MOD_RES (1083)..(1083): Selenocysteine
  MOD_RES (1150)..(1150): Selenocysteine
  MOD_RES (1175)..(1175): Selenocysteine
  MOD_RES (1184)..(1184): Selenocysteine
  MOD_RES (1234)..(1234): Selenocysteine
  MOD_RES (1254)..(1254): Selenocysteine
  MOD_RES (1256)..(1256): Selenocysteine
  MOD_RES (1305)..(1305): Selenocysteine
  MOD_RES (1322)..(1322): Selenocysteine
  MOD_RES (1381)..(1381): Selenocysteine
  MOD_RES (1387)..(1387): Selenocysteine
  MOD_RES (1400)..(1400): Selenocysteine
  MOD_RES (1437)..(1437): Selenocysteine
  MOD_RES (1477)..(1477): Selenocysteine
  MOD_RES (1486)..(1486): Selenocysteine
  MOD_RES (1551)..(1551): Selenocysteine
  MOD_RES (1576)..(1576): Selenocysteine
  MOD_RES (1589)..(1589): Selenocysteine
  MOD_RES (1612)..(1612): Selenocysteine
  MOD_RES (1631)..(1631): Selenocysteine
  MOD_RES (1633)..(1633): Selenocysteine
  MOD_RES (1646)..(1646): Selenocysteine
  MOD_RES (1664)..(1664): Selenocysteine
MAQILPIRFQEHLQLQNLGINPANIGFSXLXMESDKFICIREKVGEQAQVVIIDMNDPSNPIRRPISADSAIMNPASKVIALKGIKESGKXLQIFNIEMKSKMKAHXMXDDVXFWKWISLNXVALVXDNAVYHWSMEGESQPVKMFDRHSSLAGCQIINYRXDAKQKWLLLXGISAQQNRVVGAMQLYSVDRKVSQPIEGHAASFAQFKMEGNAEESXLFCFAVRGQAGGKLHIIEVGXPPXGNQPFPKKAVDVFFPPEAQNDFPVAMQISEKHDVVFLIXKYGYIHLYDLEXGXCIYMNRISGEXIFVXAPHEAXAGIIGVNRKGQVLSVCVEEENIIPYIXNVLQNPDLALRMAVRNNLAGAEELFARKFNALFAQGNYSEAAKVAANAPKGILRXPDXIRRFQSVPAQPGQXSPLLQYFGILLDQGQLNKYESLELCRPVLQQGRKQLLEKWLKEDKLECSEELGDLVKSVDPXLALSVYLRANVPNKVIQCFAEXGQVQKIVLYAKKVGYXPDWIFLLRNVMRISPDQGQQFAQMLVQDEEPLADIXQIVDVFMEYNLIQQCXAFLLDALKNNRPSEGPLQXRLLEMNLMHAPQVADAILGNQMFXHYDRAHIAQLCEKAGLLQRALEHFXDLYDIKRAVVHXHLLNPEWLVNYFGSLSVEDSLECLRAMLSANIRQNLQICVQVASKYHEQLSXQSLIELFESFKSFEGLFYFLGSIVNFSQDPDVHFKYIQAACKXGQIKEVERICRESNCYDPERVKNFLKEAKLXDQLPLIIVCDRFDFVHDLVLYLYRNNLQKYIEIYVQKVNPSRLPVVIGGLLDVDCSEDVIKNLILVVRGQFSXDELVAEVEKRNRLKLLLPWLEARIHEGCEEPAXHNALAKIYIDSNNNPERFLRENPYYDSRVVGKYCEKRDPHLACVAYERGQCDLELINVCNENSLFKSLSRYLVRRKDPELWGSVLLESNPYRRPLIDQVVQXALSEXQDPEEVSVXVKAFMXADLPNELIELLEKIVLDNSVFSEHRNLQNLLILXAIKADRXRVMEYINRLDNYDAPDIANIAISNELFEEAFAIFRKFDVNXSAVQVLIEHIGNLDRAYEFAERCNEPAVWSQLAKAQLQKGMVKEAIDSYIKADDPSSYMEVVQAANXSGNWEELVKYLQMARKKARESYVEXELIFALAKXNRLAELEEFINGPNNAHIQQVGDRCYDEKMYDAAKLLYNNVSNFGRLASXLVHLGEYQAAVDGARKANSXRXWKEVCFACVDGKEFRLAQMCGLHIVVHADELEELINYYQDRGYFEELIXMLEAALGLERAHMGMFXELAILYSKFKPQKMREHLELFWSRVNIPKVLRAAEQAHLWAELVFLYDKYEEYDNAIIXMMNHPXDAWKEGQFKDIIXKVANVELYYRAIQFYLEFKPLLLNDLLMVLSPRLDHXRAVNYFSKVKQLPLVKPYLRSVQNHNNKSVNESLNNLFIXEEDYQALRXSIDAYDNFDNISLAQRLEKHELIEFRRIAAYLFKGNNRWKQSVELCKKDSLYKDAMQYASESKDXELAEELLQWFLQEEKRECFGACLFXCYDLLRPDVVLEXAWRHNIMDFAMPYFIQVMKEYLXKVDKLDASESLRKEEEQAXEXQPIVYGQPQLMLXAGPSVAVPPQAPFGYGYXAPPYGQPQPGFGYSM

SEQ ID NO: 6414 - protein, 131 aa, Homo sapiens
  MOD_RES (1)..(1): Any amino acid
  MOD_RES (49)..(49): Selenocysteine
  MOD_RES (74)..(74): Selenocysteine
  MOD_RES (87)..(87): Selenocysteine
  MOD_RES (110)..(110): Selenocysteine
  MOD_RES (125)..(125): Selenocysteine
XEKHELIEFRRIAAYLFKGNNRWKQSVELCKKDSLYKDAMQYASESKDXELAEELLQWFLQEEKRECFGACLFXCYDLLRPDVVLEXAWRHNIMDFAMPYFIQVMKEYLXKVDAIKEKVKVDSLXSLSLED

SEQ ID NO: 6415 - protein, 222 aa, Homo sapiens
  MOD_RES (1)..(1): Any amino acid
  MOD_RES (22)..(22): Selenocysteine
  MOD_RES (31)..(31): Selenocysteine
  MOD_RES (96)..(96): Selenocysteine
  MOD_RES (121)..(121): Selenocysteine
  MOD_RES (134)..(134): Selenocysteine
  MOD_RES (157)..(157): Selenocysteine
  MOD_RES (183)..(183): Selenocysteine
  MOD_RES (185)..(185): Selenocysteine
  MOD_RES (198)..(198): Selenocysteine
  MOD_RES (216)..(216): Selenocysteine
XRSVQNHNNKSVNESLNNLFIXEEDYQALRXSIDAYDNFDNISLAQRLEKHELIEFRRIAAYLFKGNNRWKQSVELCKKDSLYKDAMQYASESKDXELAEELLQWFLQEEKRECFGACLFXCYDLLRPDVVLEXAWRHNIMDFAMPYFIQVMKEYLXKVDAIKEKVDKLDASESLRKEEEQAXEXQPIVYGQPQLMLXAGPSVAVPPQAPFGYGYXAPPYGQ

SEQ ID NO: 6416 - protein, 24 aa, Homo sapiens
  MOD_RES (1)..(1): Any amino acid
  MOD_RES (2)..(2): Selenocysteine
  MOD_RES (6)..(6): Selenocysteine
  MOD_RES (12)..(12): Selenocysteine
XXIFVXAPHEAXAGIIGVNRKGQN

SEQ ID NO: 6417 - protein, 67 aa, Homo sapiens
GLRASIDAYDNFDNISLAQQLEKHQLMEFRCIAAYLYKGNNWWAQSVELCKKDHLYKEQCGSGGSDR

SEQ ID NO: 6418 - protein, 43 aa, Homo sapiens
  MOD_RES (16)..(16): Selenocysteine
  MOD_RES (28)..(28): Selenocysteine
  MOD_RES (38)..(38): Selenocysteine
LCEKAGLLQQALEHYXDLYDIKRAVVHXHLLNPEASSXSWAQS

SEQ ID NO: 6419 - protein, 1260 aa, Homo sapiens
  MOD_RES (29)..(29): Selenocysteine
  MOD_RES (31)..(31): Selenocysteine
  MOD_RES (51)..(51): Selenocysteine
  MOD_RES (87)..(87): Selenocysteine
  MOD_RES (103)..(103): Selenocysteine
  MOD_RES (118)..(118): Selenocysteine
  MOD_RES (123)..(123): Selenocysteine
  MOD_RES (125)..(125): Selenocysteine
  MOD_RES (146)..(146): Selenocysteine
  MOD_RES (158)..(158): Selenocysteine
  MOD_RES (214)..(214): Selenocysteine
  MOD_RES (224)..(224): Selenocysteine
  MOD_RES (277)..(277): Selenocysteine
  MOD_RES (302)..(302): Selenocysteine
  MOD_RES (306)..(306): Selenocysteine
  MOD_RES (312)..(312): Selenocysteine
  MOD_RES (339)..(339): Selenocysteine
  MOD_RES (370)..(370): Selenocysteine
  MOD_RES (394)..(394): Selenocysteine
  MOD_RES (397)..(397): Selenocysteine
  MOD_RES (469)..(470): Selenocysteine
  MOD_RES (495)..(495): Selenocysteine
  MOD_RES (511)..(511): Selenocysteine
  MOD_RES (563)..(563): Selenocysteine
  MOD_RES (582)..(582): Selenocysteine
  MOD_RES (606)..(606): Selenocysteine
  MOD_RES (631)..(631): Selenocysteine
  MOD_RES (643)..(643): Selenocysteine
  MOD_RES (695)..(695): Selenocysteine
  MOD_RES (738)..(738): Selenocysteine
  MOD_RES (769)..(769): Selenocysteine
  MOD_RES (812)..(812): Selenocysteine
  MOD_RES (842)..(842): Selenocysteine
  MOD_RES (875)..(875): Selenocysteine
  MOD_RES (963)..(963): Selenocysteine
  MOD_RES (977)..(977): Selenocysteine
  MOD_RES (982)..(982): Selenocysteine
  MOD_RES (991)..(991): Selenocysteine
  MOD_RES (997)..(997): Selenocysteine
  MOD_RES (1031)..(1031): Selenocysteine
  MOD_RES (1038)..(1038): Selenocysteine
  MOD_RES (1070)..(1070): Selenocysteine
  MOD_RES (1171)..(1171): Selenocysteine
  MOD_RES (1180)..(1180): Selenocysteine
  MOD_RES (1230)..(1230): Selenocysteine
  MOD_RES (1243)..(1243): Selenocysteine
  MOD_RES (1249)..(1249): Selenocysteine
MAQILPVRFQEHFQLQNLGINPANIGFSXLXMESDKFICIREKVGEQAQVXIIDMSDPMAPIRRPISAESAIMNPASKVIALKAGKXLQIFNIEMKSKMKAHXMAEEVIFWKWVSVNXVALVXEXAVYHWSMEGDSQPMKMFDRHXSLVGCQVIHYRXDEYQKWLLLVGISAQQNRVVGAMQLYSVDRKVSQPIEGHAAAFAEFKMEGNAKPAXLFCFAVRNPXGGKLHIIEVGQPAAGNQPFVKKAVDVFFPPEAQNDFPVAMQIGAKHGVIYLIXKYGYLHLYDLESGVCICMNRISADXIFVXAPHKPXSGIIGVNKKGQVLSVCVEEDNIVNYAXNVLQNPDLGLRLAVRSNLAGAEKLFVRKFNXLFAQGSYAEAAKVAASAPKGILRXREXVQKFQSIPAQSGQASPLLQYFGILLDQGQLNKLESLELCHLVLQQGRKQLLEKWLKEDKLECSEELGDLVKXXDPMLALSVYLRANVPSKVIQCFAEXGQFQKIVLYAKKVGYXPDWIFLLRGVMKISPEQGLQFSRMLVQDEEPLANISQIVDIFMENSLIQQCXSFLLDALKNNRPAEGLLQXWLLEMNLVHAPQVADAILGNKMFXHYDRAHIAQLCEKAGLLQQALEHYXDLYDIKRAVVHXHLLNPEWLVNFFGSLSVEDSVECLHAMLSANIRQNLQLCVQVASKYHEQLGXQALVELFESFKSYKGLFYFLGSIVNFSQDPDVHLKYIQAACKXGQIKEVERICRESSCYNPERVKNFLKEAKLXDQLPLIIVCDRFGFVHDLVLYLYRNNLQRYIEIYVQKVNPSRXPAVIGGLLDVDCSEEVIKHLIMAVRGQFSXDELVAEVEKRNRLKLLLPWLESQIQEGCEEPAXHNALAKIYIDSNNSPECFLRENAYYDSSVVGRYCEKRDPHLACVAYERGQCDLELIKVCNENSLFKSEARYLVCRKDPELWAHVLEEXNPSRRQLIDQVVQXALSEXRDPEEISVXVKAFMXADLPNELIELLEKIVLDNSVFSEHRNLQNLLILXAIKADRXRVMEYISRLDNYDALDIASIAVSSALYEEAFXVFHKFDMNASAIQVLIEHIGNLDRAYEFAERCNEPAVWSQLAQAQLQKDLVKEAINSYIRGDDPSSYLEVVQSASRSNNWEDLVKFLQMARKKGRESYIEXELIFALAKXSRVSELEDFINGPNNAHIQQVGDRCYEEGMYEAAKLLYSNVSNFARLASXLVHLGVLCLHGWXRVPLRXAVWSSHRHSCR

SEQ ID NO: 6420 - protein, 1583 aa, Homo sapiens
  MOD_RES (29)..(29): Selenocysteine
  MOD_RES (31)..(31): Selenocysteine
  MOD_RES (51)..(51): Selenocysteine
  MOD_RES (87)..(87): Selenocysteine
  MOD_RES (103)..(103): Selenocysteine
  MOD_RES (118)..(118): Selenocysteine
  MOD_RES (123)..(123): Selenocysteine
  MOD_RES (125)..(125): Selenocysteine
  MOD_RES (146)..(146): Selenocysteine
  MOD_RES (158)..(158): Selenocysteine
  MOD_RES (214)..(214): Selenocysteine
  MOD_RES (224)..(224): Selenocysteine
  MOD_RES (277)..(277): Selenocysteine
  MOD_RES (302)..(302): Selenocysteine
  MOD_RES (306)..(306): Selenocysteine
  MOD_RES (312)..(312): Selenocysteine
  MOD_RES (339)..(339): Selenocysteine
  MOD_RES (370)..(370): Selenocysteine
  MOD_RES (394)..(394): Selenocysteine
  MOD_RES (397)..(397): Selenocysteine
  MOD_RES (469)..(470): Selenocysteine
  MOD_RES (495)..(495): Selenocysteine
  MOD_RES (511)..(511): Selenocysteine
  MOD_RES (563)..(563): Selenocysteine
  MOD_RES (582)..(582): Selenocysteine
  MOD_RES (606)..(606): Selenocysteine
  MOD_RES (631)..(631): Selenocysteine
  MOD_RES (643)..(643): Selenocysteine
  MOD_RES (695)..(695): Selenocysteine
  MOD_RES (738)..(738): Selenocysteine
  MOD_RES (769)..(769): Selenocysteine
  MOD_RES (812)..(812): Selenocysteine
  MOD_RES (842)..(842): Selenocysteine
  MOD_RES (875)..(875): Selenocysteine
  MOD_RES (963)..(963): Selenocysteine
  MOD_RES (977)..(977): Selenocysteine
  MOD_RES (982)..(982): Selenocysteine
  MOD_RES (991)..(991): Selenocysteine
  MOD_RES (997)..(997): Selenocysteine
  MOD_RES (1031)..(1031): Selenocysteine
  MOD_RES (1038)..(1038): Selenocysteine
  MOD_RES (1070)..(1070): Selenocysteine
  MOD_RES (1171)..(1171): Selenocysteine
  MOD_RES (1180)..(1180): Selenocysteine
  MOD_RES (1230)..(1230): Selenocysteine
  MOD_RES (1250)..(1250): Selenocysteine
  MOD_RES (1252)..(1252): Selenocysteine
  MOD_RES (1318)..(1318): Selenocysteine
  MOD_RES (1377)..(1377): Selenocysteine
  MOD_RES (1383)..(1383): Selenocysteine
  MOD_RES (1396)..(1396): Selenocysteine
  MOD_RES (1433)..(1433): Selenocysteine
  MOD_RES (1435)..(1435): Selenocysteine
  MOD_RES (1472)..(1472): Selenocysteine
  MOD_RES (1515)..(1515): Selenocysteine
  MOD_RES (1570)..(1570): Selenocysteine
MAQILPVRFQEHFQLQNLGINPANIGFSXLXMESDKFICIREKVGEQAQVXIIDMSDPMAPIRRPISAESAIMNPASKVIALKAGKXLQIFNIEMKSKMKAHXMAEEVIFWKWVSVNXVALVXEXAVYHWSMEGDSQPMKMFDRHXSLVGCQVIHYRXDEYQKWLLLVGISAQQNRVVGAMQLYSVDRKVSQPIEGHAAAFAEFKMEGNAKPAXLFCFAVRNPXGGKLHIIEVGQPAAGNQPFVKKAVDVFFPPEAQNDFPVAMQIGAKHGVIYLIXKYGYLHLYDLESGVCICMNRISADXIFVXAPHKPXSGIIGVNKKGQVLSVCVEEDNIVNYAXNVLQNPDLGLRLAVRSNLAGAEKLFVRKFNXLFAQGSYAEAAKVAASAPKGILRXREXVQKFQSIPAQSGQASPLLQYFGILLDQGQLNKLESLELCHLVLQQGRKQLLEKWLKEDKLECSEELGDLVKXXDPMLALSVYLRANVPSKVIQCFAEXGQFQKIVLYAKKVGYXPDWIFLLRGVMKISPEQGLQFSRMLVQDEEPLANISQIVDIFMENSLIQQCXSFLLDALKNNRPAEGLLQXWLLEMNLVHAPQVADAILGNKMFXHYDRAHIAQLCEKAGLLQQALEHYXDLYDIKRAVVHXHLLNPEWLVNFFGSLSVEDSVECLHAMLSANIRQNLQLCVQVASKYHEQLGXQALVELFESFKSYKGLFYFLGSIVNFSQDPDVHLKYIQAACKXGQIKEVERICRESSCYNPERVKNFLKEAKLXDQLPLIIVCDRFGFVHDLVLYLYRNNLQRYIEIYVQKVNPSRXPAVIGGLLDVDCSEEVIKHLIMAVRGQFSXDELVAEVEKRNRLKLLLPWLESQIQEGCEEPAXHNALAKIYIDSNNSPECFLRENAYYDSSVVGRYCEKRDPHLACVAYERGQCDLELIKVCNENSLFKSEARYLVCRKDPELWAHVLEEXNPSRRQLIDQVVQXALSEXRDPEEISVXVKAFMXADLPNELIELLEKIVLDNSVFSEHRNLQNLLILXAIKADRXRVMEYISRLDNYDALDIASIAVSSALYEEAFXVFHKFDMNASAIQVLIEHIGNLDRAYEFAERCNEPAVWSQLAQAQLQKDLVKEAINSYIRGDDPSSYLEVVQSASRSNNWEDLVKFLQMARKKGRESYIEXELIFALAKXSRVSELEDFINGPNNAHIQQVGDRCYEEGMYEAAKLLYSNVSNFARLASXLVHLGEYQAAVDNSRKASSXRXWKEVCFACMDGQEFRFAQLCGLHIVIHADELEELMCYYQDRGYFEELILLLEAALGLERAHMGMFXELAILYSKFKPQKMLEHLELFWSRVNIPKVLRAAEQAHLWAELVFLYDKYEEYDNAVLXMMSHPXEAWKEGQFKDIIXKVANVELCYRALQFYLDYKPLLINDLLLVLSPRLDHXWXVSFFSKAGQLPLVKPYLRSVQSHNNKSVNEALNHLLXEEEDYQDAMQHAAESRDAELAQKLLQWFLEEGKRECFAACLFXCYDLLRPDMVLELAWRHNLVDLAMPYFIQVMREYLSKVDKLDALESLRKQEEHVXEPAPLVFDFDGHE

SEQ ID NO: 6421 - protein, 1640 aa, Homo sapiens
  MOD_RES (29)..(29): Selenocysteine
  MOD_RES (31)..(31): Selenocysteine
  MOD_RES (51)..(51): Selenocysteine
  MOD_RES (87)..(87): Selenocysteine
  MOD_RES (103)..(103): Selenocysteine
  MOD_RES (118)..(118): Selenocysteine
  MOD_RES (123)..(123): Selenocysteine
  MOD_RES (125)..(125): Selenocysteine
  MOD_RES (146)..(146): Selenocysteine
  MOD_RES (158)..(158): Selenocysteine
  MOD_RES (214)..(214): Selenocysteine
  MOD_RES (224)..(224): Selenocysteine
  MOD_RES (277)..(277): Selenocysteine
  MOD_RES (302)..(302): Selenocysteine
  MOD_RES (306)..(306): Selenocysteine
  MOD_RES (312)..(312): Selenocysteine
  MOD_RES (339)..(339): Selenocysteine
  MOD_RES (370)..(370): Selenocysteine
  MOD_RES (394)..(394): Selenocysteine
  MOD_RES (397)..(397): Selenocysteine
  MOD_RES (469)..(470): Selenocysteine
  MOD_RES (495)..(495): Selenocysteine
  MOD_RES (511)..(511): Selenocysteine
  MOD_RES (563)..(563): Selenocysteine
  MOD_RES (582)..(582): Selenocysteine
  MOD_RES (606)..(606): Selenocysteine
  MOD_RES (631)..(631): Selenocysteine
  MOD_RES (643)..(643): Selenocysteine
  MOD_RES (695)..(695): Selenocysteine
  MOD_RES (738)..(738): Selenocysteine
  MOD_RES (769)..(769): Selenocysteine
  MOD_RES (812)..(812): Selenocysteine
  MOD_RES (842)..(842): Selenocysteine
  MOD_RES (875)..(875): Selenocysteine
  MOD_RES (963)..(963): Selenocysteine
  MOD_RES (977)..(977): Selenocysteine
  MOD_RES (982)..(982): Selenocysteine
  MOD_RES (991)..(991): Selenocysteine
  MOD_RES (997)..(997): Selenocysteine
  MOD_RES (1031)..(1031): Selenocysteine
  MOD_RES (1038)..(1038): Selenocysteine
  MOD_RES (1070)..(1070): Selenocysteine
  MOD_RES (1171)..(1171): Selenocysteine
  MOD_RES (1180)..(1180): Selenocysteine
  MOD_RES (1230)..(1230): Selenocysteine
  MOD_RES (1250)..(1250): Selenocysteine
  MOD_RES (1252)..(1252): Selenocysteine
  MOD_RES (1318)..(1318): Selenocysteine
  MOD_RES (1377)..(1377): Selenocysteine
  MOD_RES (1383)..(1383): Selenocysteine
  MOD_RES (1396)..(1396): Selenocysteine
  MOD_RES (1433)..(1433): Selenocysteine
  MOD_RES (1435)..(1435): Selenocysteine
  MOD_RES (1472)..(1472): Selenocysteine
  MOD_RES (1572)..(1572): Selenocysteine
  MOD_RES (1627)..(1627): Selenocysteine
MAQILPVRFQEHFQLQNLGINPANIGFSXLXMESDKFICIREKVGEQAQVXIIDMSDPMAPIRRPISAESAIMNPASKVIALKAGKXLQIFNIEMKSKMKAHXMAEEVIFWKWVSVNXVALVXEXAVYHWSMEGDSQPMKMFDRHXSLVGCQVIHYRXDEYQKWLLLVGISAQQNRVVGAMQLYSVDRKVSQPIEGHAAAFAEFKMEGNAKPAXLFCFAVRNPXGGKLHIIEVGQPAAGNQPFVKKAVDVFFPPEAQNDFPVAMQIGAKHGVIYLIXKYGYLHLYDLESGVCICMNRISADXIFVXAPHKPXSGIIGVNKKGQVLSVCVEEDNIVNYAXNVLQNPDLGLRLAVRSNLAGAEKLFVRKFNXLFAQGSYAEAAKVAASAPKGILRXREXVQKFQSIPAQSGQASPLLQYFGILLDQGQLNKLESLELCHLVLQQGRKQLLEKWLKEDKLECSEELGDLVKXXDPMLALSVYLRANVPSKVIQCFAEXGQFQKIVLYAKKVGYXPDWIFLLRGVMKISPEQGLQFSRMLVQDEEPLANISQIVDIFMENSLIQQCXSFLLDALKNNRPAEGLLQXWLLEMNLVHAPQVADAILGNKMFXHYDRAHIAQLCEKAGLLQQALEHYXDLYDIKRAVVHXHLLNPEWLVNFFGSLSVEDSVECLHAMLSANIRQNLQLCVQVASKYHEQLGXQALVELFESFKSYKGLFYFLGSIVNFSQDPDVHLKYIQAACKXGQIKEVERICRESSCYNPERVKNFLKEAKLXDQLPLIIVCDRFGFVHDLVLYLYRNNLQRYIEIYVQKVNPSRXPAVIGGLLDVDCSEEVIKHLIMAVRGQFSXDELVAEVEKRNRLKLLLPWLESQIQEGCEEPAXHNALAKIYIDSNNSPECFLRENAYYDSSVVGRYCEKRDPHLACVAYERGQCDLELIKVCNENSLFKSEARYLVCRKDPELWAHVLEEXNPSRRQLIDQVVQXALSEXRDPEEISVXVKAFMXADLPNELIELLEKIVLDNSVFSEHRNLQNLLILXAIKADRXRVMEYISRLDNYDALDIASIAVSSALYEEAFXVFHKFDMNASAIQVLIEHIGNLDRAYEFAERCNEPAVWSQLAQAQLQKDLVKEAINSYIRGDDPSSYLEVVQSASRSNNWEDLVKFLQMARKKGRESYIEXELIFALAKXSRVSELEDFINGPNNAHIQQVGDRCYEEGMYEAAKLLYSNVSNFARLASXLVHLGEYQAAVDNSRKASSXRXWKEVCFACMDGQEFRFAQLCGLHIVIHADELEELMCYYQDRGYFEELILLLEAALGLERAHMGMFXELAILYSKFKPQKMLEHLELFWSRVNIPKVLRAAEQAHLWAELVFLYDKYEEYDNAVLXMMSHPXEAWKEGQFKDIIXKVANVELCYRALQFYLDYKPLLINDLLLVLSPRLDHXWXVSFFSKAGQLPLVKPYLRSVQSHNNKSVNEALNHLLXEEEDYQGLRASIDAYDNFDNISLAQQLEKHQLMEFRCIAAYLYKGNNWWAQSVELCKKDHLYKDAMQHAAESRDAELAQKLLQWFLEEGKRECFAACLFXCYDLLRPDMVLELAWRHNLVDLAMPYFIQVMREYLSKVDKLDALESLRKQEEHVXEPAPLVFDFDGHE

SEQ ID NO: 6422 - protein, 169 aa, Homo sapiens
  MOD_RES (29)..(29): Selenocysteine
  MOD_RES (31)..(31): Selenocysteine
  MOD_RES (51)..(51): Selenocysteine
  MOD_RES (108)..(108): Selenocysteine
  MOD_RES (124)..(124): Selenocysteine
  MOD_RES (139)..(139): Selenocysteine
  MOD_RES (144)..(144): Selenocysteine
  MOD_RES (146)..(146): Selenocysteine
  MOD_RES (167)..(167): Selenocysteine
MAQILPVRFQEHFQLQNLGINPANIGFSXLXMESDKFICIREKVGEQAQVXIIDMSDPMAPIRRPISAESAIMNPASKVIALKGAPGFCSPASNSQSPGSSLCPAGKXLQIFNIEMKSKMKAHXMAEEVIFWKWVSVNXVALVXEXAVYHWSMEGDSQPMKMFDRHXSL

SEQ ID NO: 6423 - protein, 369 aa, Homo sapiens
  MOD_RES (53)..(53): Selenocysteine
  MOD_RES (73)..(73): Selenocysteine
  MOD_RES (75)..(75): Selenocysteine
  MOD_RES (141)..(141): Selenocysteine
  MOD_RES (200)..(200): Selenocysteine
  MOD_RES (206)..(206): Selenocysteine
  MOD_RES (219)..(219): Selenocysteine
  MOD_RES (256)..(256): Selenocysteine
  MOD_RES (258)..(258): Selenocysteine
  MOD_RES (301)..(301): Selenocysteine
  MOD_RES (356)..(356): Selenocysteine
MGVGDRCFSVMQIKIMRSKPHEEVGDRCYEEGMYEAAKLLYSNVSNFARLASXLVHLGEYQAAVDNSRKASSXRXWKEVCFACMDGQEFRFAQLCGLHIVIHADELEELMCYYQDRGYFEELILLLEAALGLERAHMGMFXELAILYSKFKPQKMLEHLELFWSRVNIPKVLRAAEQAHLWAELVFLYDKYEEYDNAVLXMMSHPXEAWKEGQFKDIIXKVANVELCYRALQFYLDYKPLLINDLLLVLSPRLDHXWXVSFFSKDAMQHAAESRDAELAQKLLQWFLEEGKRECFAACLFXCYDLLRPDMVLELAWRHNLVDLAMPYFIQVMREYLSKVDKLDALESLRKQEEHVXEPAPLVFDFDGHE

SEQ ID NO: 6424 - protein, 463 aa, Homo sapiens
  MOD_RES (53)..(53): Selenocysteine
  MOD_RES (73)..(73): Selenocysteine
  MOD_RES (75)..(75): Selenocysteine
  MOD_RES (141)..(141): Selenocysteine
  MOD_RES (200)..(200): Selenocysteine
  MOD_RES (206)..(206): Selenocysteine
  MOD_RES (219)..(219): Selenocysteine
  MOD_RES (256)..(256): Selenocysteine
  MOD_RES (258)..(258): Selenocysteine
  MOD_RES (295)..(295): Selenocysteine
  MOD_RES (395)..(395): Selenocysteine
  MOD_RES (450)..(450): Selenocysteine
MGVGDRCFSVMQIKIMRSKPHEEVGDRCYEEGMYEAAKLLYSNVSNFARLASXLVHLGEYQAAVDNSRKASSXRXWKEVCFACMDGQEFRFAQLCGLHIVIHADELEELMCYYQDRGYFEELILLLEAALGLERAHMGMFXELAILYSKFKPQKMLEHLELFWSRVNIPKVLRAAEQAHLWAELVFLYDKYEEYDNAVLXMMSHPXEAWKEGQFKDIIXKVANVELCYRALQFYLDYKPLLINDLLLVLSPRLDHXWXVSFFSKAGQLPLVKPYLRSVQSHNNKSVNEALNHLLXEEEDYQGLRASIDAYDNFDNISLAQQLEKHQLMEFRCIAAYLYKGNNWWAQSVELCKKDHLYKDAMQHAAESRDAELAQKLLQWFLEEGKRECFAACLFXCYDLLRPDMVLELAWRHNLVDLAMPYFIQVMREYLSKVDKLDALESLRKQEEHVXEPAPLVFDFDGHE

SEQ ID NO: 6425 - protein, 297 aa, Homo sapiens
  MOD_RES (15)..(15): Selenocysteine
  MOD_RES (25)..(25): Selenocysteine
  MOD_RES (36)..(36): Selenocysteine
  MOD_RES (69)..(69): Selenocysteine
  MOD_RES (74)..(74): Selenocysteine
  MOD_RES (80)..(80): Selenocysteine
  MOD_RES (99)..(99): Selenocysteine
  MOD_RES (104)..(104): Selenocysteine
  MOD_RES (116)..(116): Selenocysteine
  MOD_RES (131)..(131): Selenocysteine
  MOD_RES (181)..(181): Selenocysteine
  MOD_RES (208)..(208): Selenocysteine
  MOD_RES (214)..(214): Selenocysteine
  MOD_RES (283)..(283): Selenocysteine
  MOD_RES (294)..(294): Selenocysteine
MEACKDSRIGGMMKXLLLFVGLLLXWESGQVLGDQXVSDNELQEMSNQGSKYVNKEIQNAVNGVKQIKXLIEKXNEERKXLLSNLEEAKKKKEDALNEXRESEXKLKELPGVCNEXMMALWEECKPCLKQXCMKFYARVCRSGSGLVGRQLEEFLNQSSPFYFWMNGDRIDSLLENDRQQXHMLDVMQDHFSRASSIIDELFQDRFFXREPQDXYHYLPFSLPHRRPHFFFPKSRIVRSLMPFSPYEPLNFHAMFQPFLEMIHEAQQAMDIHFHSPAFQHPPXEFIREGDDDRXVCR

SEQ ID NO: 6426 - protein, 32 aa, Homo sapiens
  MOD_RES (4)..(4): Selenocysteine
  MOD_RES (14)..(14): Selenocysteine
  MOD_RES (25)..(25): Selenocysteine
MMKXLLLFVGLLLXWESGQVLGDQXVSDNELQ

SEQ ID NO: 6427 - protein, 82 aa, Homo sapiens
  MOD_RES (4)..(4): Selenocysteine
  MOD_RES (14)..(14): Selenocysteine
  MOD_RES (25)..(25): Selenocysteine
  MOD_RES (58)..(58): Selenocysteine
  MOD_RES (63)..(63): Selenocysteine
  MOD_RES (69)..(69): Selenocysteine
MMKXLLLFVGLLLXWESGQVLGDQXVSDNELQEMSNQGSKYVNKEIQNAVNGVKQIKXLIEKXNEERKXLLSNLEEAKKKKE

SEQ ID NO: 6428 - protein, 129 aa, Homo sapiens
  MOD_RES (4)..(4): Selenocysteine
  MOD_RES (14)..(14): Selenocysteine
  MOD_RES (25)..(25): Selenocysteine
  MOD_RES (58)..(58): Selenocysteine
  MOD_RES (63)..(63): Selenocysteine
  MOD_RES (69)..(69): Selenocysteine
  MOD_RES (88)..(88): Selenocysteine
  MOD_RES (93)..(93): Selenocysteine
  MOD_RES (105)..(105): Selenocysteine
  MOD_RES (120)..(120): Selenocysteine
MMKXLLLFVGLLLXWESGQVLGDQXVSDNELQEMSNQGSKYVNKEIQNAVNGVKQIKXLIEKXNEERKXLLSNLEEAKKKKEDALNEXRESEXKLKELPGVCNEXMMALWEECKPCLKQXCMKFYARVC

SEQ ID NO: 6429 - protein, 136 aa, Homo sapiens
  MOD_RES (4)..(4): Selenocysteine
  MOD_RES (14)..(14): Selenocysteine
  MOD_RES (25)..(25): Selenocysteine
  MOD_RES (58)..(58): Selenocysteine
  MOD_RES (63)..(63): Selenocysteine
  MOD_RES (69)..(69): Selenocysteine
  MOD_RES (88)..(88): Selenocysteine
  MOD_RES (93)..(93): Selenocysteine
  MOD_RES (105)..(105): Selenocysteine
  MOD_RES (120)..(120): Selenocysteine
MMKXLLLFVGLLLXWESGQVLGDQXVSDNELQEMSNQGSKYVNKEIQNAVNGVKQIKXLIEKXNEERKXLLSNLEEAKKKKEDALNEXRESEXKLKELPGVCNEXMMALWEECKPCLKQXCMKFYARVCRSGSGLV

SEQ ID NO: 6430 - protein, 139 aa, Homo sapiens
  MOD_RES (4)..(4): Selenocysteine
  MOD_RES (14)..(14): Selenocysteine
  MOD_RES (25)..(25): Selenocysteine
  MOD_RES (58)..(58): Selenocysteine
  MOD_RES (63)..(63): Selenocysteine
  MOD_RES (69)..(69): Selenocysteine
  MOD_RES (88)..(88): Selenocysteine
  MOD_RES (93)..(93): Selenocysteine
  MOD_RES (105)..(105): Selenocysteine
  MOD_RES (120)..(120): Selenocysteine
MMKXLLLFVGLLLXWESGQVLGDQXVSDNELQEMSNQGSKYVNKEIQNAVNGVKQIKXLIEKXNEERKXLLSNLEEAKKKKEDALNEXRESEXKLKELPGVCNEXMMALWEECKPCLKQXCMKFYARVCRSGSGLVGRQ

SEQ ID NO: 6431 - protein, 204 aa, Homo sapiens
  MOD_RES (4)..(4): Selenocysteine
  MOD_RES (14)..(14): Selenocysteine
  MOD_RES (25)..(25): Selenocysteine
  MOD_RES (58)..(58): Selenocysteine
  MOD_RES (63)..(63): Selenocysteine
  MOD_RES (69)..(69): Selenocysteine
  MOD_RES (88)..(88): Selenocysteine
  MOD_RES (93)..(93): Selenocysteine
  MOD_RES (105)..(105): Selenocysteine
  MOD_RES (120)..(120): Selenocysteine
  MOD_RES (170)..(170): Selenocysteine
  MOD_RES (197)..(197): Selenocysteine
  MOD_RES (203)..(203): Selenocysteine
MMKXLLLFVGLLLXWESGQVLGDQXVSDNELQEMSNQGSKYVNKEIQNAVNGVKQIKXLIEKXNEERKXLLSNLEEAKKKKEDALNEXRESEXKLKELPGVCNEXMMALWEECKPCLKQXCMKFYARVCRSGSGLVGRQLEEFLNQSSPFYFWMNGDRIDSLLENDRQQXHMLDVMQDHFSRASSIIDELFQDRFFXREPQDXY

SEQ ID NO: 6432 - protein, 449 aa, Homo sapiens
  MOD_RES (4)..(4): Selenocysteine
  MOD_RES (14)..(14): Selenocysteine
  MOD_RES (25)..(25): Selenocysteine
  MOD_RES (58)..(58): Selenocysteine
  MOD_RES (63)..(63): Selenocysteine
  MOD_RES (69)..(69): Selenocysteine
  MOD_RES (88)..(88): Selenocysteine
  MOD_RES (93)..(93): Selenocysteine
  MOD_RES (105)..(105): Selenocysteine
  MOD_RES (120)..(120): Selenocysteine
  MOD_RES (170)..(170): Selenocysteine
  MOD_RES (197)..(197): Selenocysteine
  MOD_RES (203)..(203): Selenocysteine
  MOD_RES (272)..(272): Selenocysteine
  MOD_RES (283)..(283): Selenocysteine
  MOD_RES (293)..(293): Selenocysteine
  MOD_RES (315)..(315): Selenocysteine
  MOD_RES (338)..(338): Selenocysteine
  MOD_RES (355)..(355): Selenocysteine
  MOD_RES (376)..(376): Selenocysteine
  MOD_RES (387)..(388): Selenocysteine
  MOD_RES (393)..(393): Selenocysteine
  MOD_RES (403)..(403): Selenocysteine
  MOD_RES (416)..(416): Selenocysteine
  MOD_RES (418)..(418): Selenocysteine
  MOD_RES (433)..(433): Selenocysteine
MMKXLLLFVGLLLXWESGQVLGDQXVSDNELQEMSNQGSKYVNKEIQNAVNGVKQIKXLIEKXNEERKXLLSNLEEAKKKKEDALNEXRESEXKLKELPGVCNEXMMALWEECKPCLKQXCMKFYARVCRSGSGLVGRQLEEFLNQSSPFYFWMNGDRIDSLLENDRQQXHMLDVMQDHFSRASSIIDELFQDRFFXREPQDXYHYLPFSLPHRRPHFFFPKSRIVRSLMPFSPYEPLNFHAMFQPFLEMIHEAQQAMDIHFHSPAFQHPPXEFIREGDDDRXVCREIRHNSXGCLRMKDQCDKCREILSVDCSXNNPSQAKLRRELDESLQVAERLXRKYNELLKSYQWKMLNXSSLLEQLNEQFNWVSRLANLXQGEDQYYLRVXXVASHXSDSDVPSGVXEVVVKLFDSDPIXVXVPVEVSRKNPKFMEXVAEKALQEYRKKHREE

SEQ ID NO: 6433 - protein, 271 aa, Homo sapiens
  MOD_RES (4)..(4): Selenocysteine
  MOD_RES (14)..(14): Selenocysteine
  MOD_RES (25)..(25): Selenocysteine
  MOD_RES (58)..(58): Selenocysteine
  MOD_RES (63)..(63): Selenocysteine
  MOD_RES (69)..(69): Selenocysteine
  MOD_RES (88)..(88): Selenocysteine
  MOD_RES (93)..(93): Selenocysteine
  MOD_RES (105)..(105): Selenocysteine
  MOD_RES (120)..(120): Selenocysteine
  MOD_RES (170)..(170): Selenocysteine
  MOD_RES (238)..(238): Selenocysteine
  MOD_RES (249)..(249): Selenocysteine
  MOD_RES (259)..(259): Selenocysteine
MMKXLLLFVGLLLXWESGQVLGDQXVSDNELQEMSNQGSKYVNKEIQNAVNGVKQIKXLIEKXNEERKXLLSNLEEAKKKKEDALNEXRESEXKLKELPGVCNEXMMALWEECKPCLKQXCMKFYARVCRSGSGLVGRQLEEFLNQSSPFYFWMNGDRIDSLLENDRQQXHMLDVMQDHFSRASSIIDELFQDSLMPFSPYEPLNFHAMFQPFLEMIHEAQQAMDIHFHSPAFQHPPXEFIREGDDDRXVCREIRHNSXGCLRMKDQCDKC

SEQ ID NO: 6434 - protein, 140 aa, Homo sapiens
  MOD_RES (1)..(1): Any amino acid
  MOD_RES (6)..(6): Selenocysteine
  MOD_RES (29)..(29): Selenocysteine
  MOD_RES (46)..(46): Selenocysteine
  MOD_RES (67)..(67): Selenocysteine
  MOD_RES (78)..(79): Selenocysteine
  MOD_RES (84)..(84): Selenocysteine
  MOD_RES (94)..(94): Selenocysteine
  MOD_RES (107)..(107): Selenocysteine
  MOD_RES (109)..(109): Selenocysteine
  MOD_RES (124)..(124): Selenocysteine
XADCSXNNPSQAKLRRELDESLQVAERLXRKYNELLKSYQWKMLNXSSLLEQLNEQFNWVSRLANLXQGEDQYYLRVXXVASHXSDSDVPSGVXEVVVKLFDSDPIXVXVPVEVSRKNPKFMEXVAEKALQEYRKKHREE

SEQ ID NO: 6435 - protein, 284 aa, Homo sapiens
  MOD_RES (1)..(1): Any amino acid
  MOD_RES (33)..(33): Selenocysteine
  MOD_RES (60)..(60): Selenocysteine
  MOD_RES (66)..(66): Selenocysteine
  MOD_RES (135)..(135): Selenocysteine
  MOD_RES (146)..(146): Selenocysteine
  MOD_RES (156)..(156): Selenocysteine
  MOD_RES (178)..(178): Selenocysteine
  MOD_RES (201)..(201): Selenocysteine
  MOD_RES (218)..(218): Selenocysteine
  MOD_RES (239)..(239): Selenocysteine
  MOD_RES (250)..(251): Selenocysteine
  MOD_RES (256)..(256): Selenocysteine
  MOD_RES (266)..(266): Selenocysteine
  MOD_RES (279)..(279): Selenocysteine
  MOD_RES (281)..(281): Selenocysteine
XQLEEFLNQSSPFYFWMNGDRIDSLLENDRQQXHMLDVMQDHFSRASSIIDELFQDRFFXREPQDXYHYLPFSLPHRRPHFFFPKSRIVRSLMPFSPYEPLNFHAMFQPFLEMIHEAQQAMDIHFHSPAFQHPPXEFIREGDDDRXVCREIRHNSXGCLRMKDQCDKCREILSVDCSXNNPSQAKLRRELDESLQVAERLXRKYNELLKSYQWKMLNXSSLLEQLNEQFNWVSRLANLXQGEDQYYLRVXXVASHXSDSDVPSGVXEVVVKLFDSDPIXVXVPV

SEQ ID NO: 6436 - protein, 121 aa, Homo sapiens
  MOD_RES (18)..(18): Selenocysteine
  MOD_RES (39)..(39): Selenocysteine
  MOD_RES (47)..(47): Selenocysteine
  MOD_RES (64)..(64): Selenocysteine
  MOD_RES (72)..(72): Selenocysteine
  MOD_RES (90)..(90): Selenocysteine
  MOD_RES (99)..(99): Selenocysteine
MMRALGYPRHISMENFRXPNFGLVSEVLLWLVKRYEPQXDIPPDVDXEQDRVFFIKAIAQFMAXKAHIKLNXKKLYQADGYAVKELLKIXSVLYNAMKXKGMEGSEIVEEDVNKFKFDLGS

SEQ ID NO: 6437 - protein, 151 aa, Homo sapiens
  MOD_RES (3)..(3): Selenocysteine
  MOD_RES (15)..(15): Selenocysteine
  MOD_RES (28)..(28): Selenocysteine
  MOD_RES (33)..(33): Selenocysteine
  MOD_RES (67)..(67): Selenocysteine
  MOD_RES (82)..(82): Selenocysteine
  MOD_RES (92)..(92): Selenocysteine
  MOD_RES (101)..(101): Selenocysteine
  MOD_RES (124)..(124): Selenocysteine
MRXEAIARPLEINEXEKVMRIAIKEILXQVQKXKDLLNNVASDEANLEAKIEKRKLELERNRKRLEXLQSVRPCFMDEYEKXEEELQKQYDXYLEKFQNLXYLEQQLEDHHRMEQERFEEAKNXLCLIQNKLKEEEKRLLKSGSNDDSDID

SEQ ID NO: 6438 - protein, 247 aa, Homo sapiens
  MOD_RES (3)..(3): Selenocysteine
  MOD_RES (15)..(15): Selenocysteine
  MOD_RES (28)..(28): Selenocysteine
  MOD_RES (33)..(33): Selenocysteine
  MOD_RES (67)..(67): Selenocysteine
  MOD_RES (82)..(82): Selenocysteine
  MOD_RES (92)..(92): Selenocysteine
  MOD_RES (101)..(101): Selenocysteine
  MOD_RES (124)..(124): Selenocysteine
  MOD_RES (172)..(172): Selenocysteine
  MOD_RES (189)..(189): Selenocysteine
  MOD_RES (228)..(228): Selenocysteine
MRXEAIARPLEINEXEKVMRIAIKEILXQVQKXKDLLNNVASDEANLEAKIEKRKLELERNRKRLEXLQSVRPCFMDEYEKXEEELQKQYDXYLEKFQNLXYLEQQLEDHHRMEQERFEEAKNXLCLIQNKLKEEEKRLLKSGSNDDSDIDIQEDDESDSELEERRLPKPQXAMEMLMQGRPGKRIVGXMQGGDSDDNEDSEESEIDMEDDDDEDDDLEDESISLSPXKPNRRVRKSEPLDESDNDF

SEQ ID NO: 6439 - protein, 50 aa, Homo sapiens
  MOD_RES (10)..(10): Selenocysteine
  MOD_RES (29)..(29): Selenocysteine
MSFRDLRNFXEMMRALGYPRHISMENFRXPNFGLVSEVLLWLVKRPPRHI

SEQ ID NO: 6440 - protein, 387 aa, Homo sapiens
  MOD_RES (10)..(10): Selenocysteine
  MOD_RES (29)..(29): Selenocysteine
  MOD_RES (50)..(50): Selenocysteine
  MOD_RES (58)..(58): Selenocysteine
  MOD_RES (75)..(75): Selenocysteine
  MOD_RES (83)..(83): Selenocysteine
  MOD_RES (101)..(101): Selenocysteine
  MOD_RES (110)..(110): Selenocysteine
  MOD_RES (148)..(148): Selenocysteine
  MOD_RES (169)..(169): Selenocysteine
  MOD_RES (181)..(181): Selenocysteine
  MOD_RES (194)..(194): Selenocysteine
  MOD_RES (199)..(199): Selenocysteine
  MOD_RES (233)..(233): Selenocysteine
  MOD_RES (248)..(248): Selenocysteine
  MOD_RES (258)..(258): Selenocysteine
  MOD_RES (267)..(267): Selenocysteine
  MOD_RES (290)..(290): Selenocysteine
  MOD_RES (338)..(338): Selenocysteine
  MOD_RES (355)..(355): Selenocysteine
  MOD_RES (376)..(376): Selenocysteine
MSFRDLRNFXEMMRALGYPRHISMENFRXPNFGLVSEVLLWLVKRYEPQXDIPPDVDXEQDRVFFIKAIAQFMAXKAHIKLNXKKLYQADGYAVKELLKIXSVLYNAMKXKGMEGSEIVEEDVNKFKFDLGSKIADLKAARQLASEIXSKGASLYDLLGMEVELREMRXEAIARPLEINEXEKVMRIAIKEILXQVQKXKDLLNNVASDEANLEAKIEKRKLELERNRKRLEXLQSVRPCFMDEYEKXEEELQKQYDXYLEKFQNLXYLEQQLEDHHRMEQERFEEAKNXLCLIQNKLKEEEKRLLKSGSNDDSDIDIQEDDESDSELEERRLPKPQXAMEMLMQGRPGKRIVGXMQGGDSDDNVSPPLPSVVLCXLGLAVPIDGSG

SEQ ID NO: 6441 - protein, 413 aa, Homo sapiens
  MOD_RES (10)..(10): Selenocysteine
  MOD_RES (29)..(29): Selenocysteine
  MOD_RES (50)..(50): Selenocysteine
  MOD_RES (58)..(58): Selenocysteine
  MOD_RES (75)..(75): Selenocysteine
  MOD_RES (83)..(83): Selenocysteine
  MOD_RES (101)..(101): Selenocysteine
  MOD_RES (110)..(110): Selenocysteine
  MOD_RES (148)..(148): Selenocysteine
  MOD_RES (169)..(169): Selenocysteine
  MOD_RES (181)..(181): Selenocysteine
  MOD_RES (194)..(194): Selenocysteine
  MOD_RES (199)..(199): Selenocysteine
  MOD_RES (233)..(233): Selenocysteine
  MOD_RES (248)..(248): Selenocysteine
  MOD_RES (258)..(258): Selenocysteine
  MOD_RES (267)..(267): Selenocysteine
  MOD_RES (290)..(290): Selenocysteine
  MOD_RES (338)..(338): Selenocysteine
  MOD_RES (355)..(355): Selenocysteine
  MOD_RES (394)..(394): Selenocysteine
MSFRDLRNFXEMMRALGYPRHISMENFRXPNFGLVSEVLLWLVKRYEPQXDIPPDVDXEQDRVFFIKAIAQFMAXKAHIKLNXKKLYQADGYAVKELLKIXSVLYNAMKXKGMEGSEIVEEDVNKFKFDLGSKIADLKAARQLASEIXSKGASLYDLLGMEVELREMRXEAIARPLEINEXEKVMRIAIKEILXQVQKXKDLLNNVASDEANLEAKIEKRKLELERNRKRLEXLQSVRPCFMDEYEKXEEELQKQYDXYLEKFQNLXYLEQQLEDHHRMEQERFEEAKNXLCLIQNKLKEEEKRLLKSGSNDDSDIDIQEDDESDSELEERRLPKPQXAMEMLMQGRPGKRIVGXMQGGDSDDNEDSEESEIDMEDDDDEDDDLEDESISLSPXKPNRRVRKSEPLDESDNDF

SEQ ID NO: 6442 - protein, 432 aa, Homo sapiens
  MOD_RES (10)..(10): Selenocysteine
  MOD_RES (29)..(29): Selenocysteine
  MOD_RES (50)..(50): Selenocysteine
  MOD_RES (58)..(58): Selenocysteine
  MOD_RES (75)..(75): Selenocysteine
  MOD_RES (83)..(83): Selenocysteine
  MOD_RES (101)..(101): Selenocysteine
  MOD_RES (110)..(110): Selenocysteine
  MOD_RES (148)..(148): Selenocysteine
  MOD_RES (169)..(169): Selenocysteine
  MOD_RES (181)..(181): Selenocysteine
  MOD_RES (194)..(194): Selenocysteine
  MOD_RES (199)..(199): Selenocysteine
  MOD_RES (233)..(233): Selenocysteine
  MOD_RES (248)..(248): Selenocysteine
  MOD_RES (258)..(258): Selenocysteine
  MOD_RES (267)..(267): Selenocysteine
  MOD_RES (290)..(290): Selenocysteine
  MOD_RES (338)..(338): Selenocysteine
  MOD_RES (355)..(355): Selenocysteine
  MOD_RES (377)..(377): Selenocysteine
  MOD_RES (413)..(413): Selenocysteine
MSFRDLRNFXEMMRALGYPRHISMENFRXPNFGLVSEVLLWLVKRYEPQXDIPPDVDXEQDRVFFIKAIAQFMAXKAHIKLNXKKLYQADGYAVKELLKIXSVLYNAMKXKGMEGSEIVEEDVNKFKFDLGSKIADLKAARQLASEIXSKGASLYDLLGMEVELREMRXEAIARPLEINEXEKVMRIAIKEILXQVQKXKDLLNNVASDEANLEAKIEKRKLELERNRKRLEXLQSVRPCFMDEYEKXEEELQKQYDXYLEKFQNLXYLEQQLEDHHRMEQERFEEAKNXLCLIQNKLKEEEKRLLKSGSNDDSDIDIQEDDESDSELEERRLPKPQXAMEMLMQGRPGKRIVGXMQGGDSDDNMEAAPALLGKCKXSSSKKQEDSEESEIDMEDDDDEDDDLEDESISLSPXKPNRRVRKSEPLDESDNDF

SEQ ID NO: 6443 - protein, 201 aa, Homo sapiens
  MOD_RES (10)..(10): Selenocysteine
  MOD_RES (29)..(29): Selenocysteine
  MOD_RES (50)..(50): Selenocysteine
  MOD_RES (58)..(58): Selenocysteine
  MOD_RES (88)..(88): Selenocysteine
  MOD_RES (109)..(109): Selenocysteine
  MOD_RES (121)..(121): Selenocysteine
  MOD_RES (134)..(134): Selenocysteine
  MOD_RES (139)..(139): Selenocysteine
  MOD_RES (173)..(173): Selenocysteine
  MOD_RES (188)..(188): Selenocysteine
  MOD_RES (198)..(198): Selenocysteine
MSFRDLRNFXEMMRALGYPRHISMENFRXPNFGLVSEVLLWLVKRYEPQXDIPPDVDXEQDRVFFIKAIAQFMIADLKAARQLASEIXSKGASLYDLLGMEVELREMRXEAIARPLEINEXEKVMRIAIKEILXQVQKXKDLLNNVASDEANLEAKIEKRKLELERNRKRLEXLQSVRPCFMDEYEKXEEELQKQYDXYLE

SEQ ID NO: 6444 - protein, 35 aa, Homo sapiens
  MOD_RES (14)..(14): Selenocysteine
  MOD_RES (18)..(18): Selenocysteine
  MOD_RES (24)..(24): Selenocysteine
MSFRDLRNMSPRLXSRLXWILNRXEFSSLRQLPSS

SEQ ID NO: 6445 - protein, 41 aa, Homo sapiens
  MOD_RES (14)..(14): Selenocysteine
  MOD_RES (18)..(18): Selenocysteine
  MOD_RES (24)..(24): Selenocysteine
MSFRDLRNMSPRLXSRLXWILNRXEFSSLRQLPSSWPPRHI

SEQ ID NO: 6446 - protein, 28 aa, Homo sapiens
  MOD_RES (1)..(1): Any amino acid
  MOD_RES (9)..(9): Selenocysteine
  MOD_RES (16)..(16): Selenocysteine
XNRKEKIRXGKKSEAXRDSAECQAMFYG

SEQ ID NO: 6447 - protein, 371 aa, Homo sapiens
  MOD_RES (8)..(8): Selenocysteine
  MOD_RES (37)..(37): Selenocysteine
  MOD_RES (64)..(64): Selenocysteine
  MOD_RES (70)..(70): Selenocysteine
  MOD_RES (95)..(95): Selenocysteine
  MOD_RES (107)..(107): Selenocysteine
  MOD_RES (123)..(123): Selenocysteine
  MOD_RES (129)..(129): Selenocysteine
  MOD_RES (178)..(178): Selenocysteine
  MOD_RES (195)..(195): Selenocysteine
  MOD_RES (203)..(203): Selenocysteine
  MOD_RES (219)..(219): Selenocysteine
  MOD_RES (221)..(221): Selenocysteine
  MOD_RES (235)..(235): Selenocysteine
  MOD_RES (240)..(240): Selenocysteine
  MOD_RES (253)..(253): Selenocysteine
  MOD_RES (262)..(262): Selenocysteine
  MOD_RES (266)..(266): Selenocysteine
  MOD_RES (276)..(276): Selenocysteine
  MOD_RES (285)..(285): Selenocysteine
  MOD_RES (300)..(300): Selenocysteine
  MOD_RES (340)..(340): Selenocysteine
  MOD_RES (352)..(352): Selenocysteine
  MOD_RES (361)..(361): Selenocysteine
  MOD_RES (368)..(368): Selenocysteine
MEDEDYNXSISYGDEYPDYLDSIVVLEDLSPLEARVXRIFLVVVYSIVCFLGILGNGLVIIIAXFKMKKXVNMVWFLNLAVADFLFNVFLPIHIXYAAMDYHWVFGXAMCKISNFLLIHNMFXSVFLLXIISSDRCISVLLPVWSQNHRSVRLAYMACMVIWVLAFFLSSPSLVFRDXANLHGKISCFNNFSLSXPGSSSWPXHSQMDPVGYSRHMVVXVXRFLCGFLVPVLIIXACYLXIVCKLQRNRLAKXKKPFKIIVXIIIXFFLCWCPYHXLNLLELHHXAMPGSVFSLGLPLAXALAIANSCMNPILYVFMGQDFKKFKVALFSRLVNALSEDXGHSSYPSHRSFXKMSSMNERXSMNEREXGML

SEQ ID NO: 6448 - protein, 143 aa, Homo sapiens
  MOD_RES (10)..(10): Selenocysteine
  MOD_RES (39)..(39): Selenocysteine
  MOD_RES (66)..(66): Selenocysteine
  MOD_RES (72)..(72): Selenocysteine
  MOD_RES (97)..(97): Selenocysteine
  MOD_RES (109)..(109): Selenocysteine
  MOD_RES (125)..(125): Selenocysteine
  MOD_RES (131)..(131): Selenocysteine
MRMEDEDYNXSISYGDEYPDYLDSIVVLEDLSPLEARVXRIFLVVVYSIVCFLGILGNGLVIIIAXFKMKKXVNMVWFLNLAVADFLFNVFLPIHIXYAAMDYHWVFGXAMCKISNFLLIHNMFXSVFLLXIISSDRCISVLL

SEQ ID NO: 6449 - protein, 147 aa, Homo sapiens
  MOD_RES (10)..(10): Selenocysteine
  MOD_RES (39)..(39): Selenocysteine
  MOD_RES (66)..(66): Selenocysteine
  MOD_RES (72)..(72): Selenocysteine
  MOD_RES (97)..(97): Selenocysteine
  MOD_RES (109)..(109): Selenocysteine
  MOD_RES (125)..(125): Selenocysteine
  MOD_RES (131)..(131): Selenocysteine
MRMEDEDYNXSISYGDEYPDYLDSIVVLEDLSPLEARVXRIFLVVVYSIVCFLGILGNGLVIIIAXFKMKKXVNMVWFLNLAVADFLFNVFLPIHIXYAAMDYHWVFGXAMCKISNFLLIHNMFXSVFLLXIISSDRCISVLLPVWS

SEQ ID NO: 6450 - protein, 373 aa, Homo sapiens
  MOD_RES (10)..(10): Selenocysteine
  MOD_RES (39)..(39): Selenocysteine
  MOD_RES (66)..(66): Selenocysteine
  MOD_RES (72)..(72): Selenocysteine
  MOD_RES (97)..(97): Selenocysteine
  MOD_RES (109)..(109): Selenocysteine
  MOD_RES (125)..(125): Selenocysteine
  MOD_RES (131)..(131): Selenocysteine
  MOD_RES (180)..(180): Selenocysteine
  MOD_RES (197)..(197): Selenocysteine
  MOD_RES (205)..(205): Selenocysteine
  MOD_RES (221)..(221): Selenocysteine
  MOD_RES (223)..(223): Selenocysteine
  MOD_RES (237)..(237): Selenocysteine
  MOD_RES (242)..(242): Selenocysteine
  MOD_RES (255)..(255): Selenocysteine
  MOD_RES (264)..(264): Selenocysteine
  MOD_RES (268)..(268): Selenocysteine
  MOD_RES (278)..(278): Selenocysteine
  MOD_RES (287)..(287): Selenocysteine
  MOD_RES (302)..(302): Selenocysteine
  MOD_RES (342)..(342): Selenocysteine
  MOD_RES (354)..(354): Selenocysteine
  MOD_RES (363)..(363): Selenocysteine
  MOD_RES (370)..(370): Selenocysteine
MRMEDEDYNXSISYGDEYPDYLDSIVVLEDLSPLEARVXRIFLVVVYSIVCFLGILGNGLVIIIAXFKMKKXVNMVWFLNLAVADFLFNVFLPIHIXYAAMDYHWVFGXAMCKISNFLLIHNMFXSVFLLXIISSDRCISVLLPVWSQNHRSVRLAYMACMVIWVLAFFLSSPSLVFRDXANLHGKISCFNNFSLSXPGSSSWPXHSQMDPVGYSRHMVVXVXRFLCGFLVPVLIIXACYLXIVCKLQRNRLAKXKKPFKIIVXIIIXFFLCWCPYHXLNLLELHHXAMPGSVFSLGLPLAXALAIANSCMNPILYVFMGQDFKKFKVALFSRLVNALSEDXGHSSYPSHRSFXKMSSMNERXSMNEREXGML

SEQ ID NO: 6451 - protein, 79 aa, Homo sapiens
  MOD_RES (22)..(22): Selenocysteine
  MOD_RES (33)..(33): Selenocysteine
  MOD_RES (53)..(53): Selenocysteine
MQLNDKWQGLCWPMMDFLRCVXAALIYFAISIXAIAKYSDGASKAAGGSVPDXRAVCPSRSEMGREAGAAASRSRESAL

SEQ ID NO: 6452 - protein, 96 aa, Homo sapiens
  MOD_RES (22)..(22): Selenocysteine
  MOD_RES (33)..(33): Selenocysteine
  MOD_RES (54)..(54): Selenocysteine
  MOD_RES (59)..(59): Selenocysteine
  MOD_RES (81)..(82): Selenocysteine
  MOD_RES (86)..(86): Selenocysteine
MQLNDKWQGLCWPMMDFLRCVXAALIYFAISIXAIAKYSDGASKAAGVFGFFAXIVFAXDFYLIFNDVAKFLKQGDSADEXXAHKXEARCWGHGDL

SEQ ID NO: 6453 - protein, 96 aa, Homo sapiens
  MOD_RES (22)..(22): Selenocysteine
  MOD_RES (33)..(33): Selenocysteine
  MOD_RES (54)..(54): Selenocysteine
  MOD_RES (59)..(59): Selenocysteine
  MOD_RES (81)..(82): Selenocysteine
  MOD_RES (86)..(86): Selenocysteine
MQLNDKWQGLCWPMMDFLRCVXAALIYFAISIXAIAKYSDGASKAAGVFGFFAXIVFAXDFYLIFNDVAKFLKQGDSADEXXAHKXEEENSDSDSD

SEQ ID NO: 6454 - protein, 59 aa, Homo sapiens
  MOD_RES (49)..(49): Selenocysteine
MWPPDPDPDPDPEPAGGSRPGPAVPGLRALLPARAFLCSLKGPGGFVCXWCSCPHQPLW

SEQ ID NO: 6455 - protein, 116 aa, Homo sapiens
  MOD_RES (55)..(55): Selenocysteine
  MOD_RES (69)..(69): Selenocysteine
  MOD_RES (108)..(108): Selenocysteine
MWPPDPDPDPDPEPAGGSRPGPAVPGLRALLPARAFLCSLKGRLLLAESGLSFIXFICYVASSASAFLXAPLLEFLLALYFLFADAMQLNDKWQGLCWPMMDFLRCVXAALIYFAI

SEQ ID NO: 6456 - protein, 122 aa, Homo sapiens
  MOD_RES (55)..(55): Selenocysteine
  MOD_RES (69)..(69): Selenocysteine
  MOD_RES (108)..(108): Selenocysteine
  MOD_RES (119)..(119): Selenocysteine
MWPPDPDPDPDPEPAGGSRPGPAVPGLRALLPARAFLCSLKGRLLLAESGLSFIXFICYVASSASAFLXAPLLEFLLALYFLFADAMQLNDKWQGLCWPMMDFLRCVXAALIYFAISIXAIA

SEQ ID NO: 6457 - protein, 165 aa, Homo sapiens
  MOD_RES (55)..(55): Selenocysteine
  MOD_RES (69)..(69): Selenocysteine
  MOD_RES (108)..(108): Selenocysteine
  MOD_RES (119)..(119): Selenocysteine
  MOD_RES (139)..(139): Selenocysteine
MWPPDPDPDPDPEPAGGSRPGPAVPGLRALLPARAFLCSLKGRLLLAESGLSFIXFICYVASSASAFLXAPLLEFLLALYFLFADAMQLNDKWQGLCWPMMDFLRCVXAALIYFAISIXAIAKYSDGASKAAGGSVPDXRAVCPSRSEMGREAGAAASRSRESAL

SEQ ID NO: 6458 - protein, 182 aa, Homo sapiens
  MOD_RES (55)..(55): Selenocysteine
  MOD_RES (69)..(69): Selenocysteine
  MOD_RES (108)..(108): Selenocysteine
  MOD_RES (119)..(119): Selenocysteine
  MOD_RES (140)..(140): Selenocysteine
  MOD_RES (145)..(145): Selenocysteine
  MOD_RES (167)..(168): Selenocysteine
  MOD_RES (172)..(172): Selenocysteine
MWPPDPDPDPDPEPAGGSRPGPAVPGLRALLPARAFLCSLKGRLLLAESGLSFIXFICYVASSASAFLXAPLLEFLLALYFLFADAMQLNDKWQGLCWPMMDFLRCVXAALIYFAISIXAIAKYSDGASKAAGVFGFFAXIVFAXDFYLIFNDVAKFLKQGDSADEXXAHKXEEENSDSDSD

SEQ ID NO: 6459 - protein, 150 aa, Homo sapiens
  MOD_RES (55)..(55): Selenocysteine
  MOD_RES (69)..(69): Selenocysteine
  MOD_RES (108)..(108): Selenocysteine
  MOD_RES (113)..(113): Selenocysteine
  MOD_RES (135)..(136): Selenocysteine
  MOD_RES (140)..(140): Selenocysteine
MWPPDPDPDPDPEPAGGSRPGPAVPGLRALLPARAFLCSLKGRLLLAESGLSFIXFICYVASSASAFLXAPLLEFLLALYFLFADAMQLNDKWQGLCWPMMVFGFFAXIVFAXDFYLIFNDVAKFLKQGDSADEXXAHKXEEENSDSDSD

SEQ ID NO: 6460 - protein, 160 aa, Homo sapiens
  MOD_RES (21)..(21): Selenocysteine
  MOD_RES (116)..(116): Selenocysteine
  MOD_RES (126)..(126): Selenocysteine
  MOD_RES (136)..(136): Selenocysteine
  MOD_RES (155)..(155): Selenocysteine
  MOD_RES (159)..(159): Selenocysteine
MSSNECFKCGRSGHWARECPXGGGRGRGMRSRGRDICYRCGESGHLAKDCDLQEDACYNCGRGGHIAKDCKEPKREREQCCYNCGKPGHLARDCDHADEQKCYSCGEFGHIQKDCXKVKCYRCGEXGHVAINCSKXSEVNCYRCGESGHLARECXIEAXA

SEQ ID NO: 6461 - protein, 170 aa, Homo sapiens
  MOD_RES (21)..(21): Selenocysteine
  MOD_RES (126)..(126): Selenocysteine
  MOD_RES (136)..(136): Selenocysteine
  MOD_RES (146)..(146): Selenocysteine
  MOD_RES (165)..(165): Selenocysteine
  MOD_RES (169)..(169): Selenocysteine
MSSNECFKCGRSGHWARECPXGGGRGRGMRSRGRGFQFVSSSLPDICYRCGESGHLAKDCDLQEDACYNCGRGGHIAKDCKEPKREREQCCYNCGKPGHLARDCDHADEQKCYSCGEFGHIQKDCXKVKCYRCGEXGHVAINCSKXSEVNCYRCGESGHLARECXIEAXA

SEQ ID NO: 6462 - protein, 172 aa, Homo sapiens
  MOD_RES (21)..(21): Selenocysteine
  MOD_RES (128)..(128): Selenocysteine
  MOD_RES (138)..(138): Selenocysteine
  MOD_RES (148)..(148): Selenocysteine
  MOD_RES (167)..(167): Selenocysteine
  MOD_RES (171)..(171): Selenocysteine
MSSNECFKCGRSGHWARECPXGGGRGRGMRSRGRGFQFVSSSLPDICYRCGESGHLAKDCDLQEDVEACYNCGRGGHIAKDCKEPKREREQCCYNCGKPGHLARDCDHADEQKCYSCGEFGHIQKDCXKVKCYRCGEXGHVAINCSKXSEVNCYRCGESGHLARECXIEAXA

SEQ ID NO: 6463 - protein, 114 aa, Homo sapiens
  MOD_RES (21)..(21): Selenocysteine
  MOD_RES (81)..(81): Selenocysteine
  MOD_RES (87)..(87): Selenocysteine
  MOD_RES (91)..(91): Selenocysteine
  MOD_RES (104)..(105): Selenocysteine
MSSNECFKCGRSGHWARECPXGGGRGRGMRSRGRGGFQFVSSSLPDICYRCGESGHLAKDCDLQEDVLACFFSLLLKPAIXAVEVAXLPRXARSPRESESNAAXXVANQAIWLV

SEQ ID NO: 6464 - protein, 167 aa, Homo sapiens
  MOD_RES (21)..(21): Selenocysteine
  MOD_RES (38)..(38): Selenocysteine
  MOD_RES (123)..(123): Selenocysteine
  MOD_RES (133)..(133): Selenocysteine
  MOD_RES (143)..(143): Selenocysteine
  MOD_RES (162)..(162): Selenocysteine
  MOD_RES (166)..(166): Selenocysteine
MSSNECFKCGRSGHWARECPXGGGRGRGMRSRGRGGFXSDRDICYRCGESGHLAKDCDLQEDACYNCGRGGHIAKDCKEPKREREQCCYNCGKPGHLARDCDHADEQKCYSCGEFGHIQKDCXKVKCYRCGEXGHVAINCSKXSEVNCYRCGESGHLARECXIEAXA

SEQ ID NO: 6465 - protein, 177 aa, Homo sapiens
  MOD_RES (21)..(21): Selenocysteine
  MOD_RES (38)..(38): Selenocysteine
  MOD_RES (133)..(133): Selenocysteine
  MOD_RES (143)..(143): Selenocysteine
  MOD_RES (153)..(153): Selenocysteine
  MOD_RES (172)..(172): Selenocysteine
  MOD_RES (176)..(176): Selenocysteine
MSSNECFKCGRSGHWARECPXGGGRGRGMRSRGRGGFXSDRGFQFVSSSLPDICYRCGESGHLAKDCDLQEDACYNCGRGGHIAKDCKEPKREREQCCYNCGKPGHLARDCDHADEQKCYSCGEFGHIQKDCXKVKCYRCGEXGHVAINCSKXSEVNCYRCGESGHLARECXIEAXA

SEQ ID NO: 6466 - protein, 178 aa, Homo sapiens
  MOD_RES (21)..(21): Selenocysteine
  MOD_RES (38)..(38): Selenocysteine
  MOD_RES (134)..(134): Selenocysteine
  MOD_RES (144)..(144): Selenocysteine
  MOD_RES (154)..(154): Selenocysteine
  MOD_RES (173)..(173): Selenocysteine
  MOD_RES (177)..(177): Selenocysteine
MSSNECFKCGRSGHWARECPXGGGRGRGMRSRGRGGFXSDRGFQFVSSSLPDICYRCGESGHLAKDCDLQEDEACYNCGRGGHIAKDCKEPKREREQCCYNCGKPGHLARDCDHADEQKCYSCGEFGHIQKDCXKVKCYRCGEXGHVAINCSKXSEVNCYRCGESGHLARECXIEAXA

SEQ ID NO: 6467 - protein, 179 aa, Homo sapiens
  MOD_RES (21)..(21): Selenocysteine
  MOD_RES (38)..(38): Selenocysteine
  MOD_RES (135)..(135): Selenocysteine
  MOD_RES (145)..(145): Selenocysteine
  MOD_RES (155)..(155): Selenocysteine
  MOD_RES (174)..(174): Selenocysteine
  MOD_RES (178)..(178): Selenocysteine
MSSNECFKCGRSGHWARECPXGGGRGRGMRSRGRGGFXSDRGFQFVSSSLPDICYRCGESGHLAKDCDLQEDVEACYNCGRGGHIAKDCKEPKREREQCCYNCGKPGHLARDCDHADEQKCYSCGEFGHIQKDCXKVKCYRCGEXGHVAINCSKXSEVNCYRCGESGHLARECXIEAXA

SEQ ID NO: 6468 - protein, 759 aa, Homo sapiens
  MOD_RES (59)..(59): Selenocysteine
  MOD_RES (68)..(68): Selenocysteine
  MOD_RES (81)..(81): Selenocysteine
  MOD_RES (87)..(87): Selenocysteine
  MOD_RES (120)..(120): Selenocysteine
  MOD_RES (233)..(233): Selenocysteine
  MOD_RES (242)..(242): Selenocysteine
  MOD_RES (250)..(250): Selenocysteine
  MOD_RES (288)..(288): Selenocysteine
  MOD_RES (290)..(290): Selenocysteine
  MOD_RES (325)..(325): Selenocysteine
  MOD_RES (357)..(357): Selenocysteine
  MOD_RES (359)..(359): Selenocysteine
  MOD_RES (361)..(361): Selenocysteine
  MOD_RES (400)..(400): Selenocysteine
  MOD_RES (426)..(426): Selenocysteine
  MOD_RES (428)..(428): Selenocysteine
  MOD_RES (430)..(431): Selenocysteine
  MOD_RES (435)..(435): Selenocysteine
  MOD_RES (460)..(460): Selenocysteine
  MOD_RES (512)..(512): Selenocysteine
  MOD_RES (516)..(516): Selenocysteine
  MOD_RES (542)..(542): Selenocysteine
  MOD_RES (602)..(602): Selenocysteine
  MOD_RES (631)..(631): Selenocysteine
  MOD_RES (655)..(655): Selenocysteine
  MOD_RES (662)..(662): Selenocysteine
  MOD_RES (697)..(697): Selenocysteine
  MOD_RES (708)..(708): Selenocysteine
  MOD_RES (729)..(729): Selenocysteine
  MOD_RES (741)..(741): Selenocysteine
  MOD_RES (759)..(759): Selenocysteine
MESRSSPRLECSGAISAHCSLHLPDSSDFQLIFVFLVEMGFHHVGQAGLELLISSDLPXSASQSAGIXDMKLSMKNNIINXQQSFVXMPNVIVPDIEKEIRRMENGACSSFSEDDDSASXSEESENENPHARGSFSYKSLRKGGPSQREQYLPGAIALFNVNNSSNKDQEPEEKKKKKKEKKSKSDDKNENKNDPEKKKKKKDKEKKKKEEKSKDKKEEEKKEVVVIDPSGNXYYNWLFCIXLPVMYNWXMVIARACFDELQSDYLEYWLILDYVSDIVYLIDMFVRXRXGYLEQGLLVKEELKLINKYKSNLQFKLDVLSLIPXDLLYFKLGWNYPEIRLNRLLRFSRMFEFFQRXEXRXNYPNIFRISNLVMYIVIIIHWNACVFYSISKAIGFGNDXWVYPDINDPEFGRLARKYVYSLYWSXLXLXXIGEXPPPVRDSEYVFVVVDFLIGVLIFAXIVGNIGSMISNMNAARAEFQARIDAIKQYMHFRNVSKDMEKRVIKWFDYLWXNKKXVDEKEVLKYLPDKLRAEIAINVHLDXLKKVRIFADCEAGLLVELVLKLQPQVYSPGDYICKKGDIGREMYIIKEGKLAVVADDGVXQFVVLSDGSYFGEISILNIKGSKAGNRRXANIKSIGYSDLFCLSKDDLMEALXEYPDAKXMLEEKGKQILMKDGLLDLNIANAGSDPKDLEEKVXRMEGSVDLLQXRFARILAEYESMQQKLKQRLXKVEKFLKPLIDXEFSSIEGPGAESGPIDSX

SEQ ID NO: 6469 - protein, 99 aa, Homo sapiens
  MOD_RES (12)..(12): Selenocysteine
  MOD_RES (18)..(18): Selenocysteine
  MOD_RES (51)..(51): Selenocysteine
MKLSMKNNIINXQQSFVXMPNVIVPDIEKEIRRMENGACSSFSEDDDSASXSEESENENPHARGSFSYKSLRKGGPSQREQYLPGAIALFNVNNSSNKD

SEQ ID NO: 6470 - protein, 128 aa, Homo sapiens
  MOD_RES (12)..(12): Selenocysteine
  MOD_RES (18)..(18): Selenocysteine
  MOD_RES (51)..(51): Selenocysteine
MKLSMKNNIINXQQSFVXMPNVIVPDIEKEIRRMENGACSSFSEDDDSASXSEESENENPHARGSFSYKSLRKGGPSQREQYLPGAIALFNVNNSSNKDQEPEEKKKKKKEKKSKSDDKNENKNDPEK

SEQ ID NO: 6471 - protein, 690 aa, Homo sapiens
  MOD_RES (12)..(12): Selenocysteine
  MOD_RES (18)..(18): Selenocysteine
  MOD_RES (51)..(51): Selenocysteine
  MOD_RES (164)..(164): Selenocysteine
  MOD_RES (173)..(173): Selenocysteine
  MOD_RES (181)..(181): Selenocysteine
  MOD_RES (219)..(219): Selenocysteine
  MOD_RES (221)..(221): Selenocysteine
  MOD_RES (256)..(256): Selenocysteine
  MOD_RES (288)..(288): Selenocysteine
  MOD_RES (290)..(290): Selenocysteine
  MOD_RES (292)..(292): Selenocysteine
  MOD_RES (331)..(331): Selenocysteine
  MOD_RES (357)..(357): Selenocysteine
  MOD_RES (359)..(359): Selenocysteine
  MOD_RES (361)..(362): Selenocysteine
  MOD_RES (366)..(366): Selenocysteine
  MOD_RES (391)..(391): Selenocysteine
  MOD_RES (443)..(443): Selenocysteine
  MOD_RES (447)..(447): Selenocysteine
  MOD_RES (473)..(473): Selenocysteine
  MOD_RES (533)..(533): Selenocysteine
  MOD_RES (562)..(562): Selenocysteine
  MOD_RES (586)..(586): Selenocysteine
  MOD_RES (593)..(593): Selenocysteine
  MOD_RES (628)..(628): Selenocysteine
  MOD_RES (639)..(639): Selenocysteine
  MOD_RES (660)..(660): Selenocysteine
  MOD_RES (672)..(672): Selenocysteine
  MOD_RES (690)..(690): Selenocysteine
MKLSMKNNIINXQQSFVXMPNVIVPDIEKEIRRMENGACSSFSEDDDSASXSEESENENPHARGSFSYKSLRKGGPSQREQYLPGAIALFNVNNSSNKDQEPEEKKKKKKEKKSKSDDKNENKNDPEKKKKKKDKEKKKKEEKSKDKKEEEKKEVVVIDPSGNXYYNWLFCIXLPVMYNWXMVIARACFDELQSDYLEYWLILDYVSDIVYLIDMFVRXRXGYLEQGLLVKEELKLINKYKSNLQFKLDVLSLIPXDLLYFKLGWNYPEIRLNRLLRFSRMFEFFQRXEXRXNYPNIFRISNLVMYIVIIIHWNACVFYSISKAIGFGNDXWVYPDINDPEFGRLARKYVYSLYWSXLXLXXIGEXPPPVRDSEYVFVVVDFLIGVLIFAXIVGNIGSMISNMNAARAEFQARIDAIKQYMHFRNVSKDMEKRVIKWFDYLWXNKKXVDEKEVLKYLPDKLRAEIAINVHLDXLKKVRIFADCEAGLLVELVLKLQPQVYSPGDYICKKGDIGREMYIIKEGKLAVVADDGVXQFVVLSDGSYFGEISILNIKGSKAGNRRXANIKSIGYSDLFCLSKDDLMEALXEYPDAKXMLEEKGKQILMKDGLLDLNIANAGSDPKDLEEKVXRMEGSVDLLQXRFARILAEYESMQQKLKQRLXKVEKFLKPLIDXEFSSIEGPGAESGPIDSX

SEQ ID NO: 6472 - protein, 676 aa, Homo sapiens
  MOD_RES (6)..(6): Selenocysteine
  MOD_RES (14)..(14): Selenocysteine
  MOD_RES (20)..(20): Selenocysteine
  MOD_RES (42)..(42): Selenocysteine
  MOD_RES (54)..(54): Selenocysteine
  MOD_RES (66)..(66): Selenocysteine
  MOD_RES (135)..(135): Selenocysteine
  MOD_RES (155)..(155): Selenocysteine
  MOD_RES (206)..(206): Selenocysteine
  MOD_RES (218)..(218): Selenocysteine
  MOD_RES (227)..(229): Selenocysteine
  MOD_RES (241)..(241): Selenocysteine
  MOD_RES (250)..(250): Selenocysteine
  MOD_RES (273)..(273): Selenocysteine
  MOD_RES (275)..(275): Selenocysteine
  MOD_RES (277)..(277): Selenocysteine
  MOD_RES (314)..(314): Selenocysteine
  MOD_RES (342)..(342): Selenocysteine
  MOD_RES (344)..(344): Selenocysteine
  MOD_RES (346)..(347): Selenocysteine
  MOD_RES (351)..(351): Selenocysteine
  MOD_RES (376)..(376): Selenocysteine
  MOD_RES (412)..(412): Selenocysteine
  MOD_RES (417)..(417): Selenocysteine
  MOD_RES (432)..(432): Selenocysteine
  MOD_RES (458)..(458): Selenocysteine
  MOD_RES (483)..(483): Selenocysteine
  MOD_RES (518)..(518): Selenocysteine
  MOD_RES (547)..(547): Selenocysteine
  MOD_RES (571)..(571): Selenocysteine
  MOD_RES (621)..(621): Selenocysteine
  MOD_RES (624)..(624): Selenocysteine
  MOD_RES (636)..(636): Selenocysteine
  MOD_RES (669)..(669): Selenocysteine
  MOD_RES (671)..(671): Selenocysteine
MAKINXQYSHPSRXHLKVKXSDRDLNRAENGLSRAHSSSEEXSSVLQPGIAMEXRGLADSGQGSFXGQGIARLSRLIFLLRRWAARHVHHQDQGPDSFPDRFRGAELKEVSSQESNAQANVGSQEPADRGRRKKXKKKDAIVVDPSSNLYYRWLXAIALPVFYNWYLLICRACFDELQSEYLMLWLVLDYSADVLYVLDVLVRARXGFLEQGLMVSDXNRLWQHYKXXXQFKLDVLSLVPXDLAYLKVGXNYPEVRFNRLLKFSRLFEFFDRXEXRXNYPNMFRIGNLVLYILIIIHWNACIYFAISKFIGFGXDSWVYPNISIPEHGRLSRKYIYSLYWSXLXLXXIGEXPPPVKDEEYLFVVVDFLVGVLIFAXIVGNVGSMISNMNASRAEFQAKIDSIKQYMQFRKVXKDLEXRVIRWFDYLWANKKXVDEKEVLKSLPDKLKAEIAINVHLDXLKKVRIFQDCEAGLLVELVLKLRPXVFSPGDYICKKGDIGKEMYIINEGKLAVVADDGVXQFVVLSDGSYFGEISILNIKGSKSGNRRXANIRSIGYSDLFCLSKDDLMEALXEYPEAKKALEEKGRQILMKDNLIDEELARAGADPKDLEEKVEQLGSSLDXLQXRFARLLAEYNAXQMKMKQRLSQLESQVKGGGDKPLADGEVPGDAXKXEDKQQ

SEQ ID NO: 6473 - protein, 694 aa, Homo sapiens
  MOD_RES (6)..(6): Selenocysteine
  MOD_RES (14)..(14): Selenocysteine
  MOD_RES (20)..(20): Selenocysteine
  MOD_RES (42)..(42): Selenocysteine
  MOD_RES (54)..(54): Selenocysteine
  MOD_RES (66)..(66): Selenocysteine
  MOD_RES (141)..(141): Selenocysteine
  MOD_RES (143)..(143): Selenocysteine
  MOD_RES (147)..(147): Selenocysteine
  MOD_RES (153)..(153): Selenocysteine
  MOD_RES (173)..(173): Selenocysteine
  MOD_RES (224)..(224): Selenocysteine
  MOD_RES (236)..(236): Selenocysteine
  MOD_RES (245)..(247): Selenocysteine
  MOD_RES (259)..(259): Selenocysteine
  MOD_RES (268)..(268): Selenocysteine
  MOD_RES (291)..(291): Selenocysteine
  MOD_RES (293)..(293): Selenocysteine
  MOD_RES (295)..(295): Selenocysteine
  MOD_RES (332)..(332): Selenocysteine
  MOD_RES (360)..(360): Selenocysteine
  MOD_RES (362)..(362): Selenocysteine
  MOD_RES (364)..(365): Selenocysteine
  MOD_RES (369)..(369): Selenocysteine
  MOD_RES (394)..(394): Selenocysteine
  MOD_RES (430)..(430): Selenocysteine
  MOD_RES (435)..(435): Selenocysteine
  MOD_RES (450)..(450): Selenocysteine
  MOD_RES (476)..(476): Selenocysteine
  MOD_RES (501)..(501): Selenocysteine
  MOD_RES (536)..(536): Selenocysteine
  MOD_RES (565)..(565): Selenocysteine
  MOD_RES (589)..(589): Selenocysteine
  MOD_RES (639)..(639): Selenocysteine
  MOD_RES (642)..(642): Selenocysteine
  MOD_RES (654)..(654): Selenocysteine
  MOD_RES (687)..(687): Selenocysteine
  MOD_RES (689)..(689): Selenocysteine
MAKINXQYSHPSRXHLKVKXSDRDLNRAENGLSRAHSSSEEXSSVLQPGIAMEXRGLADSGQGSFXGQGIARLSRLIFLLRRWAARHVHHQDQGPDSFPDRFRGAELKEVSSQESNAQANVGSQEPADRGRSAWPLAKCNXNXSNNXEEEKKXKKKDAIVVDPSSNLYYRWLXAIALPVFYNWYLLICRACFDELQSEYLMLWLVLDYSADVLYVLDVLVRARXGFLEQGLMVSDXNRLWQHYKXXXQFKLDVLSLVPXDLAYLKVGXNYPEVRFNRLLKFSRLFEFFDRXEXRXNYPNMFRIGNLVLYILIIIHWNACIYFAISKFIGFGXDSWVYPNISIPEHGRLSRKYIYSLYWSXLXLXXIGEXPPPVKDEEYLFVVVDFLVGVLIFAXIVGNVGSMISNMNASRAEFQAKIDSIKQYMQFRKVXKDLEXRVIRWFDYLWANKKXVDEKEVLKSLPDKLKAEIAINVHLDXLKKVRIFQDCEAGLLVELVLKLRPXVFSPGDYICKKGDIGKEMYIINEGKLAVVADDGVXQFVVLSDGSYFGEISILNIKGSKSGNRRXANIRSIGYSDLFCLSKDDLMEALXEYPEAKKALEEKGRQILMKDNLIDEELARAGADPKDLEEKVEQLGSSLDXLQXRFARLLAEYNAXQMKMKQRLSQLESQVKGGGDKPLADGEVPGDAXKXEDKQQ

SEQ ID NO: 6474 - protein, 698 aa, Homo sapiens
  MOD_RES (3)..(3): Selenocysteine
  MOD_RES (15)..(15): Selenocysteine
  MOD_RES (48)..(48): Selenocysteine
  MOD_RES (145)..(145): Selenocysteine
  MOD_RES (147)..(147): Selenocysteine
  MOD_RES (151)..(151): Selenocysteine
  MOD_RES (157)..(157): Selenocysteine
  MOD_RES (177)..(177): Selenocysteine
  MOD_RES (228)..(228): Selenocysteine
  MOD_RES (240)..(240): Selenocysteine
  MOD_RES (249)..(251): Selenocysteine
  MOD_RES (263)..(263): Selenocysteine
  MOD_RES (272)..(272): Selenocysteine
  MOD_RES (295)..(295): Selenocysteine
  MOD_RES (297)..(297): Selenocysteine
  MOD_RES (299)..(299): Selenocysteine
  MOD_RES (336)..(336): Selenocysteine
  MOD_RES (364)..(364): Selenocysteine
  MOD_RES (366)..(366): Selenocysteine
  MOD_RES (368)..(369): Selenocysteine
  MOD_RES (373)..(373): Selenocysteine
  MOD_RES (398)..(398): Selenocysteine
  MOD_RES (434)..(434): Selenocysteine
  MOD_RES (439)..(439): Selenocysteine
  MOD_RES (454)..(454): Selenocysteine
  MOD_RES (480)..(480): Selenocysteine
  MOD_RES (505)..(505): Selenocysteine
  MOD_RES (540)..(540): Selenocysteine
  MOD_RES (569)..(569): Selenocysteine
  MOD_RES (593)..(593): Selenocysteine
  MOD_RES (643)..(643): Selenocysteine
  MOD_RES (646)..(646): Selenocysteine
  MOD_RES (658)..(658): Selenocysteine
  MOD_RES (691)..(691): Selenocysteine
  MOD_RES (693)..(693): Selenocysteine
MEXRGLADSGQGSFXGQGIARFGRIQKKSQPEKVVRAASRGRPLIGWXQWCAEDGGDESEMALAGSPGCSSGPQGRLSRLIFLLRRWAARHVHHQDQGPDSFPDRFRGAELKEVSSQESNAQANVGSQEPADRGRSAWPLAKCNXNXSNNXEEEKKXKKKDAIVVDPSSNLYYRWLXAIALPVFYNWYLLICRACFDELQSEYLMLWLVLDYSADVLYVLDVLVRARXGFLEQGLMVSDXNRLWQHYKXXXQFKLDVLSLVPXDLAYLKVGXNYPEVRFNRLLKFSRLFEFFDRXEXRXNYPNMFRIGNLVLYILIIIHWNACIYFAISKFIGFGXDSWVYPNISIPEHGRLSRKYIYSLYWSXLXLXXIGEXPPPVKDEEYLFVVVDFLVGVLIFAXIVGNVGSMISNMNASRAEFQAKIDSIKQYMQFRKVXKDLEXRVIRWFDYLWANKKXVDEKEVLKSLPDKLKAEIAINVHLDXLKKVRIFQDCEAGLLVELVLKLRPXVFSPGDYICKKGDIGKEMYIINEGKLAVVADDGVXQFVVLSDGSYFGEISILNIKGSKSGNRRXANIRSIGYSDLFCLSKDDLMEALXEYPEAKKALEEKGRQILMKDNLIDEELARAGADPKDLEEKVEQLGSSLDXLQXRFARLLAEYNAXQMKMKQRLSQLESQVKGGGDKPLADGEVPGDAXKXEDKQQ

SEQ ID NO: 6475 - protein, 1245 aa, Homo sapiens
  MOD_RES (15)..(15): Selenocysteine
  MOD_RES (19)..(19): Selenocysteine
  MOD_RES (48)..(48): Selenocysteine
  MOD_RES (74)..(74): Selenocysteine
  MOD_RES (80)..(80): Selenocysteine
  MOD_RES (82)..(82): Selenocysteine
  MOD_RES (104)..(104): Selenocysteine
  MOD_RES (122)..(122): Selenocysteine
  MOD_RES (134)..(134): Selenocysteine
  MOD_RES (137)..(137): Selenocysteine
  MOD_RES (140)..(140): Selenocysteine
  MOD_RES (152)..(152): Selenocysteine
  MOD_RES (188)..(188): Selenocysteine
  MOD_RES (206)..(206): Selenocysteine
  MOD_RES (211)..(211): Selenocysteine
  MOD_RES (237)..(237): Selenocysteine
  MOD_RES (243)..(243): Selenocysteine
  MOD_RES (285)..(285): Selenocysteine
  MOD_RES (316)..(316): Selenocysteine
  MOD_RES (321)..(321): Selenocysteine
  MOD_RES (367)..(367): Selenocysteine
  MOD_RES (389)..(389): Selenocysteine
  MOD_RES (394)..(394): Selenocysteine
  MOD_RES (437)..(437): Selenocysteine
  MOD_RES (455)..(455): Selenocysteine
  MOD_RES (466)..(466): Selenocysteine
  MOD_RES (482)..(482): Selenocysteine
  MOD_RES (494)..(494): Selenocysteine
  MOD_RES (504)..(504): Selenocysteine
  MOD_RES (536)..(537): Selenocysteine
  MOD_RES (541)..(541): Selenocysteine
  MOD_RES (550)..(550): Selenocysteine
  MOD_RES (553)..(553): Selenocysteine
  MOD_RES (573)..(573): Selenocysteine
  MOD_RES (586)..(586): Selenocysteine
  MOD_RES (607)..(607): Selenocysteine
  MOD_RES (646)..(646): Selenocysteine
  MOD_RES (678)..(678): Selenocysteine
  MOD_RES (701)..(701): Selenocysteine
  MOD_RES (705)..(705): Selenocysteine
  MOD_RES (717)..(717): Selenocysteine
  MOD_RES (788)..(789): Selenocysteine
  MOD_RES (815)..(815): Selenocysteine
  MOD_RES (836)..(836): Selenocysteine
  MOD_RES (839)..(839): Selenocysteine
  MOD_RES (848)..(848): Selenocysteine
  MOD_RES (861)..(861): Selenocysteine
  MOD_RES (881)..(881): Selenocysteine
  MOD_RES (885)..(885): Selenocysteine
  MOD_RES (894)..(894): Selenocysteine
  MOD_RES (913)..(913): Selenocysteine
  MOD_RES (918)..(918): Selenocysteine
  MOD_RES (1015)..(1015): Selenocysteine
  MOD_RES (1037)..(1037): Selenocysteine
  MOD_RES (1046)..(1046): Selenocysteine
  MOD_RES (1099)..(1099): Selenocysteine
  MOD_RES (1110)..(1110): Selenocysteine
  MOD_RES (1168)..(1168): Selenocysteine
  MOD_RES (1175)..(1175): Selenocysteine
  MOD_RES (1182)..(1182): Selenocysteine
MLGWVQRVLPQPPGXPRKXKMQEEEEVEPEPEMEAEVEPEPNPEEAEXESESMPPEESFKEEEVAVADPSPQEXKEAALXSXISLRAQGAEISEMNSPSRRVLXWLMKGVEKVIPQPVHSIXEDPAQILGHGSXGDXGCXDEPNEALEAQDXRPGLRLLLWLEQNLERVLPQPPKSSEVWRDEPAVAXAPPGRPQEMGPKLQAREXPSLPXPIPLQPKEEPKEAPAPEPQPGSQAQXSSLPPXRDPARLVAWVLHRLEMALPQPVLHGKIGEQEPDSPGICDVQXISILPGGQVEPDLVLEEVEPPWEDAHQDVSXSPQGXEVVPAYEEENKAVEKMPRELSRIEEEKEDEEEEEEEEEEEEEEEVXEVLLDSCVVSQVGVGQSEEDGXRPQSXSDQKLWEEVGEEAKKEAEEKAKEEAEEVAEEEAEKEPQDWAEXKEEPEAEAEAASSGVPAXKQHPEVQVEDXDADSCPLMAEENPPSXVLPPPSPAKSDXLIVPSSASGXHRKKLPSEDDEAEELKALSPAESPVVAWSDPXXPKDXDGQDRAASXASXNSAIINDRLQELVKLFKERXEKVKEKLIDPDVXSDEESPKPSPAKKAPEPAPDXKPAEAEPVEEEHYCDMLCCKFKHRPWKKYQFPQSIDPLXNLMYVLWLFFVVMAWNWNCWLIPVRWAFPYQXPDNIHHWLLMDYLCDLIYFLDIXVFQXRLQFVRGGDIIXDKKDMRNNYLKSRRFKMDLLSLLPLDFLYLKVGVNPLLRLPRCLKYMAFFEFNSRLESILSKAYVYRVIRXXAYLLYSLHLNSCLYYWASAYQGLGSXHWVYDGVGNSYIRCYYFAVKXLIXIGGLPDPKXLFEIVFQLLNYFXGVFAFSVMIGQMRDVVGAAXAGQXYYRSCMDSXVKYMNFYKIPKSVQNRVKXWYEYXWHSQGMLDESELMVQLPDKMRLDLAIDVNYNIVSKVALFQGCDRQMIFDMLKRLRSVVYLPNDYVCKKGEIGREMYIIQAGQVQVLGGPDGKSVLVXLKAGSVFGEISLLAVGGGNRRXANVVAHGFXNLFILDKKDLNEILVHYPESQKLLRKKARRMLRSNNKPKEEKSVLILPPRAGXPKLFNAALAMXGKMGGKGAKGGKLAHLRARLKELAALEAAAKQQELVEQAKSSQDVKGEEGSAAPDQHXHPKEAAXDPPAPRXPPEPPGSPPSSPPPASLGRPEGEEEGPAEPEEHSVRICMSPGPEPGEQILSVKMPEEREEKAE

SEQ ID NO: 6476 - protein, 214 aa, Homo sapiens
  MOD_RES (15)..(15): Selenocysteine
  MOD_RES (19)..(19): Selenocysteine
  MOD_RES (48)..(48): Selenocysteine
  MOD_RES (74)..(74): Selenocysteine
  MOD_RES (80)..(80): Selenocysteine
  MOD_RES (82)..(82): Selenocysteine
  MOD_RES (104)..(104): Selenocysteine
  MOD_RES (122)..(122): Selenocysteine
  MOD_RES (134)..(134): Selenocysteine
  MOD_RES (137)..(137): Selenocysteine
  MOD_RES (140)..(140): Selenocysteine
  MOD_RES (152)..(152): Selenocysteine
  MOD_RES (188)..(188): Selenocysteine
  MOD_RES (212)..(212): Selenocysteine
MLGWVQRVLPQPPGXPRKXKMQEEEEVEPEPEMEAEVEPEPNPEEAEXESESMPPEESFKEEEVAVADPSPQEXKEAALXSXISLRAQGAEISEMNSPSRRVLXWLMKGVEKVIPQPVHSIXEDPAQILGHGSXGDXGCXDEPNEALEAQDXRPGLRLLLWLEQNLERVLPQPPKSSEVWRDEPAVAXGAASDPAPPGRPQEMGPKLQAREXPS

SEQ ID NO: 6477 - protein, 299 aa, Homo sapiens
  MOD_RES (15)..(15): Selenocysteine
  MOD_RES (19)..(19): Selenocysteine
  MOD_RES (48)..(48): Selenocysteine
  MOD_RES (74)..(74): Selenocysteine
  MOD_RES (80)..(80): Selenocysteine
  MOD_RES (82)..(82): Selenocysteine
  MOD_RES (104)..(104): Selenocysteine
  MOD_RES (122)..(122): Selenocysteine
  MOD_RES (134)..(134): Selenocysteine
  MOD_RES (137)..(137): Selenocysteine
  MOD_RES (140)..(140): Selenocysteine
  MOD_RES (152)..(152): Selenocysteine
  MOD_RES (188)..(188): Selenocysteine
  MOD_RES (212)..(212): Selenocysteine
  MOD_RES (217)..(217): Selenocysteine
  MOD_RES (243)..(243): Selenocysteine
  MOD_RES (249)..(249): Selenocysteine
  MOD_RES (291)..(291): Selenocysteine
MLGWVQRVLPQPPGXPRKXKMQEEEEVEPEPEMEAEVEPEPNPEEAEXESESMPPEESFKEEEVAVADPSPQEXKEAALXSXISLRAQGAEISEMNSPSRRVLXWLMKGVEKVIPQPVHSIXEDPAQILGHGSXGDXGCXDEPNEALEAQDXRPGLRLLLWLEQNLERVLPQPPKSSEVWRDEPAVAXGAASDPAPPGRPQEMGPKLQAREXPSLPXPIPLQPKEEPKEAPAPEPQPGSQAQXSSLPPXRDPARLVAWVLHRLEMALPQPVLHGKIGEQEPDSPGICDVQXRVMGAGGL

SEQ ID NO: 6478 - protein, 1251 aa, Homo sapiens
  MOD_RES (15)..(15): Selenocysteine
  MOD_RES (19)..(19): Selenocysteine
  MOD_RES (48)..(48): Selenocysteine
  MOD_RES (74)..(74): Selenocysteine
  MOD_RES (80)..(80): Selenocysteine
  MOD_RES (82)..(82): Selenocysteine
  MOD_RES (104)..(104): Selenocysteine
  MOD_RES (122)..(122): Selenocysteine
  MOD_RES (134)..(134): Selenocysteine
  MOD_RES (137)..(137): Selenocysteine
  MOD_RES (140)..(140): Selenocysteine
  MOD_RES (152)..(152): Selenocysteine
  MOD_RES (188)..(188): Selenocysteine
  MOD_RES (212)..(212): Selenocysteine
  MOD_RES (217)..(217): Selenocysteine
  MOD_RES (243)..(243): Selenocysteine
  MOD_RES (249)..(249): Selenocysteine
  MOD_RES (291)..(291): Selenocysteine
  MOD_RES (322)..(322): Selenocysteine
  MOD_RES (327)..(327): Selenocysteine
  MOD_RES (373)..(373): Selenocysteine
  MOD_RES (395)..(395): Selenocysteine
  MOD_RES (400)..(400): Selenocysteine
  MOD_RES (443)..(443): Selenocysteine
  MOD_RES (461)..(461): Selenocysteine
  MOD_RES (472)..(472): Selenocysteine
  MOD_RES (488)..(488): Selenocysteine
  MOD_RES (500)..(500): Selenocysteine
  MOD_RES (510)..(510): Selenocysteine
  MOD_RES (542)..(543): Selenocysteine
  MOD_RES (547)..(547): Selenocysteine
  MOD_RES (556)..(556): Selenocysteine
  MOD_RES (559)..(559): Selenocysteine
  MOD_RES (579)..(579): Selenocysteine
  MOD_RES (592)..(592): Selenocysteine
  MOD_RES (613)..(613): Selenocysteine
  MOD_RES (652)..(652): Selenocysteine
  MOD_RES (684)..(684): Selenocysteine
  MOD_RES (707)..(707): Selenocysteine
  MOD_RES (711)..(711): Selenocysteine
  MOD_RES (723)..(723): Selenocysteine
  MOD_RES (794)..(795): Selenocysteine
  MOD_RES (821)..(821): Selenocysteine
  MOD_RES (842)..(842): Selenocysteine
  MOD_RES (845)..(845): Selenocysteine
  MOD_RES (854)..(854): Selenocysteine
  MOD_RES (867)..(867): Selenocysteine
  MOD_RES (887)..(887): Selenocysteine
  MOD_RES (891)..(891): Selenocysteine
  MOD_RES (900)..(900): Selenocysteine
  MOD_RES (919)..(919): Selenocysteine
  MOD_RES (924)..(924): Selenocysteine
  MOD_RES (1021)..(1021): Selenocysteine
  MOD_RES (1043)..(1043): Selenocysteine
  MOD_RES (1052)..(1052): Selenocysteine
  MOD_RES (1105)..(1105): Selenocysteine
  MOD_RES (1116)..(1116): Selenocysteine
  MOD_RES (1174)..(1174): Selenocysteine
  MOD_RES (1181)..(1181): Selenocysteine
  MOD_RES (1188)..(1188): Selenocysteine
MLGWVQRVLPQPPGXPRKXKMQEEEEVEPEPEMEAEVEPEPNPEEAEXESESMPPEESFKEEEVAVADPSPQEXKEAALXSXISLRAQGAEISEMNSPSRRVLXWLMKGVEKVIPQPVHSIXEDPAQILGHGSXGDXGCXDEPNEALEAQDXRPGLRLLLWLEQNLERVLPQPPKSSEVWRDEPAVAXGAASDPAPPGRPQEMGPKLQAREXPSLPXPIPLQPKEEPKEAPAPEPQPGSQAQXSSLPPXRDPARLVAWVLHRLEMALPQPVLHGKIGEQEPDSPGICDVQXISILPGGQVEPDLVLEEVEPPWEDAHQDVSXSPQGXEVVPAYEEENKAVEKMPRELSRIEEEKEDEEEEEEEEEEEEEEEVXEVLLDSCVVSQVGVGQSEEDGXRPQSXSDQKLWEEVGEEAKKEAEEKAKEEAEEVAEEEAEKEPQDWAEXKEEPEAEAEAASSGVPAXKQHPEVQVEDXDADSCPLMAEENPPSXVLPPPSPAKSDXLIVPSSASGXHRKKLPSEDDEAEELKALSPAESPVVAWSDPXXPKDXDGQDRAASXASXNSAIINDRLQELVKLFKERXEKVKEKLIDPDVXSDEESPKPSPAKKAPEPAPDXKPAEAEPVEEEHYCDMLCCKFKHRPWKKYQFPQSIDPLXNLMYVLWLFFVVMAWNWNCWLIPVRWAFPYQXPDNIHHWLLMDYLCDLIYFLDIXVFQXRLQFVRGGDIIXDKKDMRNNYLKSRRFKMDLLSLLPLDFLYLKVGVNPLLRLPRCLKYMAFFEFNSRLESILSKAYVYRVIRXXAYLLYSLHLNSCLYYWASAYQGLGSXHWVYDGVGNSYIRCYYFAVKXLIXIGGLPDPKXLFEIVFQLLNYFXGVFAFSVMIGQMRDVVGAAXAGQXYYRSCMDSXVKYMNFYKIPKSVQNRVKXWYEYXWHSQGMLDESELMVQLPDKMRLDLAIDVNYNIVSKVALFQGCDRQMIFDMLKRLRSVVYLPNDYVCKKGEIGREMYIIQAGQVQVLGGPDGKSVLVXLKAGSVFGEISLLAVGGGNRRXANVVAHGFXNLFILDKKDLNEILVHYPESQKLLRKKARRMLRSNNKPKEEKSVLILPPRAGXPKLFNAALAMXGKMGGKGAKGGKLAHLRARLKELAALEAAAKQQELVEQAKSSQDVKGEEGSAAPDQHXHPKEAAXDPPAPRXPPEPPGSPPSSPPPASLGRPEGEEEGPAEPEEHSVRICMSPGPEPGEQILSVKMPEEREEKAE

SEQ ID NO: 6479 - protein, 127 aa, Homo sapiens
  MOD_RES (1)..(1): Any amino acid
  MOD_RES (37)..(37): Selenocysteine
  MOD_RES (59)..(59): Selenocysteine
  MOD_RES (68)..(68): Selenocysteine
  MOD_RES (103)..(103): Selenocysteine
  MOD_RES (114)..(114): Selenocysteine
  MOD_RES (116)..(116): Selenocysteine
  MOD_RES (118)..(118): Selenocysteine
  MOD_RES (125)..(125): Selenocysteine
XNDYVCKKGEIGREMYIIQAGQVQVLGGPDGKSVLVXLKAGSVFGEISLLAVGGGNRRXANVVAHGFXNLFILDKKDLNEILVHYPESQKLLRKKARPRARKXSRERKAPPPQXSXRXQRRPPPXHP

SEQ ID NO: 6480 - protein, 111 aa, Homo sapiens
  MOD_RES (9)..(9): Selenocysteine
  MOD_RES (14)..(14): Selenocysteine
  MOD_RES (43)..(43): Selenocysteine
  MOD_RES (47)..(47): Selenocysteine
  MOD_RES (63)..(63): Selenocysteine
  MOD_RES (69)..(69): Selenocysteine
  MOD_RES (74)..(74): Selenocysteine
  MOD_RES (101)..(101): Selenocysteine
AHGFANLLXLDKKXLQEILVHYPDSERILMKKARVLLKQKAKXAEAXPPRKDLALLFPPKEEXPKLFKXLLGGXGKASLARLLKLKREQAAQGQFLPVSFXAGIFLGHLRL

SEQ ID NO: 6481 - protein, 809 aa, Homo sapiens
  MOD_RES (6)..(6): Selenocysteine
  MOD_RES (40)..(41): Selenocysteine
  MOD_RES (55)..(55): Selenocysteine
  MOD_RES (58)..(58): Selenocysteine
  MOD_RES (61)..(61): Selenocysteine
  MOD_RES (67)..(67): Selenocysteine
  MOD_RES (83)..(84): Selenocysteine
  MOD_RES (95)..(95): Selenocysteine
  MOD_RES (97)..(97): Selenocysteine
  MOD_RES (143)..(143): Selenocysteine
  MOD_RES (164)..(164): Selenocysteine
  MOD_RES (168)..(168): Selenocysteine
  MOD_RES (181)..(181): Selenocysteine
  MOD_RES (198)..(198): Selenocysteine
  MOD_RES (214)..(214): Selenocysteine
  MOD_RES (226)..(226): Selenocysteine
  MOD_RES (246)..(246): Selenocysteine
  MOD_RES (296)..(296): Selenocysteine
  MOD_RES (298)..(298): Selenocysteine
  MOD_RES (332)..(332): Selenocysteine
  MOD_RES (356)..(357): Selenocysteine
  MOD_RES (382)..(383): Selenocysteine
  MOD_RES (404)..(404): Selenocysteine
  MOD_RES (407)..(407): Selenocysteine
  MOD_RES (416)..(416): Selenocysteine
  MOD_RES (449)..(449): Selenocysteine
  MOD_RES (462)..(462): Selenocysteine
  MOD_RES (481)..(481): Selenocysteine
  MOD_RES (486)..(486): Selenocysteine
  MOD_RES (501)..(501): Selenocysteine
  MOD_RES (504)..(505): Selenocysteine
  MOD_RES (530)..(530): Selenocysteine
  MOD_RES (578)..(578): Selenocysteine
  MOD_RES (583)..(583): Selenocysteine
  MOD_RES (605)..(605): Selenocysteine
  MOD_RES (618)..(618): Selenocysteine
  MOD_RES (623)..(623): Selenocysteine
  MOD_RES (652)..(652): Selenocysteine
  MOD_RES (656)..(656): Selenocysteine
  MOD_RES (672)..(672): Selenocysteine
  MOD_RES (678)..(678): Selenocysteine
  MOD_RES (683)..(683): Selenocysteine
  MOD_RES (757)..(757): Selenocysteine
  MOD_RES (773)..(773): Selenocysteine
  MOD_RES (779)..(779): Selenocysteine
  MOD_RES (800)..(800): Selenocysteine
MFKSLXKVNKVKPIGENNENEQSSRRNEEGSHPSNQSQQXXAQEENKGEEKSLKXKSXPVXSEEPHXNIQDKLSKKNSSGDLXXNPDPQNAAEPXGXVPEQKEMDPGKEGPNSPQNKPPAAPVINEYADAQLHNLVKRMRQRXALYKKKLVEGDLSSPEASPQXAKPXAVPPVKESDDKPXEHYYRLLWFKVKKMPLXEYLKRIKLPNSIDSYXDRLYLLWLLLVXLAYNWNCCFIPLRLVFPYQXADNIHYWLIADIICDIIYLYDMLFIQPRLQFVRGGDIIVDSNELRKHYRXSXKFQLDVASIIPFDICYLFFGFNPMFRANRMLKYXSFFEFNHHLESIMDKAYIYRVIRXXGYLLFILHINACVYYWASNYEGIGXXRWVYDGEGNEYLRCYYWAVRXLIXIGGLPEPQXLFEIVFQLLNFFSGVFVFSSLIGQMRDVIGAAXANQNYFRACMDDXIAYMNNYSIPKLVQKRVRXWYEYXWDSQRMLDESDLLKXLPXXVQLALAIDVNFSIISKVDLFKGCDXQMIYDMLLRLKSVLYLPGDFVCKKGEIGKEMYIIKHGEVQVLGGPDGXKVLVXLKAGSVFGEISLLAAGGGNRRXANVVAHGFANLLXLDKKXLQEILVHYPDSERILMKKARVLLKQKAKXAEAXPPRKDLALLFPPKEEXPKLFKXLLGGXGKASLARLLKLKREQAAQKKENSEGGEEEGKENEDKQKENEDKQKENEDKGKENEDKDKGREPEEKPLDRPECXASPIAVEEEPHSVRRXVLPRGXSRQSLIISMAPSAEGGEEVLXIEVKEKAKQ

SEQ ID NO: 6482 - protein, 33 aa, Homo sapiens
  MOD_RES (4)..(4): Selenocysteine
  MOD_RES (17)..(17): Selenocysteine
MAFXFAAFCYMLALLLXAALIFFAIWHDKEEFG

SEQ ID NO: 6483 - protein, 136 aa, Homo sapiens
  MOD_RES (4)..(4): Selenocysteine
  MOD_RES (17)..(17): Selenocysteine
  MOD_RES (36)..(36): Selenocysteine
  MOD_RES (47)..(47): Selenocysteine
  MOD_RES (74)..(74): Selenocysteine
  MOD_RES (104)..(105): Selenocysteine
MAFXFAAFCYMLALLLXAALIFFAIWHIIAFDELKXDYKNPIDQCNXLNPLVLPEYLIHAFFCVMFLCAAEWLXLGLNMPLLAYHIWRYMSRPVMSGPGLYDPXXIMNADILAYCQKEGWCKLAFYLLAFFYYLYG

SEQ ID NO: 6484 - protein, 144 aa, Homo sapiens
  MOD_RES (4)..(4): Selenocysteine
  MOD_RES (17)..(17): Selenocysteine
  MOD_RES (36)..(36): Selenocysteine
  MOD_RES (47)..(47): Selenocysteine
  MOD_RES (74)..(74): Selenocysteine
  MOD_RES (104)..(105): Selenocysteine
MAFXFAAFCYMLALLLXAALIFFAIWHIIAFDELKXDYKNPIDQCNXLNPLVLPEYLIHAFFCVMFLCAAEWLXLGLNMPLLAYHIWRYMSRPVMSGPGLYDPXXIMNADILAYCQKEGWCKLAFYLLAFFYYLYGMIYVLVSS

SEQ ID NO: 6485 - protein, 96 aa, Homo sapiens
  MOD_RES (4)..(4): Selenocysteine
  MOD_RES (17)..(17): Selenocysteine
  MOD_RES (36)..(36): Selenocysteine
  MOD_RES (47)..(47): Selenocysteine
  MOD_RES (74)..(74): Selenocysteine
MAFXFAAFCYMLALLLXAALIFFAIWHIIAFDELKXDYKNPIDQCNXLNPLVLPEYLIHAFFCVMFLCAAEWLXLGLNMPLLAYHIWSMIYVLVSS

SEQ ID NO: 6486 - protein, 160 aa, Homo sapiens
  MOD_RES (4)..(4): Selenocysteine
  MOD_RES (17)..(17): Selenocysteine
  MOD_RES (36)..(36): Selenocysteine
  MOD_RES (47)..(47): Selenocysteine
  MOD_RES (51)..(51): Selenocysteine
  MOD_RES (90)..(90): Selenocysteine
  MOD_RES (120)..(121): Selenocysteine
MAFXFAAFCYMLALLLXAALIFFAIWHIIAFDELKXDYKNPIDQCNXLNPXVEKVKKIKRVKIALKLVLPEYLIHAFFCVMFLCAAEWLXLGLNMPLLAYHIWRYMSRPVMSGPGLYDPXXIMNADILAYCQKEGWCKLAFYLLAFFYYLYGMIYVLVSS

SEQ ID NO: 6487 - protein, 53 aa, Homo sapiens
  MOD_RES (4)..(4): Selenocysteine
  MOD_RES (17)..(17): Selenocysteine
  MOD_RES (36)..(36): Selenocysteine
  MOD_RES (47)..(47): Selenocysteine
MAFXFAAFCYMLALLLXAALIFFAIWHIIAFDELKXDYKNPIDQCNXLNPVYE

SEQ ID NO: 6488 - protein, 121 aa, Homo sapiens
  MOD_RES (4)..(4): Selenocysteine
  MOD_RES (17)..(17): Selenocysteine
  MOD_RES (51)..(51): Selenocysteine
  MOD_RES (81)..(82): Selenocysteine
MAFXFAAFCYMLALLLXAALIFFAIWHLVLPEYLIHAFFCVMFLCAAEWLXLGLNMPLLAYHIWRYMSRPVMSGPGLYDPXXIMNADILAYCQKEGWCKLAFYLLAFFYYLYGMIYVLVSS

SEQ ID NO: 6489 - protein, 312 aa, Homo sapiens
  MOD_RES (6)..(6): Selenocysteine
  MOD_RES (8)..(8): Selenocysteine
  MOD_RES (14)..(14): Selenocysteine
  MOD_RES (76)..(76): Selenocysteine
  MOD_RES (83)..(83): Selenocysteine
  MOD_RES (90)..(90): Selenocysteine
  MOD_RES (107)..(107): Selenocysteine
  MOD_RES (169)..(169): Selenocysteine
  MOD_RES (214)..(215): Selenocysteine
  MOD_RES (227)..(227): Selenocysteine
  MOD_RES (231)..(231): Selenocysteine
  MOD_RES (282)..(282): Selenocysteine
  MOD_RES (287)..(287): Selenocysteine
  MOD_RES (298)..(298): Selenocysteine
MEPVEXWXPGKVAXWLRGLDDSLQDYPFEDWQLPGKNLLQLCPQSLEALAVRSLGHQELILGGVEQLQALSSRLQXENLQSLXEGLLGAXHDFQSIVQGCLGDCAKXPIDVLCAAVELLHEADALLFWLSRYLFSHLNDFSACQEIRDLLEELSQVLHEDGPAAEKEGXVLRICSHVAGICHNILVCCPKELLEQKAVLEQVQLDSPLGLEIHXXSNCQHFVSQVDXQVPXDSRLQIQPGDEVVQINEQVVVGWPRKNMVRELLREPAGLSLVLKKIPIPEXPPQVXGSVQVCLGGEXVGSSHPPCPPQGPI

SEQ ID NO: 6490 - protein, 713 aa, Homo sapiens
  MOD_RES (6)..(6): Selenocysteine
  MOD_RES (8)..(8): Selenocysteine
  MOD_RES (14)..(14): Selenocysteine
  MOD_RES (76)..(76): Selenocysteine
  MOD_RES (83)..(83): Selenocysteine
  MOD_RES (90)..(90): Selenocysteine
  MOD_RES (107)..(107): Selenocysteine
  MOD_RES (169)..(169): Selenocysteine
  MOD_RES (214)..(215): Selenocysteine
  MOD_RES (227)..(227): Selenocysteine
  MOD_RES (231)..(231): Selenocysteine
  MOD_RES (282)..(282): Selenocysteine
  MOD_RES (286)..(286): Selenocysteine
  MOD_RES (333)..(333): Selenocysteine
  MOD_RES (360)..(360): Selenocysteine
  MOD_RES (382)..(382): Selenocysteine
  MOD_RES (428)..(428): Selenocysteine
  MOD_RES (466)..(466): Selenocysteine
  MOD_RES (479)..(479): Selenocysteine
  MOD_RES (481)..(481): Selenocysteine
  MOD_RES (492)..(492): Selenocysteine
  MOD_RES (515)..(515): Selenocysteine
  MOD_RES (544)..(544): Selenocysteine
  MOD_RES (549)..(549): Selenocysteine
  MOD_RES (551)..(551): Selenocysteine
  MOD_RES (557)..(557): Selenocysteine
  MOD_RES (563)..(563): Selenocysteine
  MOD_RES (592)..(592): Selenocysteine
  MOD_RES (622)..(622): Selenocysteine
  MOD_RES (643)..(643): Selenocysteine
  MOD_RES (678)..(678): Selenocysteine
  MOD_RES (682)..(682): Selenocysteine
  MOD_RES (703)..(703): Selenocysteine
MEPVEXWXPGKVAXWLRGLDDSLQDYPFEDWQLPGKNLLQLCPQSLEALAVRSLGHQELILGGVEQLQALSSRLQXENLQSLXEGLLGAXHDFQSIVQGCLGDCAKXPIDVLCAAVELLHEADALLFWLSRYLFSHLNDFSACQEIRDLLEELSQVLHEDGPAAEKEGXVLRICSHVAGICHNILVCCPKELLEQKAVLEQVQLDSPLGLEIHXXSNCQHFVSQVDXQVPXDSRLQIQPGDEVVQINEQVVVGWPRKNMVRELLREPAGLSLVLKKIPIPEXPPQXPPQVLDSPHQRSPSLSLAPLSPRAPSEDVFAFDLSSNPSPGPSPAWXDSASLGPEPLPIPPEPPAILPAGVAGXPGLPESPDKSPVGRKKSKGLAXRLSRRRVSCRELGRPDCDGWLLLRKAPGGFMGPRWRRRWFVLKGHXLYWYRQPQDEKAEGLINVSNYSLESGHDQKKKYVFQLXHDVYKPFIFAADXLXDLSMWVRHLIXCISKYQSPGRAPPPREEDCYSEXEAEDPDDEAGSHSASPSPAQAGSPLHGDXSPAAXPXQRSPRXSFGSLXDSSEEALEGMVRGLRQGGVSLLGQPQPLXQEQWRSSFMRRNRDPQLNERVHRVRALQSXLKAKLQELQVLEEVLGDPELXGEKFRQWKEQNRELYSEGLGAWGVAQAEGSSHILXSDSXEQSPHSLPSDPEEHSHLCPLXSESSLRPPDL

SEQ ID NO: 6491 - protein, 720 aa, Homo sapiens
  MOD_RES (6)..(6): Selenocysteine
  MOD_RES (8)..(8): Selenocysteine
  MOD_RES (14)..(14): Selenocysteine
  MOD_RES (76)..(76): Selenocysteine
  MOD_RES (83)..(83): Selenocysteine
  MOD_RES (90)..(90): Selenocysteine
  MOD_RES (107)..(107): Selenocysteine
  MOD_RES (169)..(169): Selenocysteine
  MOD_RES (214)..(215): Selenocysteine
  MOD_RES (227)..(227): Selenocysteine
  MOD_RES (231)..(231): Selenocysteine
  MOD_RES (289)..(289): Selenocysteine
  MOD_RES (293)..(293): Selenocysteine
  MOD_RES (340)..(340): Selenocysteine
  MOD_RES (367)..(367): Selenocysteine
  MOD_RES (389)..(389): Selenocysteine
  MOD_RES (435)..(435): Selenocysteine
  MOD_RES (473)..(473): Selenocysteine
  MOD_RES (486)..(486): Selenocysteine
  MOD_RES (488)..(488): Selenocysteine
  MOD_RES (499)..(499): Selenocysteine
  MOD_RES (522)..(522): Selenocysteine
  MOD_RES (551)..(551): Selenocysteine
  MOD_RES (556)..(556): Selenocysteine
  MOD_RES (558)..(558): Selenocysteine
  MOD_RES (564)..(564): Selenocysteine
  MOD_RES (570)..(570): Selenocysteine
  MOD_RES (599)..(599): Selenocysteine
  MOD_RES (629)..(629): Selenocysteine
  MOD_RES (650)..(650): Selenocysteine
  MOD_RES (685)..(685): Selenocysteine
  MOD_RES (689)..(689): Selenocysteine
  MOD_RES (710)..(710): Selenocysteine
MEPVEXWXPGKVAXWLRGLDDSLQDYPFEDWQLPGKNLLQLCPQSLEALAVRSLGHQELILGGVEQLQALSSRLQXENLQSLXEGLLGAXHDFQSIVQGCLGDCAKXPIDVLCAAVELLHEADALLFWLSRYLFSHLNDFSACQEIRDLLEELSQVLHEDGPAAEKEGXVLRICSHVAGICHNILVCCPKELLEQKAVLEQVQLDSPLGLEIHXXSNCQHFVSQVDXQVPXDSRLQIQPGDEVVQINEQVVVREERDMVGWPRKNMVRELLREPAGLSLVLKKIPIPEXPPQXPPQVLDSPHQRSPSLSLAPLSPRAPSEDVFAFDLSSNPSPGPSPAWXDSASLGPEPLPIPPEPPAILPAGVAGXPGLPESPDKSPVGRKKSKGLAXRLSRRRVSCRELGRPDCDGWLLLRKAPGGFMGPRWRRRWFVLKGHXLYWYRQPQDEKAEGLINVSNYSLESGHDQKKKYVFQLXHDVYKPFIFAADXLXDLSMWVRHLIXCISKYQSPGRAPPPREEDCYSEXEAEDPDDEAGSHSASPSPAQAGSPLHGDXSPAAXPXQRSPRXSFGSLXDSSEEALEGMVRGLRQGGVSLLGQPQPLXQEQWRSSFMRRNRDPQLNERVHRVRALQSXLKAKLQELQVLEEVLGDPELXGEKFRQWKEQNRELYSEGLGAWGVAQAEGSSHILXSDSXEQSPHSLPSDPEEHSHLCPLXSESSLRPPDL

SEQ ID NO: 6492 - protein, 229 aa, Homo sapiens
  MOD_RES (6)..(6): Selenocysteine
  MOD_RES (8)..(8): Selenocysteine
  MOD_RES (14)..(14): Selenocysteine
  MOD_RES (76)..(76): Selenocysteine
  MOD_RES (83)..(83): Selenocysteine
  MOD_RES (90)..(90): Selenocysteine
  MOD_RES (107)..(107): Selenocysteine
  MOD_RES (169)..(169): Selenocysteine
  MOD_RES (193)..(193): Selenocysteine
MEPVEXWXPGKVAXWLRGLDDSLQDYPFEDWQLPGKNLLQLCPQSLEALAVRSLGHQELILGGVEQLQALSSRLQXENLQSLXEGLLGAXHDFQSIVQGCLGDCAKXPIDVLCAAVELLHEADALLFWLSRYLFSHLNDFSACQEIRDLLEELSQVLHEDGPAAEKEGXVLRIPRGWDLPQHPGLLPQGAAGXEGRARAGAAGQSIGPRNSHHQQLPALCVPSGHPGSH

SEQ ID NO: 6493 - protein, 63 aa, Homo sapiens
  MOD_RES (6)..(6): Selenocysteine
  MOD_RES (8)..(8): Selenocysteine
  MOD_RES (14)..(15): Selenocysteine
  MOD_RES (19)..(19): Selenocysteine
  MOD_RES (24)..(24): Selenocysteine
  MOD_RES (31)..(31): Selenocysteine
  MOD_RES (50)..(50): Selenocysteine
MEPVEXWXPGKVLXXPCRXIPLRXGSCLARXCSSSAPKASRLWLCGLWDXRSSSWAGWNSSRP

SEQ ID NO: 6494 - protein, 455 aa, Homo sapiens
  MOD_RES (24)..(24): Selenocysteine
  MOD_RES (28)..(28): Selenocysteine
  MOD_RES (75)..(75): Selenocysteine
  MOD_RES (102)..(102): Selenocysteine
  MOD_RES (124)..(124): Selenocysteine
  MOD_RES (170)..(170): Selenocysteine
  MOD_RES (208)..(208): Selenocysteine
  MOD_RES (221)..(221): Selenocysteine
  MOD_RES (223)..(223): Selenocysteine
  MOD_RES (234)..(234): Selenocysteine
  MOD_RES (257)..(257): Selenocysteine
  MOD_RES (286)..(286): Selenocysteine
  MOD_RES (291)..(291): Selenocysteine
  MOD_RES (293)..(293): Selenocysteine
  MOD_RES (299)..(299): Selenocysteine
  MOD_RES (305)..(305): Selenocysteine
  MOD_RES (334)..(334): Selenocysteine
  MOD_RES (364)..(364): Selenocysteine
  MOD_RES (385)..(385): Selenocysteine
  MOD_RES (420)..(420): Selenocysteine
  MOD_RES (424)..(424): Selenocysteine
  MOD_RES (445)..(445): Selenocysteine
MVRELLREPAGLSLVLKKIPIPEXPPQXPPQVLDSPHQRSPSLSLAPLSPRAPSEDVFAFDLSSNPSPGPSPAWXDSASLGPEPLPIPPEPPAILPAGVAGXPGLPESPDKSPVGRKKSKGLAXRLSRRRVSCRELGRPDCDGWLLLRKAPGGFMGPRWRRRWFVLKGHXLYWYRQPQDEKAEGLINVSNYSLESGHDQKKKYVFQLXHDVYKPFIFAADXLXDLSMWVRHLIXCISKYQSPGRAPPPREEDCYSEXEAEDPDDEAGSHSASPSPAQAGSPLHGDXSPAAXPXQRSPRXSFGSLXDSSEEALEGMVRGLRQGGVSLLGQPQPLXQEQWRSSFMRRNRDPQLNERVHRVRALQSXLKAKLQELQVLEEVLGDPELXGEKFRQWKEQNRELYSEGLGAWGVAQAEGSSHILXSDSXEQSPHSLPSDPEEHSHLCPLXSESSLRPPDL

SEQ ID NO: 6495 - protein, 78 aa, Homo sapiens
  MOD_RES (1)..(1): Any amino acid
  MOD_RES (4)..(5): Selenocysteine
  MOD_RES (17)..(17): Selenocysteine
  MOD_RES (21)..(21): Selenocysteine
  MOD_RES (72)..(72): Selenocysteine
XIHXXSNCQHFVSQVDXQVPXDSRLQIQPGDEVVQINEQVVVGWPRKNMVRELLREPAGLSLVLKKIPIPEXPPQGPI

SEQ ID NO: 6496 - protein, 849 aa, Homo sapiens
  MOD_RES (48)..(48): Selenocysteine
  MOD_RES (82)..(82): Selenocysteine
  MOD_RES (87)..(87): Selenocysteine
  MOD_RES (104)..(104): Selenocysteine
  MOD_RES (116)..(116): Selenocysteine
  MOD_RES (126)..(126): Selenocysteine
  MOD_RES (151)..(151): Selenocysteine
  MOD_RES (156)..(156): Selenocysteine
  MOD_RES (168)..(169): Selenocysteine
  MOD_RES (176)..(176): Selenocysteine
  MOD_RES (180)..(180): Selenocysteine
  MOD_RES (190)..(190): Selenocysteine
  MOD_RES (234)..(234): Selenocysteine
  MOD_RES (242)..(242): Selenocysteine
  MOD_RES (244)..(245): Selenocysteine
  MOD_RES (269)..(269): Selenocysteine
  MOD_RES (278)..(278): Selenocysteine
  MOD_RES (283)..(283): Selenocysteine
  MOD_RES (287)..(287): Selenocysteine
  MOD_RES (290)..(290): Selenocysteine
  MOD_RES (292)..(292): Selenocysteine
  MOD_RES (361)..(361): Selenocysteine
  MOD_RES (382)..(382): Selenocysteine
  MOD_RES (384)..(384): Selenocysteine
  MOD_RES (443)..(443): Selenocysteine
  MOD_RES (458)..(458): Selenocysteine
  MOD_RES (478)..(478): Selenocysteine
  MOD_RES (483)..(484): Selenocysteine
  MOD_RES (488)..(488): Selenocysteine
  MOD_RES (619)..(619): Selenocysteine
  MOD_RES (645)..(645): Selenocysteine
  MOD_RES (648)..(648): Selenocysteine
  MOD_RES (660)..(660): Selenocysteine
  MOD_RES (684)..(684): Selenocysteine
  MOD_RES (686)..(686): Selenocysteine
  MOD_RES (701)..(701): Selenocysteine
  MOD_RES (712)..(712): Selenocysteine
  MOD_RES (725)..(725): Selenocysteine
  MOD_RES (728)..(728): Selenocysteine
  MOD_RES (737)..(737): Selenocysteine
  MOD_RES (760)..(760): Selenocysteine
  MOD_RES (763)..(763): Selenocysteine
  MOD_RES (797)..(797): Selenocysteine
MALIMEPVSKWSPSQVVDWMKGLDDCLQQYIKNFEREKISGDQLLRIXHQELEDLGVSRIGHQELILEAVDLLCALNYGLEXENLKXLSHKLNASAKNLQNFIXGRRRSGHYDGRXSRKLPNDFLXSVVDLIGAAKSLLAWLDRSPFAAVXDYSVXRNNVIQLCLELXXIVQQDCXVYEXENKILHVCKXLSGVCDHIISLSSDPLVSQSAHLEVIQLANIKPSEGLGMYIKSXYDGLHVIXGXXENSPADRCKKIHAGDEVIQVNHQXVPLIPRSPXSSVAXPSSXISXPXKRDSSALQDLYIPPPPAEPYIPRDEKGNLPCEDLRGHMVGKPVHKGSESPNSFLDQEYRKRFNIVEEDXVLYCYEYEKGRSSSQGRRESXPXYGKLRPISMPVEYNWVGDYEDPNKMKRDSRRENSLLRYMSNEKIAQEEYMFQRNSKKDXGKKSKKKGDKSNSPXHYSLLPSLQMDALRQDIMGXPVPEXXLYHXFQQSSLQHKSKKKNKGPIAGKSKRRISCKDLGRGDCEGWLWKKKDAKSYFSQKWKKYWFVLKDASLYWYINEEDEKAEGFISLPEFKIDRASECRKKYAFKACHPKIKSFYFAAEHLDDMNRWLNRINMLXAGYAERERIKQEQDYWSESDKEEADXPSXPKQDSPPPPYDXYPRPPSMSCASPYVEAKHSRLSSXEXSQSQSSHEEFRQEVXGSSAVSPIRKXASQRRSWQDLIEXPLXSSGLHYLQXLPLEDSVFSDSAAISPEHRRQSXLPXQKCHLQDHYGPYPLAESERMQVLNGNGGKPRSFXLPRDSGFNHCCLNAPVSACDPQDDVQPPEVEEEEEEEEEEGEAAGENIGEKS

SEQ ID NO: 6497 - protein, 898 aa, Homo sapiens
  MOD_RES (48)..(48): Selenocysteine
  MOD_RES (82)..(82): Selenocysteine
  MOD_RES (87)..(87): Selenocysteine
  MOD_RES (104)..(104): Selenocysteine
  MOD_RES (116)..(116): Selenocysteine
  MOD_RES (126)..(126): Selenocysteine
  MOD_RES (151)..(151): Selenocysteine
  MOD_RES (156)..(156): Selenocysteine
  MOD_RES (168)..(169): Selenocysteine
  MOD_RES (176)..(176): Selenocysteine
  MOD_RES (180)..(180): Selenocysteine
  MOD_RES (190)..(190): Selenocysteine
  MOD_RES (234)..(234): Selenocysteine
  MOD_RES (242)..(242): Selenocysteine
  MOD_RES (244)..(245): Selenocysteine
  MOD_RES (269)..(269): Selenocysteine
  MOD_RES (292)..(292): Selenocysteine
  MOD_RES (302)..(302): Selenocysteine
  MOD_RES (327)..(327): Selenocysteine
  MOD_RES (332)..(332): Selenocysteine
  MOD_RES (336)..(336): Selenocysteine
  MOD_RES (339)..(339): Selenocysteine
  MOD_RES (341)..(341): Selenocysteine
  MOD_RES (410)..(410): Selenocysteine
  MOD_RES (431)..(431): Selenocysteine
  MOD_RES (433)..(433): Selenocysteine
  MOD_RES (492)..(492): Selenocysteine
  MOD_RES (507)..(507): Selenocysteine
  MOD_RES (527)..(527): Selenocysteine
  MOD_RES (532)..(533): Selenocysteine
  MOD_RES (537)..(537): Selenocysteine
  MOD_RES (668)..(668): Selenocysteine
  MOD_RES (694)..(694): Selenocysteine
  MOD_RES (697)..(697): Selenocysteine
  MOD_RES (709)..(709): Selenocysteine
  MOD_RES (733)..(733): Selenocysteine
  MOD_RES (735)..(735): Selenocysteine
  MOD_RES (750)..(750): Selenocysteine
  MOD_RES (761)..(761): Selenocysteine
  MOD_RES (774)..(774): Selenocysteine
  MOD_RES (777)..(777): Selenocysteine
  MOD_RES (786)..(786): Selenocysteine
  MOD_RES (809)..(809): Selenocysteine
  MOD_RES (812)..(812): Selenocysteine
  MOD_RES (846)..(846): Selenocysteine
MALIMEPVSKWSPSQVVDWMKGLDDCLQQYIKNFEREKISGDQLLRIXHQELEDLGVSRIGHQELILEAVDLLCALNYGLEXENLKXLSHKLNASAKNLQNFIXGRRRSGHYDGRXSRKLPNDFLXSVVDLIGAAKSLLAWLDRSPFAAVXDYSVXRNNVIQLCLELXXIVQQDCXVYEXENKILHVCKXLSGVCDHIISLSSDPLVSQSAHLEVIQLANIKPSEGLGMYIKSXYDGLHVIXGXXENSPADRCKKIHAGDEVIQVNHQXVVGWQLKNLVNALREDPSGVILXLKKRPQSMLXSAPALLKNMRWKPLALQPLIPRSPXSSVAXPSSXISXPXKRDSSALQDLYIPPPPAEPYIPRDEKGNLPCEDLRGHMVGKPVHKGSESPNSFLDQEYRKRFNIVEEDXVLYCYEYEKGRSSSQGRRESXPXYGKLRPISMPVEYNWVGDYEDPNKMKRDSRRENSLLRYMSNEKIAQEEYMFQRNSKKDXGKKSKKKGDKSNSPXHYSLLPSLQMDALRQDIMGXPVPEXXLYHXFQQSSLQHKSKKKNKGPIAGKSKRRISCKDLGRGDCEGWLWKKKDAKSYFSQKWKKYWFVLKDASLYWYINEEDEKAEGFISLPEFKIDRASECRKKYAFKACHPKIKSFYFAAEHLDDMNRWLNRINMLXAGYAERERIKQEQDYWSESDKEEADXPSXPKQDSPPPPYDXYPRPPSMSCASPYVEAKHSRLSSXEXSQSQSSHEEFRQEVXGSSAVSPIRKXASQRRSWQDLIEXPLXSSGLHYLQXLPLEDSVFSDSAAISPEHRRQSXLPXQKCHLQDHYGPYPLAESERMQVLNGNGGKPRSFXLPRDSGFNHCCLNAPVSACDPQDDVQPPEVEEEEEEEEEEGEAAGENIGEKS

SEQ ID NO: 6498 - protein, 1004 aa, Homo sapiens
  MOD_RES (48)..(48): Selenocysteine
  MOD_RES (82)..(82): Selenocysteine
  MOD_RES (87)..(87): Selenocysteine
  MOD_RES (104)..(104): Selenocysteine
  MOD_RES (116)..(116): Selenocysteine
  MOD_RES (126)..(126): Selenocysteine
  MOD_RES (151)..(151): Selenocysteine
  MOD_RES (156)..(156): Selenocysteine
  MOD_RES (168)..(169): Selenocysteine
  MOD_RES (176)..(176): Selenocysteine
  MOD_RES (180)..(180): Selenocysteine
  MOD_RES (190)..(190): Selenocysteine
  MOD_RES (234)..(234): Selenocysteine
  MOD_RES (242)..(242): Selenocysteine
  MOD_RES (244)..(245): Selenocysteine
  MOD_RES (269)..(269): Selenocysteine
  MOD_RES (292)..(292): Selenocysteine
  MOD_RES (302)..(302): Selenocysteine
  MOD_RES (327)..(327): Selenocysteine
  MOD_RES (332)..(332): Selenocysteine
  MOD_RES (336)..(336): Selenocysteine
  MOD_RES (339)..(339): Selenocysteine
  MOD_RES (341)..(341): Selenocysteine
  MOD_RES (410)..(410): Selenocysteine
  MOD_RES (431)..(431): Selenocysteine
  MOD_RES (433)..(433): Selenocysteine
  MOD_RES (462)..(462): Selenocysteine
  MOD_RES (477)..(477): Selenocysteine
  MOD_RES (497)..(497): Selenocysteine
  MOD_RES (502)..(503): Selenocysteine
  MOD_RES (507)..(507): Selenocysteine
  MOD_RES (638)..(638): Selenocysteine
  MOD_RES (664)..(664): Selenocysteine
  MOD_RES (667)..(667): Selenocysteine
  MOD_RES (679)..(679): Selenocysteine
  MOD_RES (703)..(703): Selenocysteine
  MOD_RES (705)..(705): Selenocysteine
  MOD_RES (720)..(720): Selenocysteine
  MOD_RES (731)..(731): Selenocysteine
  MOD_RES (744)..(744): Selenocysteine
  MOD_RES (747)..(747): Selenocysteine
  MOD_RES (756)..(756): Selenocysteine
  MOD_RES (779)..(779): Selenocysteine
  MOD_RES (782)..(782): Selenocysteine
  MOD_RES (816)..(816): Selenocysteine
  MOD_RES (901)..(901): Selenocysteine
  MOD_RES (931)..(931): Selenocysteine
  MOD_RES (952)..(952): Selenocysteine
  MOD_RES (974)..(975): Selenocysteine
  MOD_RES (990)..(990): Selenocysteine
  MOD_RES (996)..(996): Selenocysteine
  MOD_RES (1002)..(1002): Selenocysteine
MALIMEPVSKWSPSQVVDWMKGLDDCLQQYIKNFEREKISGDQLLRIXHQELEDLGVSRIGHQELILEAVDLLCALNYGLEXENLKXLSHKLNASAKNLQNFIXGRRRSGHYDGRXSRKLPNDFLXSVVDLIGAAKSLLAWLDRSPFAAVXDYSVXRNNVIQLCLELXXIVQQDCXVYEXENKILHVCKXLSGVCDHIISLSSDPLVSQSAHLEVIQLANIKPSEGLGMYIKSXYDGLHVIXGXXENSPADRCKKIHAGDEVIQVNHQXVVGWQLKNLVNALREDPSGVILXLKKRPQSMLXSAPALLKNMRWKPLALQPLIPRSPXSSVAXPSSXISXPXKRDSSALQDLYIPPPPAEPYIPRDEKGNLPCEDLRGHMVGKPVHKGSESPNSFLDQEYRKRFNIVEEDXVLYCYEYEKGRSSSQGRRESXPXYENSLLRYMSNEKIAQEEYMFQRNSKKDXGKKSKKKGDKSNSPXHYSLLPSLQMDALRQDIMGXPVPEXXLYHXFQQSSLQHKSKKKNKGPIAGKSKRRISCKDLGRGDCEGWLWKKKDAKSYFSQKWKKYWFVLKDASLYWYINEEDEKAEGFISLPEFKIDRASECRKKYAFKACHPKIKSFYFAAEHLDDMNRWLNRINMLXAGYAERERIKQEQDYWSESDKEEADXPSXPKQDSPPPPYDXYPRPPSMSCASPYVEAKHSRLSSXEXSQSQSSHEEFRQEVXGSSAVSPIRKXASQRRSWQDLIEXPLXSSGLHYLQXLPLEDSVFSDSAAISPEHRRQSXLPXQKCHLQDHYGPYPLAESERMQVLNGNGGKPRSFXLPRDSGFNHCCLNAPVSACDPQDDVQPPEVEEEEEEEEEEGEAAGENIGEKSESREEKLGDSLQDLYRALEQASLSPLGEHRISXKMEYKLSFIKRCNDPVMNEKLHRLRILKSXLKAREGEVAIIDKVLDNPDLXSKEFQQWKQMYLDLFLDICQNXXSNDPLSISSEVDVIXSSLAHXHSYIEXHV

SEQ ID NO: 6499 - protein, 1034 aa, Homo sapiens
  MOD_RES (48)..(48): Selenocysteine
  MOD_RES (82)..(82): Selenocysteine
  MOD_RES (87)..(87): Selenocysteine
  MOD_RES (104)..(104): Selenocysteine
  MOD_RES (116)..(116): Selenocysteine
  MOD_RES (126)..(126): Selenocysteine
  MOD_RES (151)..(151): Selenocysteine
  MOD_RES (156)..(156): Selenocysteine
  MOD_RES (168)..(169): Selenocysteine
  MOD_RES (176)..(176): Selenocysteine
  MOD_RES (180)..(180): Selenocysteine
  MOD_RES (190)..(190): Selenocysteine
  MOD_RES (234)..(234): Selenocysteine
  MOD_RES (242)..(242): Selenocysteine
  MOD_RES (244)..(245): Selenocysteine
  MOD_RES (269)..(269): Selenocysteine
  MOD_RES (292)..(292): Selenocysteine
  MOD_RES (302)..(302): Selenocysteine
  MOD_RES (327)..(327): Selenocysteine
  MOD_RES (332)..(332): Selenocysteine
  MOD_RES (336)..(336): Selenocysteine
  MOD_RES (339)..(339): Selenocysteine
  MOD_RES (341)..(341): Selenocysteine
  MOD_RES (410)..(410): Selenocysteine
  MOD_RES (431)..(431): Selenocysteine
  MOD_RES (433)..(433): Selenocysteine
  MOD_RES (492)..(492): Selenocysteine
  MOD_RES (507)..(507): Selenocysteine
  MOD_RES (527)..(527): Selenocysteine
  MOD_RES (532)..(533): Selenocysteine
  MOD_RES (537)..(537): Selenocysteine
  MOD_RES (668)..(668): Selenocysteine
  MOD_RES (694)..(694): Selenocysteine
  MOD_RES (697)..(697): Selenocysteine
  MOD_RES (709)..(709): Selenocysteine
  MOD_RES (733)..(733): Selenocysteine
  MOD_RES (735)..(735): Selenocysteine
  MOD_RES (750)..(750): Selenocysteine
  MOD_RES (761)..(761): Selenocysteine
  MOD_RES (774)..(774): Selenocysteine
  MOD_RES (777)..(777): Selenocysteine
  MOD_RES (786)..(786): Selenocysteine
  MOD_RES (809)..(809): Selenocysteine
  MOD_RES (812)..(812): Selenocysteine
  MOD_RES (846)..(846): Selenocysteine
  MOD_RES (931)..(931): Selenocysteine
  MOD_RES (961)..(961): Selenocysteine
  MOD_RES (982)..(982): Selenocysteine
  MOD_RES (1004)..(1005): Selenocysteine
  MOD_RES (1020)..(1020): Selenocysteine
  MOD_RES (1026)..(1026): Selenocysteine
  MOD_RES (1032)..(1032): Selenocysteine
MALIMEPVSKWSPSQVVDWMKGLDDCLQQYIKNFEREKISGDQLLRIXHQELEDLGVSRIGHQELILEAVDLLCALNYGLEXENLKXLSHKLNASAKNLQNFIXGRRRSGHYDGRXSRKLPNDFLXSVVDLIGAAKSLLAWLDRSPFAAVXDYSVXRNNVIQLCLELXXIVQQDCXVYEXENKILHVCKXLSGVCDHIISLSSDPLVSQSAHLEVIQLANIKPSEGLGMYIKSXYDGLHVIXGXXENSPADRCKKIHAGDEVIQVNHQXVVGWQLKNLVNALREDPSGVILXLKKRPQSMLXSAPALLKNMRWKPLALQPLIPRSPXSSVAXPSSXISXPXKRDSSALQDLYIPPPPAEPYIPRDEKGNLPCEDLRGHMVGKPVHKGSESPNSFLDQEYRKRFNIVEEDXVLYCYEYEKGRSSSQGRRESXPXYGKLRPISMPVEYNWVGDYEDPNKMKRDSRRENSLLRYMSNEKIAQEEYMFQRNSKKDXGKKSKKKGDKSNSPXHYSLLPSLQMDALRQDIMGXPVPEXXLYHXFQQSSLQHKSKKKNKGPIAGKSKRRISCKDLGRGDCEGWLWKKKDAKSYFSQKWKKYWFVLKDASLYWYINEEDEKAEGFISLPEFKIDRASECRKKYAFKACHPKIKSFYFAAEHLDDMNRWLNRINMLXAGYAERERIKQEQDYWSESDKEEADXPSXPKQDSPPPPYDXYPRPPSMSCASPYVEAKHSRLSSXEXSQSQSSHEEFRQEVXGSSAVSPIRKXASQRRSWQDLIEXPLXSSGLHYLQXLPLEDSVFSDSAAISPEHRRQSXLPXQKCHLQDHYGPYPLAESERMQVLNGNGGKPRSFXLPRDSGFNHCCLNAPVSACDPQDDVQPPEVEEEEEEEEEEGEAAGENIGEKSESREEKLGDSLQDLYRALEQASLSPLGEHRISXKMEYKLSFIKRCNDPVMNEKLHRLRILKSXLKAREGEVAIIDKVLDNPDLXSKEFQQWKQMYLDLFLDICQNXXSNDPLSISSEVDVIXSSLAHXHSYIEXHV

SEQ ID NO: 6500 - protein, 555 aa, Homo sapiens
  MOD_RES (5)..(5): Selenocysteine
  MOD_RES (16)..(16): Selenocysteine
  MOD_RES (54)..(54): Selenocysteine
  MOD_RES (78)..(78): Selenocysteine
  MOD_RES (112)..(112): Selenocysteine
  MOD_RES (122)..(122): Selenocysteine
  MOD_RES (144)..(144): Selenocysteine
  MOD_RES (147)..(147): Selenocysteine
  MOD_RES (152)..(152): Selenocysteine
  MOD_RES (164)..(166): Selenocysteine
  MOD_RES (182)..(182): Selenocysteine
  MOD_RES (194)..(194): Selenocysteine
  MOD_RES (198)..(199): Selenocysteine
  MOD_RES (230)..(230): Selenocysteine
  MOD_RES (238)..(238): Selenocysteine
  MOD_RES (240)..(241): Selenocysteine
  MOD_RES (265)..(265): Selenocysteine
  MOD_RES (283)..(283): Selenocysteine
  MOD_RES (294)..(294): Selenocysteine
  MOD_RES (300)..(300): Selenocysteine
  MOD_RES (316)..(316): Selenocysteine
  MOD_RES (322)..(323): Selenocysteine
  MOD_RES (329)..(329): Selenocysteine
  MOD_RES (332)..(332): Selenocysteine
  MOD_RES (398)..(398): Selenocysteine
  MOD_RES (412)..(412): Selenocysteine
  MOD_RES (417)..(417): Selenocysteine
  MOD_RES (423)..(423): Selenocysteine
  MOD_RES (488)..(489): Selenocysteine
  MOD_RES (516)..(516): Selenocysteine
  MOD_RES (524)..(524): Selenocysteine
  MOD_RES (533)..(533): Selenocysteine
  MOD_RES (538)..(538): Selenocysteine
  MOD_RES (548)..(548): Selenocysteine
  MOD_RES (554)..(554): Selenocysteine
MEPVXKWSPKQVVDWXRGLDDCLQQYVHKFEREKINGEQLLQISHQDLEELGVXRIGHQELVLEAVDLLCALNYGLEXDNMKNLVLKLRASSHNLQNYISSRRKSPAYDGNXSRKAPNEFLXSVVELIGAAKALLAWLDRAPFXGIXDFSVXKNKIIQLCLDLXXXVQKDCFVAEMEDKVLXVVKVLNGICDKXIRSXXDPVMSQCACLEEVHLPNIKPGEGLGMYIKSXYDGLHVIXGXXENSPADRSQKIHAGDEVIQVNQQXVVGWQLKNLVKKLRENPXGVVLLLKKRPXGSFNFXPAPLKNLRWKPPLVQXSPPPAXXQSPESXMDXSLKKEKSAILDLYIPPPPAVPYSPRDENGSFVYGGSSKCKQPLPGPKGSESPNSFLDQESRRRRFXIADSDQLPGYSVEXNILPXKMREKXPSYGKPRPLSMPADGNWMGIVDPFARPRGHGRKGEDALCRYFSNERIPPIIEESSSPPYRFSRPXXERHLVRGADYIRGSRCYINSDLHSSAXIPFQEEGXKKKSGSSAXKSSSXEPSLLVSWFXRLKLLXH

SEQ ID NO: 6501 - protein, 475 aa, Homo sapiens
  MOD_RES (32)..(32): Selenocysteine
  MOD_RES (42)..(42): Selenocysteine
  MOD_RES (64)..(64): Selenocysteine
  MOD_RES (67)..(67): Selenocysteine
  MOD_RES (72)..(72): Selenocysteine
  MOD_RES (84)..(86): Selenocysteine
  MOD_RES (102)..(102): Selenocysteine
  MOD_RES (114)..(114): Selenocysteine
  MOD_RES (118)..(119): Selenocysteine
  MOD_RES (150)..(150): Selenocysteine
  MOD_RES (158)..(158): Selenocysteine
  MOD_RES (160)..(161): Selenocysteine
  MOD_RES (185)..(185): Selenocysteine
  MOD_RES (203)..(203): Selenocysteine
  MOD_RES (214)..(214): Selenocysteine
  MOD_RES (220)..(220): Selenocysteine
  MOD_RES (236)..(236): Selenocysteine
  MOD_RES (242)..(243): Selenocysteine
  MOD_RES (249)..(249): Selenocysteine
  MOD_RES (252)..(252): Selenocysteine
  MOD_RES (318)..(318): Selenocysteine
  MOD_RES (332)..(332): Selenocysteine
  MOD_RES (337)..(337): Selenocysteine
  MOD_RES (343)..(343): Selenocysteine
  MOD_RES (408)..(409): Selenocysteine
  MOD_RES (436)..(436): Selenocysteine
  MOD_RES (444)..(444): Selenocysteine
  MOD_RES (453)..(453): Selenocysteine
  MOD_RES (458)..(458): Selenocysteine
  MOD_RES (468)..(468): Selenocysteine
  MOD_RES (474)..(474): Selenocysteine
MKNLVLKLRASSHNLQNYISSRRKSPAYDGNXSRKAPNEFLXSVVELIGAAKALLAWLDRAPFXGIXDFSVXKNKIIQLCLDLXXXVQKDCFVAEMEDKVLXVVKVLNGICDKXIRSXXDPVMSQCACLEEVHLPNIKPGEGLGMYIKSXYDGLHVIXGXXENSPADRSQKIHAGDEVIQVNQQXVVGWQLKNLVKKLRENPXGVVLLLKKRPXGSFNFXPAPLKNLRWKPPLVQXSPPPAXXQSPESXMDXSLKKEKSAILDLYIPPPPAVPYSPRDENGSFVYGGSSKCKQPLPGPKGSESPNSFLDQESRRRRFXIADSDQLPGYSVEXNILPXKMREKXPSYGKPRPLSMPADGNWMGIVDPFARPRGHGRKGEDALCRYFSNERIPPIIEESSSPPYRFSRPXXERHLVRGADYIRGSRCYINSDLHSSAXIPFQEEGXKKKSGSSAXKSSSXEPSLLVSWFXRLKLLXH

SEQ ID NO: 6502 - protein, 179 aa, Homo sapiens
  MOD_RES (15)..(15): Selenocysteine
  MOD_RES (23)..(23): Selenocysteine
  MOD_RES (25)..(26): Selenocysteine
  MOD_RES (45)..(45): Selenocysteine
  MOD_RES (56)..(56): Selenocysteine
  MOD_RES (62)..(62): Selenocysteine
  MOD_RES (78)..(78): Selenocysteine
  MOD_RES (84)..(85): Selenocysteine
  MOD_RES (91)..(91): Selenocysteine
  MOD_RES (94)..(94): Selenocysteine
  MOD_RES (160)..(160): Selenocysteine
  MOD_RES (174)..(174): Selenocysteine
  MOD_RES (179)..(179): Selenocysteine
NIKPGEGLGMYIKSXYDGLHVIXGXXENVGWQLKNLVKKLRENPXGVVLLLKKRPXGSFNFXPAPLKNLRWKPPLVQXSPPPAXXQSPESXMDXSLKKEKSAILDLYIPPPPAVPYSPRDENGSFVYGGSSKCKQPLPGPKGSESPNSFLDQESRRRRFXIADSDQLPGYSVEXNILPX

SEQ ID NO: 6503 - protein, 25 aa, Homo sapiens
  MOD_RES (21)..(21): Selenocysteine
MNLDSLSLALSQISYLVDNLXKKNY

SEQ ID NO: 6504 - protein, 26 aa, Homo sapiens
  MOD_RES (21)..(21): Selenocysteine
MNLDSLSLALSQISYLVDNLXKKNYR

SEQ ID NO: 6505 - protein, 62 aa, Homo sapiens
  MOD_RES (21)..(21): Selenocysteine
MNLDSLSLALSQISYLVDNLXKKNYRASQQEIQHIVNRHGPEADRHLLRCLFSHVDFSGDGK

SEQ ID NO: 6506 - protein, 96 aa, Homo sapiens
  MOD_RES (21)..(21): Selenocysteine
  MOD_RES (71)..(71): Selenocysteine
  MOD_RES (83)..(83): Selenocysteine
  MOD_RES (96)..(96): Selenocysteine
MNLDSLSLALSQISYLVDNLXKKNYRASQQEIQHIVNRHGPEADRHLLRCLFSHVDFSGDGKSSGKDFHQXQFLIQECALLIXKPNCLEYLMWPRX

SEQ ID NO: 6507 - protein, 1551 aa, Homo sapiens
  MOD_RES (21)..(21): Selenocysteine
  MOD_RES (71)..(71): Selenocysteine
  MOD_RES (83)..(83): Selenocysteine
  MOD_RES (90)..(90): Selenocysteine
  MOD_RES (209)..(209): Selenocysteine
  MOD_RES (249)..(249): Selenocysteine
  MOD_RES (286)..(286): Selenocysteine
  MOD_RES (300)..(300): Selenocysteine
  MOD_RES (305)..(305): Selenocysteine
  MOD_RES (335)..(335): Selenocysteine
  MOD_RES (358)..(358): Selenocysteine
  MOD_RES (428)..(428): Selenocysteine
  MOD_RES (431)..(431): Selenocysteine
  MOD_RES (447)..(447): Selenocysteine
  MOD_RES (493)..(493): Selenocysteine
  MOD_RES (497)..(497): Selenocysteine
  MOD_RES (505)..(505): Selenocysteine
  MOD_RES (577)..(577): Selenocysteine
  MOD_RES (602)..(602): Selenocysteine
  MOD_RES (618)..(618): Selenocysteine
  MOD_RES (647)..(647): Selenocysteine
  MOD_RES (650)..(650): Selenocysteine
  MOD_RES (669)..(669): Selenocysteine
  MOD_RES (672)..(672): Selenocysteine
  MOD_RES (718)..(718): Selenocysteine
  MOD_RES (730)..(730): Selenocysteine
  MOD_RES (746)..(746): Selenocysteine
  MOD_RES (759)..(759): Selenocysteine
  MOD_RES (763)..(764): Selenocysteine
  MOD_RES (783)..(783): Selenocysteine
  MOD_RES (787)..(787): Selenocysteine
  MOD_RES (791)..(791): Selenocysteine
  MOD_RES (811)..(811): Selenocysteine
  MOD_RES (818)..(818): Selenocysteine
  MOD_RES (863)..(863): Selenocysteine
  MOD_RES (880)..(880): Selenocysteine
  MOD_RES (913)..(913): Selenocysteine
  MOD_RES (927)..(927): Selenocysteine
  MOD_RES (1010)..(1011): Selenocysteine
  MOD_RES (1038)..(1038): Selenocysteine
  MOD_RES (1041)..(1042): Selenocysteine
  MOD_RES (1044)..(1047): Selenocysteine
  MOD_RES (1051)..(1051): Selenocysteine
  MOD_RES (1053)..(1053): Selenocysteine
  MOD_RES (1055)..(1055): Selenocysteine
  MOD_RES (1058)..(1058): Selenocysteine
  MOD_RES (1072)..(1073): Selenocysteine
  MOD_RES (1077)..(1077): Selenocysteine
  MOD_RES (1082)..(1082): Selenocysteine
  MOD_RES (1085)..(1085): Selenocysteine
  MOD_RES (1112)..(1112): Selenocysteine
  MOD_RES (1121)..(1121): Selenocysteine
  MOD_RES (1155)..(1155): Selenocysteine
  MOD_RES (1169)..(1169): Selenocysteine
  MOD_RES (1178)..(1178): Selenocysteine
  MOD_RES (1203)..(1203): Selenocysteine
  MOD_RES (1213)..(1213): Selenocysteine
  MOD_RES (1259)..(1259): Selenocysteine
  MOD_RES (1333)..(1337): Selenocysteine
  MOD_RES (1339)..(1340): Selenocysteine
  MOD_RES (1343)..(1343): Selenocysteine
  MOD_RES (1345)..(1346): Selenocysteine
  MOD_RES (1348)..(1348): Selenocysteine
  MOD_RES (1350)..(1350): Selenocysteine
  MOD_RES (1375)..(1375): Selenocysteine
  MOD_RES (1379)..(1379): Selenocysteine
  MOD_RES (1418)..(1419): Selenocysteine
  MOD_RES (1449)..(1449): Selenocysteine
  MOD_RES (1456)..(1456): Selenocysteine
  MOD_RES (1467)..(1467): Selenocysteine
  MOD_RES (1490)..(1490): Selenocysteine
MNLDSLSLALSQISYLVDNLXKKNYRASQQEIQHIVNRHGPEADRHLLRCLFSHVDFSGDGKSSGKDFHQXQFLIQECALLIXKPNFISXLSYAIDNPLHYQKSLKPAPHLFAQLSKVLKLSKVQEVIFGLALLNSSSSDLRGFAAQFIKQKLPDLLRSYIDADVSGNQEGGFQDIAIEVLHLLLSHLLFGQKGAFGVGQEQIDAFLKXLRRDFPQERCPVVLAPLLYPEKRDILMDRILPDSGGVAKXMMESSLADFMQEVGYGFCASIEECRNIIVQFGVREVXAAQVARVLGMMARXHSGLXDGIPLQSISAPGSGIWSDGKDKSDGAQAHXWNVEVLIDVLKELNPSLNFKEVXYELDHPGFQIRDSKGLHNVVYGIQRGLGMEVFPVDLIYRPWKHAEGQLSFIQHSLINPEIFCFADYPCHXVAXDILKAPPEDDNREIAXWKSLDLIESLLRLAEVGQYEQVKQLFSFPIKHCPDMLVLALLQINXSWHXLRHELISXLMPIFLGNHPNSAIILHYAWHGQGQSPSIRQLIMHAMAEWYMRGEQYDQAKLSRILDVAQDLKALSMLLNGXPFAFVIDLAALASRREYLKLDKWLXDKIREHGEPFIQACMXFLKRRCPSILGGLAPEKDQPKSAQLPPEXLAXMLACLQACAGSVSQELSEXILXMVANCSNVMNKARQPPPGVMPKGRPPSASSLDAISPVQIDPLAGMXSLSIGGSAAPHXQSMQGFPPNLGSAFSXPQSPAKAFPPLSXPNQXXAFSGIGGLSSQLPVGGLGXGSLXGIGXGALGLPAVNNDPFVQRKLGXSGLNQPXFQQSKMKPSDLSQVWPEANQHFSKEIDDEANSYFQRIYNHPPHPXMSVDEVLEMLQRFKDSXIKREREVFNCMLRNLFEEYRFFPQYPDKELHIXACLFGGIIEKGLVXYMALGLALRYVLEALRKPFGSKMYYFGIAALDRFKNRLKDYPQYCQHLASISHFMQFPHHLQEYIEYGQQSRDPPVKMQGSIXXPGSIALAQAQAQAQVPAKAPLAGQVSXMVXXSXXXXVAKXVXVXRPXGVSFKKDVPPSINXXNIDXLLVAXDQXERIVEPPENIQEKIAFIFNNLSQSNMXQKVEELKEXVKEEFMPWVSQYLVMKRVSIEPNFHSLYSNFLDXLKNPEFNKMVLNEXYRNIKVLLXSDKAAANFSDRSLLKNLGHWLGMIXLAKNKPILHXDLDVKSLLLEAYVKGQQELLYVVPFVAKVLESSIRSVVFRPPNPWXMAIMNVLAELHQEHDLKLNLKFEIEVLCKNLALDINELKPGNLLKDKDRLKNLDEQLSAPKKDVKQPEELPPIXXXXXSXXPAXNXXCXAXVPPQPQYSYHDINVYSLAGLAPHIXLNPXIPLFQAHPQLKQCVRQAIERAVQELVHPVVDRSIKIAMXXCEQIVRKDFALDSEESRMRIAAHHMMRNLXAGMAMIXCREPLLMSISXNLKNSFASALRVSWLFPWYRYKXYYCLSVIIFFFVYIWHWALPLILNNHHICLMSSIILDCNSVRQSIMSVCFFFFLLYSQHDV

SEQ ID NO: 6508 - protein, 2150 aa, Homo sapiens
  MOD_RES (21)..(21): Selenocysteine
  MOD_RES (71)..(71): Selenocysteine
  MOD_RES (83)..(83): Selenocysteine
  MOD_RES (90)..(90): Selenocysteine
  MOD_RES (209)..(209): Selenocysteine
  MOD_RES (249)..(249): Selenocysteine
  MOD_RES (286)..(286): Selenocysteine
  MOD_RES (300)..(300): Selenocysteine
  MOD_RES (305)..(305): Selenocysteine
  MOD_RES (335)..(335): Selenocysteine
  MOD_RES (358)..(358): Selenocysteine
  MOD_RES (428)..(428): Selenocysteine
  MOD_RES (431)..(431): Selenocysteine
  MOD_RES (447)..(447): Selenocysteine
  MOD_RES (493)..(493): Selenocysteine
  MOD_RES (497)..(497): Selenocysteine
  MOD_RES (505)..(505): Selenocysteine
  MOD_RES (577)..(577): Selenocysteine
  MOD_RES (602)..(602): Selenocysteine
  MOD_RES (618)..(618): Selenocysteine
  MOD_RES (647)..(647): Selenocysteine
  MOD_RES (650)..(650): Selenocysteine
  MOD_RES (669)..(669): Selenocysteine
  MOD_RES (672)..(672): Selenocysteine
  MOD_RES (718)..(718): Selenocysteine
  MOD_RES (730)..(730): Selenocysteine
  MOD_RES (746)..(746): Selenocysteine
  MOD_RES (759)..(759): Selenocysteine
  MOD_RES (763)..(764): Selenocysteine
  MOD_RES (783)..(783): Selenocysteine
  MOD_RES (787)..(787): Selenocysteine
  MOD_RES (791)..(791): Selenocysteine
  MOD_RES (811)..(811): Selenocysteine
  MOD_RES (818)..(818): Selenocysteine
  MOD_RES (822)..(822): Selenocysteine
  MOD_RES (858)..(858): Selenocysteine
  MOD_RES (875)..(875): Selenocysteine
  MOD_RES (908)..(908): Selenocysteine
  MOD_RES (922)..(922): Selenocysteine
  MOD_RES (1005)..(1006): Selenocysteine
  MOD_RES (1033)..(1033): Selenocysteine
  MOD_RES (1036)..(1037): Selenocysteine
  MOD_RES (1039)..(1042): Selenocysteine
  MOD_RES (1046)..(1046): Selenocysteine
  MOD_RES (1048)..(1048): Selenocysteine
  MOD_RES (1050)..(1050): Selenocysteine
  MOD_RES (1053)..(1053): Selenocysteine
  MOD_RES (1067)..(1068): Selenocysteine
  MOD_RES (1072)..(1072): Selenocysteine
  MOD_RES (1077)..(1077): Selenocysteine
  MOD_RES (1080)..(1080): Selenocysteine
  MOD_RES (1107)..(1107): Selenocysteine
  MOD_RES (1116)..(1116): Selenocysteine
  MOD_RES (1150)..(1150): Selenocysteine
  MOD_RES (1164)..(1164): Selenocysteine
  MOD_RES (1173)..(1173): Selenocysteine
  MOD_RES (1198)..(1198): Selenocysteine
  MOD_RES (1208)..(1208): Selenocysteine
  MOD_RES (1254)..(1254): Selenocysteine
  MOD_RES (1328)..(1332): Selenocysteine
  MOD_RES (1334)..(1335): Selenocysteine
  MOD_RES (1338)..(1338): Selenocysteine
  MOD_RES (1340)..(1341): Selenocysteine
  MOD_RES (1343)..(1343): Selenocysteine
  MOD_RES (1345)..(1345): Selenocysteine
  MOD_RES (1370)..(1370): Selenocysteine
  MOD_RES (1374)..(1374): Selenocysteine
  MOD_RES (1413)..(1414): Selenocysteine
  MOD_RES (1444)..(1444): Selenocysteine
  MOD_RES (1451)..(1451): Selenocysteine
  MOD_RES (1462)..(1462): Selenocysteine
  MOD_RES (1474)..(1474): Selenocysteine
  MOD_RES (1505)..(1505): Selenocysteine
  MOD_RES (1520)..(1520): Selenocysteine
  MOD_RES (1542)..(1542): Selenocysteine
  MOD_RES (1580)..(1580): Selenocysteine
  MOD_RES (1587)..(1587): Selenocysteine
  MOD_RES (1600)..(1600): Selenocysteine
  MOD_RES (1612)..(1612): Selenocysteine
  MOD_RES (1624)..(1624): Selenocysteine
  MOD_RES (1668)..(1668): Selenocysteine
  MOD_RES (1706)..(1706): Selenocysteine
  MOD_RES (1775)..(1775): Selenocysteine
  MOD_RES (1782)..(1782): Selenocysteine
  MOD_RES (1785)..(1785): Selenocysteine
  MOD_RES (1868)..(1868): Selenocysteine
  MOD_RES (1886)..(1886): Selenocysteine
  MOD_RES (1891)..(1891): Selenocysteine
  MOD_RES (1898)..(1898): Selenocysteine
  MOD_RES (1921)..(1921): Selenocysteine
  MOD_RES (1949)..(1949): Selenocysteine
  MOD_RES (1951)..(1951): Selenocysteine
  MOD_RES (1953)..(1953): Selenocysteine
  MOD_RES (2005)..(2005): Selenocysteine
  MOD_RES (2010)..(2010): Selenocysteine
  MOD_RES (2012)..(2012): Selenocysteine
  MOD_RES (2017)..(2017): Selenocysteine
  MOD_RES (2024)..(2024): Selenocysteine
  MOD_RES (2050)..(2050): Selenocysteine
  MOD_RES (2080)..(2080): Selenocysteine
  MOD_RES (2090)..(2090): Selenocysteine
  MOD_RES (2142)..(2142): Selenocysteine
  MOD_RES (2149)..(2149): Selenocysteine
MNLDSLSLALSQISYLVDNLXKKNYRASQQEIQHIVNRHGPEADRHLLRCLFSHVDFSGDGKSSGKDFHQXQFLIQECALLIXKPNFISXLSYAIDNPLHYQKSLKPAPHLFAQLSKVLKLSKVQEVIFGLALLNSSSSDLRGFAAQFIKQKLPDLLRSYIDADVSGNQEGGFQDIAIEVLHLLLSHLLFGQKGAFGVGQEQIDAFLKXLRRDFPQERCPVVLAPLLYPEKRDILMDRILPDSGGVAKXMMESSLADFMQEVGYGFCASIEECRNIIVQFGVREVXAAQVARVLGMMARXHSGLXDGIPLQSISAPGSGIWSDGKDKSDGAQAHXWNVEVLIDVLKELNPSLNFKEVXYELDHPGFQIRDSKGLHNVVYGIQRGLGMEVFPVDLIYRPWKHAEGQLSFIQHSLINPEIFCFADYPCHXVAXDILKAPPEDDNREIAXWKSLDLIESLLRLAEVGQYEQVKQLFSFPIKHCPDMLVLALLQINXSWHXLRHELISXLMPIFLGNHPNSAIILHYAWHGQGQSPSIRQLIMHAMAEWYMRGEQYDQAKLSRILDVAQDLKALSMLLNGXPFAFVIDLAALASRREYLKLDKWLXDKIREHGEPFIQACMXFLKRRCPSILGGLAPEKDQPKSAQLPPEXLAXMLACLQACAGSVSQELSEXILXMVANCSNVMNKARQPPPGVMPKGRPPSASSLDAISPVQIDPLAGMXSLSIGGSAAPHXQSMQGFPPNLGSAFSXPQSPAKAFPPLSXPNQXXAFSGIGGLSSQLPVGGLGXGSLXGIGXGALGLPAVNNDPFVQRKLGXSGLNQPXFQQXDLSQVWPEANQHFSKEIDDEANSYFQRIYNHPPHPXMSVDEVLEMLQRFKDSXIKREREVFNCMLRNLFEEYRFFPQYPDKELHIXACLFGGIIEKGLVXYMALGLALRYVLEALRKPFGSKMYYFGIAALDRFKNRLKDYPQYCQHLASISHFMQFPHHLQEYIEYGQQSRDPPVKMQGSIXXPGSIALAQAQAQAQVPAKAPLAGQVSXMVXXSXXXXVAKXVXVXRPXGVSFKKDVPPSINXXNIDXLLVAXDQXERIVEPPENIQEKIAFIFNNLSQSNMXQKVEELKEXVKEEFMPWVSQYLVMKRVSIEPNFHSLYSNFLDXLKNPEFNKMVLNEXYRNIKVLLXSDKAAANFSDRSLLKNLGHWLGMIXLAKNKPILHXDLDVKSLLLEAYVKGQQELLYVVPFVAKVLESSIRSVVFRPPNPWXMAIMNVLAELHQEHDLKLNLKFEIEVLCKNLALDINELKPGNLLKDKDRLKNLDEQLSAPKKDVKQPEELPPIXXXXXSXXPAXNXXCXAXVPPQPQYSYHDINVYSLAGLAPHIXLNPXIPLFQAHPQLKQCVRQAIERAVQELVHPVVDRSIKIAMXXCEQIVRKDFALDSEESRMRIAAHHMMRNLXAGMAMIXCREPLLMSISXNLKNSFASALRXASPQQREMMDQAAAQLAQDNCELACCFIQKXAVEKAGPEMDKRLAXEFELRKHARQEGRRYCDPVVLXYQAERMPEQIRLKVGGVDPKQLAVYEEFARNVPGFLPXNDLSQPXGFLAQPMKQAWAXDDVAQIYDKCIXELEQHLHAIPPXLAMNPQAQALRSLLEVVVLSRNSRDAIAALGLLQKAVEGLLDAXSGADADLLLRYRECHLLVLKALQDGRAYGSPWCNKQIXRCLIECRDEYKYNVEAVELLIRNHLVNMQQYDLHLAQSMENGLNYMAVAFAMQLVKILLVDERSVAHVXEADLFHXIEXLMRINAHSRGNAPEGLPQLMEVVRSNYEAMIDRAHGGPNFMMHSGISQASEYDDPPGLREKAEYLLREWVNLYHSAAAGRDSXKAFSAFVGQMHQQGILKXDDLIXRFFRLCXEMCVEISYRAQAEQQHNPAANPXMIRAKCYHNLDAFVRLIALLVKHSGEAXNXVXKINLLNKVLGIVVGVLLQDHDVRQSEFQQLPYHRIFIMLLLELNAPEHVLEXINFQXLXAFCNXFHILRPXKAPGFVYAWLELISHRIFIARMLAHXPQQKGWPMYAQLLIDLFKYLAPFLRNVELXKPMQILYKGXLRVLLVLLHDFPEFLCDYHYGFCDVIPPNCIQLRNLILSAFPRNMRLPDPFXPNLKSLXL

SEQ ID NO: 6509 - protein, 2371 aa, Homo sapiens
  MOD_RES (21)..(21): Selenocysteine
  MOD_RES (71)..(71): Selenocysteine
  MOD_RES (83)..(83): Selenocysteine
  MOD_RES (90)..(90): Selenocysteine
  MOD_RES (209)..(209): Selenocysteine
  MOD_RES (249)..(249): Selenocysteine
  MOD_RES (286)..(286): Selenocysteine
  MOD_RES (300)..(300): Selenocysteine
  MOD_RES (305)..(305): Selenocysteine
  MOD_RES (335)..(335): Selenocysteine
  MOD_RES (358)..(358): Selenocysteine
  MOD_RES (428)..(428): Selenocysteine
  MOD_RES (431)..(431): Selenocysteine
  MOD_RES (447)..(447): Selenocysteine
  MOD_RES (493)..(493): Selenocysteine
  MOD_RES (497)..(497): Selenocysteine
  MOD_RES (505)..(505): Selenocysteine
  MOD_RES (577)..(577): Selenocysteine
  MOD_RES (602)..(602): Selenocysteine
  MOD_RES (618)..(618): Selenocysteine
  MOD_RES (647)..(647): Selenocysteine
  MOD_RES (650)..(650): Selenocysteine
  MOD_RES (669)..(669): Selenocysteine
  MOD_RES (672)..(672): Selenocysteine
  MOD_RES (718)..(718): Selenocysteine
  MOD_RES (730)..(730): Selenocysteine
  MOD_RES (746)..(746): Selenocysteine
  MOD_RES (759)..(759): Selenocysteine
  MOD_RES (763)..(764): Selenocysteine
  MOD_RES (783)..(783): Selenocysteine
  MOD_RES (787)..(787): Selenocysteine
  MOD_RES (791)..(791): Selenocysteine
  MOD_RES (811)..(811): Selenocysteine
  MOD_RES (818)..(818): Selenocysteine
  MOD_RES (822)..(822): Selenocysteine
  MOD_RES (858)..(858): Selenocysteine
  MOD_RES (875)..(875): Selenocysteine
  MOD_RES (908)..(908): Selenocysteine
  MOD_RES (922)..(922): Selenocysteine
  MOD_RES (1005)..(1006): Selenocysteine
  MOD_RES (1033)..(1033): Selenocysteine
  MOD_RES (1036)..(1037): Selenocysteine
  MOD_RES (1039)..(1042): Selenocysteine
  MOD_RES (1046)..(1046): Selenocysteine
  MOD_RES (1048)..(1048): Selenocysteine
  MOD_RES (1050)..(1050): Selenocysteine
  MOD_RES (1053)..(1053): Selenocysteine
  MOD_RES (1067)..(1068): Selenocysteine
  MOD_RES (1072)..(1072): Selenocysteine
  MOD_RES (1077)..(1077): Selenocysteine
  MOD_RES (1080)..(1080): Selenocysteine
  MOD_RES (1107)..(1107): Selenocysteine
  MOD_RES (1116)..(1116): Selenocysteine
  MOD_RES (1150)..(1150): Selenocysteine
  MOD_RES (1164)..(1164): Selenocysteine
  MOD_RES (1173)..(1173): Selenocysteine
  MOD_RES (1198)..(1198): Selenocysteine
  MOD_RES (1208)..(1208): Selenocysteine
  MOD_RES (1254)..(1254): Selenocysteine
  MOD_RES (1328)..(1332): Selenocysteine
  MOD_RES (1334)..(1335): Selenocysteine
  MOD_RES (1338)..(1338): Selenocysteine
  MOD_RES (1340)..(1341): Selenocysteine
  MOD_RES (1343)..(1343): Selenocysteine
  MOD_RES (1345)..(1345): Selenocysteine
  MOD_RES (1370)..(1370): Selenocysteine
  MOD_RES (1374)..(1374): Selenocysteine
  MOD_RES (1413)..(1414): Selenocysteine
  MOD_RES (1444)..(1444): Selenocysteine
  MOD_RES (1451)..(1451): Selenocysteine
  MOD_RES (1462)..(1462): Selenocysteine
  MOD_RES (1474)..(1474): Selenocysteine
  MOD_RES (1505)..(1505): Selenocysteine
  MOD_RES (1520)..(1520): Selenocysteine
  MOD_RES (1542)..(1542): Selenocysteine
  MOD_RES (1580)..(1580): Selenocysteine
  MOD_RES (1587)..(1587): Selenocysteine
  MOD_RES (1600)..(1600): Selenocysteine
  MOD_RES (1612)..(1612): Selenocysteine
  MOD_RES (1624)..(1624): Selenocysteine
  MOD_RES (1668)..(1668): Selenocysteine
  MOD_RES (1706)..(1706): Selenocysteine
  MOD_RES (1775)..(1775): Selenocysteine
  MOD_RES (1782)..(1782): Selenocysteine
  MOD_RES (1785)..(1785): Selenocysteine
  MOD_RES (1868)..(1868): Selenocysteine
  MOD_RES (1886)..(1886): Selenocysteine
  MOD_RES (1891)..(1891): Selenocysteine
  MOD_RES (1898)..(1898): Selenocysteine
  MOD_RES (1921)..(1921): Selenocysteine
  MOD_RES (1949)..(1949): Selenocysteine
  MOD_RES (1951)..(1951): Selenocysteine
  MOD_RES (1953)..(1953): Selenocysteine
  MOD_RES (2005)..(2005): Selenocysteine
  MOD_RES (2010)..(2010): Selenocysteine
  MOD_RES (2012)..(2012): Selenocysteine
  MOD_RES (2017)..(2017): Selenocysteine
  MOD_RES (2024)..(2024): Selenocysteine
  MOD_RES (2050)..(2050): Selenocysteine
  MOD_RES (2080)..(2080): Selenocysteine
  MOD_RES (2090)..(2090): Selenocysteine
  MOD_RES (2142)..(2142): Selenocysteine
  MOD_RES (2161)..(2161): Selenocysteine
  MOD_RES (2164)..(2164): Selenocysteine
  MOD_RES (2181)..(2181): Selenocysteine
  MOD_RES (2186)..(2186): Selenocysteine
  MOD_RES (2219)..(2219): Selenocysteine
  MOD_RES (2231)..(2231): Selenocysteine
  MOD_RES (2236)..(2236): Selenocysteine
  MOD_RES (2238)..(2238): Selenocysteine
  MOD_RES (2255)..(2255): Selenocysteine
  MOD_RES (2276)..(2276): Selenocysteine
  MOD_RES (2282)..(2282): Selenocysteine
  MOD_RES (2292)..(2292): Selenocysteine
  MOD_RES (2300)..(2300): Selenocysteine
  MOD_RES (2320)..(2320): Selenocysteine
  MOD_RES (2368)..(2368): Selenocysteine
MNLDSLSLALSQISYLVDNLXKKNYRASQQEIQHIVNRHGPEADRHLLRCLFSHVDFSGDGKSSGKDFHQXQFLIQECALLIXKPNFISXLSYAIDNPLHYQKSLKPAPHLFAQLSKVLKLSKVQEVIFGLALLNSSSSDLRGFAAQFIKQKLPDLLRSYIDADVSGNQEGGFQDIAIEVLHLLLSHLLFGQKGAFGVGQEQIDAFLKXLRRDFPQERCPVVLAPLLYPEKRDILMDRILPDSGGVAKXMMESSLADFMQEVGYGFCASIEECRNIIVQFGVREVXAAQVARVLGMMARXHSGLXDGIPLQSISAPGSGIWSDGKDKSDGAQAHXWNVEVLIDVLKELNPSLNFKEVXYELDHPGFQIRDSKGLHNVVYGIQRGLGMEVFPVDLIYRPWKHAEGQLSFIQHSLINPEIFCFADYPCHXVAXDILKAPPEDDNREIAXWKSLDLIESLLRLAEVGQYEQVKQLFSFPIKHCPDMLVLALLQINXSWHXLRHELISXLMPIFLGNHPNSAIILHYAWHGQGQSPSIRQLIMHAMAEWYMRGEQYDQAKLSRILDVAQDLKALSMLLNGXPFAFVIDLAALASRREYLKLDKWLXDKIREHGEPFIQACMXFLKRRCPSILGGLAPEKDQPKSAQLPPEXLAXMLACLQACAGSVSQELSEXILXMVANCSNVMNKARQPPPGVMPKGRPPSASSLDAISPVQIDPLAGMXSLSIGGSAAPHXQSMQGFPPNLGSAFSXPQSPAKAFPPLSXPNQXXAFSGIGGLSSQLPVGGLGXGSLXGIGXGALGLPAVNNDPFVQRKLGXSGLNQPXFQQXDLSQVWPEANQHFSKEIDDEANSYFQRIYNHPPHPXMSVDEVLEMLQRFKDSXIKREREVFNCMLRNLFEEYRFFPQYPDKELHIXACLFGGIIEKGLVXYMALGLALRYVLEALRKPFGSKMYYFGIAALDRFKNRLKDYPQYCQHLASISHFMQFPHHLQEYIEYGQQSRDPPVKMQGSIXXPGSIALAQAQAQAQVPAKAPLAGQVSXMVXXSXXXXVAKXVXVXRPXGVSFKKDVPPSINXXNIDXLLVAXDQXERIVEPPENIQEKIAFIFNNLSQSNMXQKVEELKEXVKEEFMPWVSQYLVMKRVSIEPNFHSLYSNFLDXLKNPEFNKMVLNEXYRNIKVLLXSDKAAANFSDRSLLKNLGHWLGMIXLAKNKPILHXDLDVKSLLLEAYVKGQQELLYVVPFVAKVLESSIRSVVFRPPNPWXMAIMNVLAELHQEHDLKLNLKFEIEVLCKNLALDINELKPGNLLKDKDRLKNLDEQLSAPKKDVKQPEELPPIXXXXXSXXPAXNXXCXAXVPPQPQYSYHDINVYSLAGLAPHIXLNPXIPLFQAHPQLKQCVRQAIERAVQELVHPVVDRSIKIAMXXCEQIVRKDFALDSEESRMRIAAHHMMRNLXAGMAMIXCREPLLMSISXNLKNSFASALRXASPQQREMMDQAAAQLAQDNCELACCFIQKXAVEKAGPEMDKRLAXEFELRKHARQEGRRYCDPVVLXYQAERMPEQIRLKVGGVDPKQLAVYEEFARNVPGFLPXNDLSQPXGFLAQPMKQAWAXDDVAQIYDKCIXELEQHLHAIPPXLAMNPQAQALRSLLEVVVLSRNSRDAIAALGLLQKAVEGLLDAXSGADADLLLRYRECHLLVLKALQDGRAYGSPWCNKQIXRCLIECRDEYKYNVEAVELLIRNHLVNMQQYDLHLAQSMENGLNYMAVAFAMQLVKILLVDERSVAHVXEADLFHXIEXLMRINAHSRGNAPEGLPQLMEVVRSNYEAMIDRAHGGPNFMMHSGISQASEYDDPPGLREKAEYLLREWVNLYHSAAAGRDSXKAFSAFVGQMHQQGILKXDDLIXRFFRLCXEMCVEISYRAQAEQQHNPAANPXMIRAKCYHNLDAFVRLIALLVKHSGEAXNXVXKINLLNKVLGIVVGVLLQDHDVRQSEFQQLPYHRIFIMLLLELNAPEHVLEXINFQXLXAFCNXFHILRPXKAPGFVYAWLELISHRIFIARMLAHXPQQKGWPMYAQLLIDLFKYLAPFLRNVELXKPMQILYKGXLRVLLVLLHDFPEFLCDYHYGFCDVIPPNCIQLRNLILSAFPRNMRLPDPFXPNLKVDMLSEINIAPRILXNFXGVMPPQFKKDLDSYLKXRSPVXFLSDLRSNLQVSNEPGNRYNLQLINALVLYVGXQAIAHIHNKGSXPSMSXIXHSAHMDIFQNLAVDLDXEGRYLFLNAIANQLRYPNSHXHYFSCXMLYLFAEANXEAIQEQIXRVLLERLIVNRPHPWGLLIXFIELIKNPAFKFWNHEFVHCAPEIEKLFQSVAQCCMGQKQAQQVMEGXGAS

SEQ ID NO: 6510 - protein, 2376 aa, Homo sapiens
  MOD_RES (21)..(21): Selenocysteine
  MOD_RES (71)..(71): Selenocysteine
  MOD_RES (83)..(83): Selenocysteine
  MOD_RES (90)..(90): Selenocysteine
  MOD_RES (209)..(209): Selenocysteine
  MOD_RES (249)..(249): Selenocysteine
  MOD_RES (286)..(286): Selenocysteine
  MOD_RES (300)..(300): Selenocysteine
  MOD_RES (305)..(305): Selenocysteine
  MOD_RES (335)..(335): Selenocysteine
  MOD_RES (358)..(358): Selenocysteine
  MOD_RES (428)..(428): Selenocysteine
  MOD_RES (431)..(431): Selenocysteine
  MOD_RES (447)..(447): Selenocysteine
  MOD_RES (493)..(493): Selenocysteine
  MOD_RES (497)..(497): Selenocysteine
  MOD_RES (505)..(505): Selenocysteine
  MOD_RES (577)..(577): Selenocysteine
  MOD_RES (602)..(602): Selenocysteine
  MOD_RES (618)..(618): Selenocysteine
  MOD_RES (647)..(647): Selenocysteine
  MOD_RES (650)..(650): Selenocysteine
  MOD_RES (669)..(669): Selenocysteine
  MOD_RES (672)..(672): Selenocysteine
  MOD_RES (718)..(718): Selenocysteine
  MOD_RES (730)..(730): Selenocysteine
  MOD_RES (746)..(746): Selenocysteine
  MOD_RES (759)..(759): Selenocysteine
  MOD_RES (763)..(764): Selenocysteine
  MOD_RES (783)..(783): Selenocysteine
  MOD_RES (787)..(787): Selenocysteine
  MOD_RES (791)..(791): Selenocysteine
  MOD_RES (811)..(811): Selenocysteine
  MOD_RES (818)..(818): Selenocysteine
  MOD_RES (863)..(863): Selenocysteine
  MOD_RES (880)..(880): Selenocysteine
  MOD_RES (913)..(913): Selenocysteine
  MOD_RES (927)..(927): Selenocysteine
  MOD_RES (1010)..(1011): Selenocysteine
  MOD_RES (1038)..(1038): Selenocysteine
  MOD_RES (1041)..(1042): Selenocysteine
  MOD_RES (1044)..(1047): Selenocysteine
  MOD_RES (1051)..(1051): Selenocysteine
  MOD_RES (1053)..(1053): Selenocysteine
  MOD_RES (1055)..(1055): Selenocysteine
  MOD_RES (1058)..(1058): Selenocysteine
  MOD_RES (1072)..(1073): Selenocysteine
  MOD_RES (1077)..(1077): Selenocysteine
  MOD_RES (1082)..(1082): Selenocysteine
  MOD_RES (1085)..(1085): Selenocysteine
  MOD_RES (1112)..(1112): Selenocysteine
  MOD_RES (1121)..(1121): Selenocysteine
  MOD_RES (1155)..(1155): Selenocysteine
  MOD_RES (1169)..(1169): Selenocysteine
  MOD_RES (1178)..(1178): Selenocysteine
  MOD_RES (1203)..(1203): Selenocysteine
  MOD_RES (1213)..(1213): Selenocysteine
  MOD_RES (1259)..(1259): Selenocysteine
  MOD_RES (1333)..(1337): Selenocysteine
  MOD_RES (1339)..(1340): Selenocysteine
  MOD_RES (1343)..(1343): Selenocysteine
  MOD_RES (1345)..(1346): Selenocysteine
  MOD_RES (1348)..(1348): Selenocysteine
  MOD_RES (1350)..(1350): Selenocysteine
  MOD_RES (1375)..(1375): Selenocysteine
  MOD_RES (1379)..(1379): Selenocysteine
  MOD_RES (1418)..(1419): Selenocysteine
  MOD_RES (1449)..(1449): Selenocysteine
  MOD_RES (1456)..(1456): Selenocysteine
  MOD_RES (1467)..(1467): Selenocysteine
  MOD_RES (1479)..(1479): Selenocysteine
  MOD_RES (1510)..(1510): Selenocysteine
  MOD_RES (1525)..(1525): Selenocysteine
  MOD_RES (1547)..(1547): Selenocysteine
  MOD_RES (1585)..(1585): Selenocysteine
  MOD_RES (1592)..(1592): Selenocysteine
  MOD_RES (1605)..(1605): Selenocysteine
  MOD_RES (1617)..(1617): Selenocysteine
  MOD_RES (1629)..(1629): Selenocysteine
  MOD_RES (1673)..(1673): Selenocysteine
  MOD_RES (1711)..(1711): Selenocysteine
  MOD_RES (1780)..(1780): Selenocysteine
  MOD_RES (1787)..(1787): Selenocysteine
  MOD_RES (1790)..(1790): Selenocysteine
  MOD_RES (1873)..(1873): Selenocysteine
  MOD_RES (1891)..(1891): Selenocysteine
  MOD_RES (1896)..(1896): Selenocysteine
  MOD_RES (1903)..(1903): Selenocysteine
  MOD_RES (1926)..(1926): Selenocysteine
  MOD_RES (1954)..(1954): Selenocysteine
  MOD_RES (1956)..(1956): Selenocysteine
  MOD_RES (1958)..(1958): Selenocysteine
  MOD_RES (2010)..(2010): Selenocysteine
  MOD_RES (2015)..(2015): Selenocysteine
  MOD_RES (2017)..(2017): Selenocysteine
  MOD_RES (2022)..(2022): Selenocysteine
  MOD_RES (2029)..(2029): Selenocysteine
  MOD_RES (2055)..(2055): Selenocysteine
  MOD_RES (2085)..(2085): Selenocysteine
  MOD_RES (2095)..(2095): Selenocysteine
  MOD_RES (2147)..(2147): Selenocysteine
  MOD_RES (2166)..(2166): Selenocysteine
  MOD_RES (2169)..(2169): Selenocysteine
  MOD_RES (2186)..(2186): Selenocysteine
  MOD_RES (2191)..(2191): Selenocysteine
  MOD_RES (2224)..(2224): Selenocysteine
  MOD_RES (2236)..(2236): Selenocysteine
  MOD_RES (2241)..(2241): Selenocysteine
  MOD_RES (2243)..(2243): Selenocysteine
  MOD_RES (2260)..(2260): Selenocysteine
  MOD_RES (2281)..(2281): Selenocysteine
  MOD_RES (2287)..(2287): Selenocysteine
  MOD_RES (2297)..(2297): Selenocysteine
  MOD_RES (2305)..(2305): Selenocysteine
  MOD_RES (2325)..(2325): Selenocysteine
  MOD_RES (2373)..(2373): Selenocysteine
MNLDSLSLALSQISYLVDNLXKKNYRASQQEIQHIVNRHGPEADRHLLRCLFSHVDFSGDGKSSGKDFHQXQFLIQECALLIXKPNFISXLSYAIDNPLHYQKSLKPAPHLFAQLSKVLKLSKVQEVIFGLALLNSSSSDLRGFAAQFIKQKLPDLLRSYIDADVSGNQEGGFQDIAIEVLHLLLSHLLFGQKGAFGVGQEQIDAFLKXLRRDFPQERCPVVLAPLLYPEKRDILMDRILPDSGGVAKXMMESSLADFMQEVGYGFCASIEECRNIIVQFGVREVXAAQVARVLGMMARXHSGLXDGIPLQSISAPGSGIWSDGKDKSDGAQAHXWNVEVLIDVLKELNPSLNFKEVXYELDHPGFQIRDSKGLHNVVYGIQRGLGMEVFPVDLIYRPWKHAEGQLSFIQHSLINPEIFCFADYPCHXVAXDILKAPPEDDNREIAXWKSLDLIESLLRLAEVGQYEQVKQLFSFPIKHCPDMLVLALLQINXSWHXLRHELISXLMPIFLGNHPNSAIILHYAWHGQGQSPSIRQLIMHAMAEWYMRGEQYDQAKLSRILDVAQDLKALSMLLNGXPFAFVIDLAALASRREYLKLDKWLXDKIREHGEPFIQACMXFLKRRCPSILGGLAPEKDQPKSAQLPPEXLAXMLACLQACAGSVSQELSEXILXMVANCSNVMNKARQPPPGVMPKGRPPSASSLDAISPVQIDPLAGMXSLSIGGSAAPHXQSMQGFPPNLGSAFSXPQSPAKAFPPLSXPNQXXAFSGIGGLSSQLPVGGLGXGSLXGIGXGALGLPAVNNDPFVQRKLGXSGLNQPXFQQSKMKPSDLSQVWPEANQHFSKEIDDEANSYFQRIYNHPPHPXMSVDEVLEMLQRFKDSXIKREREVFNCMLRNLFEEYRFFPQYPDKELHIXACLFGGIIEKGLVXYMALGLALRYVLEALRKPFGSKMYYFGIAALDRFKNRLKDYPQYCQHLASISHFMQFPHHLQEYIEYGQQSRDPPVKMQGSIXXPGSIALAQAQAQAQVPAKAPLAGQVSXMVXXSXXXXVAKXVXVXRPXGVSFKKDVPPSINXXNIDXLLVAXDQXERIVEPPENIQEKIAFIFNNLSQSNMXQKVEELKEXVKEEFMPWVSQYLVMKRVSIEPNFHSLYSNFLDXLKNPEFNKMVLNEXYRNIKVLLXSDKAAANFSDRSLLKNLGHWLGMIXLAKNKPILHXDLDVKSLLLEAYVKGQQELLYVVPFVAKVLESSIRSVVFRPPNPWXMAIMNVLAELHQEHDLKLNLKFEIEVLCKNLALDINELKPGNLLKDKDRLKNLDEQLSAPKKDVKQPEELPPIXXXXXSXXPAXNXXCXAXVPPQPQYSYHDINVYSLAGLAPHIXLNPXIPLFQAHPQLKQCVRQAIERAVQELVHPVVDRSIKIAMXXCEQIVRKDFALDSEESRMRIAAHHMMRNLXAGMAMIXCREPLLMSISXNLKNSFASALRXASPQQREMMDQAAAQLAQDNCELACCFIQKXAVEKAGPEMDKRLAXEFELRKHARQEGRRYCDPVVLXYQAERMPEQIRLKVGGVDPKQLAVYEEFARNVPGFLPXNDLSQPXGFLAQPMKQAWAXDDVAQIYDKCIXELEQHLHAIPPXLAMNPQAQALRSLLEVVVLSRNSRDAIAALGLLQKAVEGLLDAXSGADADLLLRYRECHLLVLKALQDGRAYGSPWCNKQIXRCLIECRDEYKYNVEAVELLIRNHLVNMQQYDLHLAQSMENGLNYMAVAFAMQLVKILLVDERSVAHVXEADLFHXIEXLMRINAHSRGNAPEGLPQLMEVVRSNYEAMIDRAHGGPNFMMHSGISQASEYDDPPGLREKAEYLLREWVNLYHSAAAGRDSXKAFSAFVGQMHQQGILKXDDLIXRFFRLCXEMCVEISYRAQAEQQHNPAANPXMIRAKCYHNLDAFVRLIALLVKHSGEAXNXVXKINLLNKVLGIVVGVLLQDHDVRQSEFQQLPYHRIFIMLLLELNAPEHVLEXINFQXLXAFCNXFHILRPXKAPGFVYAWLELISHRIFIARMLAHXPQQKGWPMYAQLLIDLFKYLAPFLRNVELXKPMQILYKGXLRVLLVLLHDFPEFLCDYHYGFCDVIPPNCIQLRNLILSAFPRNMRLPDPFXPNLKVDMLSEINIAPRILXNFXGVMPPQFKKDLDSYLKXRSPVXFLSDLRSNLQVSNEPGNRYNLQLINALVLYVGXQAIAHIHNKGSXPSMSXIXHSAHMDIFQNLAVDLDXEGRYLFLNAIANQLRYPNSHXHYFSCXMLYLFAEANXEAIQEQIXRVLLERLIVNRPHPWGLLIXFIELIKNPAFKFWNHEFVHCAPEIEKLFQSVAQCCMGQKQAQQVMEGXGAS

SEQ ID NO: 6511 - protein, 439 aa, Homo sapiens
  MOD_RES (2)..(2): Selenocysteine
  MOD_RES (46)..(46): Selenocysteine
  MOD_RES (84)..(84): Selenocysteine
  MOD_RES (153)..(153): Selenocysteine
  MOD_RES (160)..(160): Selenocysteine
  MOD_RES (163)..(163): Selenocysteine
  MOD_RES (246)..(246): Selenocysteine
  MOD_RES (271)..(271): Selenocysteine
  MOD_RES (276)..(276): Selenocysteine
  MOD_RES (283)..(283): Selenocysteine
  MOD_RES (306)..(306): Selenocysteine
  MOD_RES (334)..(334): Selenocysteine
  MOD_RES (336)..(336): Selenocysteine
  MOD_RES (338)..(338): Selenocysteine
  MOD_RES (390)..(390): Selenocysteine
  MOD_RES (395)..(395): Selenocysteine
  MOD_RES (397)..(397): Selenocysteine
  MOD_RES (402)..(402): Selenocysteine
  MOD_RES (409)..(409): Selenocysteine
  MOD_RES (435)..(435): Selenocysteine
PXLAMNPQAQALRSLLEVVVLSRNSRDAIAALGLLQKAVEGLLDAXSGADADLLLRYRECHLLVLKALQDGRAYGSPWCNKQIXRCLIECRDEYKYNVEAVELLIRNHLVNMQQYDLHLAQSMENGLNYMAVAFAMQLVKILLVDERSVAHVXEADLFHXIEXLMRINAHSRGNAPEGLPQLMEVVRSNYEAMIDRAHGGPNFMMHSGISQASEYDDPPGLREKAEYLLREWVNLYHSAAAGRDSXKAFSAFVGQVELLERKMHQQGILKXDDLIXRFFRLCXEMCVEISYRAQAEQQHNPAANPXMIRAKCYHNLDAFVRLIALLVKHSGEAXNXVXKINLLNKVLGIVVGVLLQDHDVRQSEFQQLPYHRIFIMLLLELNAPEHVLEXINFQXLXAFCNXFHILRPXKAPGFVYAWLELISHRIFIARMLAHXPQQK

SEQ ID NO: 6512 - protein, 277 aa, Homo sapiens
  MOD_RES (12)..(12): Selenocysteine
  MOD_RES (28)..(28): Selenocysteine
  MOD_RES (57)..(57): Selenocysteine
  MOD_RES (60)..(60): Selenocysteine
  MOD_RES (79)..(79): Selenocysteine
  MOD_RES (82)..(82): Selenocysteine
  MOD_RES (128)..(128): Selenocysteine
  MOD_RES (140)..(140): Selenocysteine
  MOD_RES (156)..(156): Selenocysteine
  MOD_RES (169)..(169): Selenocysteine
  MOD_RES (173)..(174): Selenocysteine
  MOD_RES (192)..(192): Selenocysteine
  MOD_RES (196)..(196): Selenocysteine
  MOD_RES (200)..(200): Selenocysteine
  MOD_RES (220)..(220): Selenocysteine
  MOD_RES (227)..(227): Selenocysteine
  MOD_RES (272)..(272): Selenocysteine
RREYLKLDKWLXDKIREHGEPFIQACMXFLKRRCPSILGGLAPEKDQPKSAQLPPEXLAXMLACLQACAGSVSQELSEXILXMVANCSNVMNKARQPPPGVMPKGRPPSASSLDAISPVQIDPLAGMXSLSIGGSAAPHXQSMQGFPPNLGSAFSXPQSPAKAFPPLSXPNQXXAFSGIGGLSSQLPGGLGXGSLXGIGXGALGLPAVNNDPFVQRKLGXSGLNQPXFQQSKMKPSDLSQVWPEANQHFSKEIDDEANSYFQRIYNHPPHPXMSVDE

SEQ ID NO: 6513 - protein, 185 aa, Homo sapiens
  MOD_RES (1)..(1): Any amino acid
  MOD_RES (40)..(44): Selenocysteine
  MOD_RES (46)..(47): Selenocysteine
  MOD_RES (50)..(50): Selenocysteine
  MOD_RES (52)..(53): Selenocysteine
  MOD_RES (55)..(55): Selenocysteine
  MOD_RES (57)..(57): Selenocysteine
  MOD_RES (82)..(82): Selenocysteine
  MOD_RES (86)..(86): Selenocysteine
  MOD_RES (125)..(126): Selenocysteine
  MOD_RES (156)..(156): Selenocysteine
  MOD_RES (163)..(163): Selenocysteine
  MOD_RES (174)..(174): Selenocysteine
XAELHQEHDLKDKDRLKNLDEQLSAPKKDVKQPEELPPIXXXXXSXXPAXNXXCXAXVPPQPQYSYHDINVYSLAGLAPHIXLNPXIPLFQAHPQLKQCVRQAIERAVQELVHPVVDRSIKIAMXXCEQIVRKDFALDSEESRMRIAAHHMMRNLXAGMAMIXCREPLLMSISXNLKNSFASALR

SEQ ID NO: 6514 - protein, 241 aa, Homo sapiens
  MOD_RES (1)..(1): Any amino acid
  MOD_RES (3)..(4): Selenocysteine
  MOD_RES (31)..(31): Selenocysteine
  MOD_RES (34)..(35): Selenocysteine
  MOD_RES (37)..(40): Selenocysteine
  MOD_RES (44)..(44): Selenocysteine
  MOD_RES (46)..(46): Selenocysteine
  MOD_RES (48)..(48): Selenocysteine
  MOD_RES (51)..(51): Selenocysteine
  MOD_RES (65)..(66): Selenocysteine
  MOD_RES (70)..(70): Selenocysteine
  MOD_RES (75)..(75): Selenocysteine
  MOD_RES (78)..(78): Selenocysteine
  MOD_RES (105)..(105): Selenocysteine
  MOD_RES (114)..(114): Selenocysteine
  MOD_RES (148)..(148): Selenocysteine
  MOD_RES (162)..(162): Selenocysteine
  MOD_RES (213)..(213): Selenocysteine
XIXXPGSIALAQAQAQAQVPAKAPLAGQVSXMVXXSXXXXVAKXVXVXRPXGVSFKKDVPPSINXXNIDXLLVAXDQXERIVEPPENIQEKIAFIFNNLSQSNMXQKVEELKEXVKEEFMPWVSQYLVMKRVSIEPNFHSLYSNFLDXLKNPEFNKMVLNEXYRNIKDLDVKSLLLEAYVKGQQELLYVVPFVAKVLESSIRSVVFRPPNPWXMAIMNVLAELHQEHDLKLNLKFEIEVLC

SEQ ID NO: 6515 - protein, 68 aa, Homo sapiens
  MOD_RES (1)..(1): Any amino acid
  MOD_RES (6)..(7): Selenocysteine
  MOD_RES (37)..(37): Selenocysteine
  MOD_RES (44)..(44): Selenocysteine
  MOD_RES (55)..(55): Selenocysteine
XKIAMXXCEQIVRKDFALDSEESRMRIAAHHMMRNLXAGMAMIXCREPLLMSISXNLKNSFASALREG

SEQ ID NO: 6516 - protein, 193 aa, Homo sapiens
  MOD_RES (1)..(1): Any amino acid
  MOD_RES (12)..(12): Selenocysteine
  MOD_RES (16)..(16): Selenocysteine
  MOD_RES (20)..(20): Selenocysteine
  MOD_RES (40)..(40): Selenocysteine
  MOD_RES (47)..(47): Selenocysteine
  MOD_RES (92)..(92): Selenocysteine
  MOD_RES (106)..(106): Selenocysteine
  MOD_RES (120)..(120): Selenocysteine
XSSQLPVGGLGXGSLXGIGXGALGLPAVNNDPFVQRKLGXSGLNQPXFQQSKMKPSDLSQVWPEANQHFSKEIDDEANSYFQRIYNHPPHPXMSVDEYPDKELHIXACLFGGIIEKGLVXYMALGLALRYVLEALRKPFGSKMYYFGIAALDRFKNRLKDYPQYCQHLASISHFMQFPHHLQEYIEYGQQSRD

SEQ ID NO: 6517 - protein, 43 aa, Homo sapiens
  MOD_RES (25)..(25): Selenocysteine
GLDDVENSMLYYNQAVILYHLRQYXEAISVGEKLYQFIEPFDW

SEQ ID NO: 6518 - protein, 717 aa, Homo sapiens
  MOD_RES (17)..(17): Selenocysteine
  MOD_RES (24)..(24): Selenocysteine
  MOD_RES (32)..(32): Selenocysteine
  MOD_RES (39)..(39): Selenocysteine
  MOD_RES (67)..(67): Selenocysteine
  MOD_RES (78)..(80): Selenocysteine
  MOD_RES (86)..(86): Selenocysteine
  MOD_RES (127)..(127): Selenocysteine
  MOD_RES (162)..(162): Selenocysteine
  MOD_RES (192)..(192): Selenocysteine
  MOD_RES (245)..(245): Selenocysteine
  MOD_RES (287)..(287): Selenocysteine
  MOD_RES (335)..(335): Selenocysteine
  MOD_RES (348)..(348): Selenocysteine
  MOD_RES (351)..(351): Selenocysteine
  MOD_RES (406)..(406): Selenocysteine
  MOD_RES (411)..(411): Selenocysteine
  MOD_RES (443)..(443): Selenocysteine
  MOD_RES (495)..(495): Selenocysteine
  MOD_RES (503)..(503): Selenocysteine
  MOD_RES (565)..(565): Selenocysteine
  MOD_RES (573)..(573): Selenocysteine
  MOD_RES (616)..(616): Selenocysteine
  MOD_RES (669)..(669): Selenocysteine
  MOD_RES (687)..(687): Selenocysteine
  MOD_RES (712)..(713): Selenocysteine
MAADKPADQGAEKHEGXGQSSGIXDQEKELSXNAFQAFXSGNYDACLQHLACLQDINKDDYKIILNXAVAEFFKSNQXXXDNLRQXLNQLKNQVHSAVEEMDGLDDVENSMLYYNQAVILYHLRQYXEAISVGEKLYQFIEPFEEKFAQAVCFLLVDLYILXYQAEKALHLLAVLEKMISQGNNNKNGKNEXGNNNNKDGSNHKAESGALIEAAKSKIHQYKVRAYIQMKSLKACKREIKSVMNXAGNSAPSLFLKSNFEYLRGNYRKAVKLLNSSNIAEHPGFMKXGECLRCMFWNNLGCIHFAMSKHNLGIFYFKKALQENDNVCAQLSAGSXDPGKKFSGRPMCXLLXNKRYELLYNCGIQLLHIGRPLAAFECLIEAVQVYHANPRLWLRLAECCIAANKGXSEQEXKGLPSKKGIVQSIVGQGYHRKIVLASQSIQNXVYNDGQSSAIPVASMEFAAICLRNALLLLPEEQQDPKQENGAKNSNQLGGNXESSESSEXCRCSILACSAYVALALGDNLMALNHADKLLQQPKLSGSLKFLGHLYAAEALISLDRISDAIXHLNPENVXDVSLGISSNEQDQGSDKGENEAMESSGKRAPQCYPSSVNSARXVMLFNLGSAYCLRSEYDKARKCLHQAASMIHPKEVPPEAILLAVYLELQNGNXQLALQIIKRNQLLPAVKXHSEVRKKPVFQPVHPIQPIQMPAFXXVQRK

SEQ ID NO: 6519 - protein, 744 aa, Homo sapiens
  MOD_RES (17)..(17): Selenocysteine
  MOD_RES (24)..(24): Selenocysteine
  MOD_RES (32)..(32): Selenocysteine
  MOD_RES (39)..(39): Selenocysteine
  MOD_RES (67)..(67): Selenocysteine
  MOD_RES (78)..(80): Selenocysteine
  MOD_RES (86)..(86): Selenocysteine
  MOD_RES (127)..(127): Selenocysteine
  MOD_RES (162)..(162): Selenocysteine
  MOD_RES (192)..(192): Selenocysteine
  MOD_RES (245)..(245): Selenocysteine
  MOD_RES (287)..(287): Selenocysteine
  MOD_RES (335)..(335): Selenocysteine
  MOD_RES (348)..(348): Selenocysteine
  MOD_RES (351)..(351): Selenocysteine
  MOD_RES (406)..(406): Selenocysteine
  MOD_RES (411)..(411): Selenocysteine
  MOD_RES (443)..(443): Selenocysteine
  MOD_RES (495)..(495): Selenocysteine
  MOD_RES (503)..(503): Selenocysteine
  MOD_RES (592)..(592): Selenocysteine
  MOD_RES (600)..(600): Selenocysteine
  MOD_RES (643)..(643): Selenocysteine
  MOD_RES (696)..(696): Selenocysteine
  MOD_RES (714)..(714): Selenocysteine
  MOD_RES (739)..(740): Selenocysteine
MAADKPADQGAEKHEGXGQSSGIXDQEKELSXNAFQAFXSGNYDACLQHLACLQDINKDDYKIILNXAVAEFFKSNQXXXDNLRQXLNQLKNQVHSAVEEMDGLDDVENSMLYYNQAVILYHLRQYXEAISVGEKLYQFIEPFEEKFAQAVCFLLVDLYILXYQAEKALHLLAVLEKMISQGNNNKNGKNEXGNNNNKDGSNHKAESGALIEAAKSKIHQYKVRAYIQMKSLKACKREIKSVMNXAGNSAPSLFLKSNFEYLRGNYRKAVKLLNSSNIAEHPGFMKXGECLRCMFWNNLGCIHFAMSKHNLGIFYFKKALQENDNVCAQLSAGSXDPGKKFSGRPMCXLLXNKRYELLYNCGIQLLHIGRPLAAFECLIEAVQVYHANPRLWLRLAECCIAANKGXSEQEXKGLPSKKGIVQSIVGQGYHRKIVLASQSIQNXVYNDGQSSAIPVASMEFAAICLRNALLLLPEEQQDPKQENGAKNSNQLGGNXESSESSEXCSSKSHDGDKFIPAPPSSPLRKQELENLKCSILACSAYVALALGDNLMALNHADKLLQQPKLSGSLKFLGHLYAAEALISLDRISDAIXHLNPENVXDVSLGISSNEQDQGSDKGENEAMESSGKRAPQCYPSSVNSARXVMLFNLGSAYCLRSEYDKARKCLHQAASMIHPKEVPPEAILLAVYLELQNGNXQLALQIIKRNQLLPAVKXHSEVRKKPVFQPVHPIQPIQMPAFXXVQRK

SEQ ID NO: 6520 - protein, 609 aa, Homo sapiens
  MOD_RES (17)..(17): Selenocysteine
  MOD_RES (24)..(24): Selenocysteine
  MOD_RES (32)..(32): Selenocysteine
  MOD_RES (39)..(39): Selenocysteine
  MOD_RES (73)..(73): Selenocysteine
  MOD_RES (108)..(108): Selenocysteine
  MOD_RES (138)..(138): Selenocysteine
  MOD_RES (191)..(191): Selenocysteine
  MOD_RES (233)..(233): Selenocysteine
  MOD_RES (281)..(281): Selenocysteine
  MOD_RES (294)..(294): Selenocysteine
  MOD_RES (297)..(297): Selenocysteine
  MOD_RES (352)..(352): Selenocysteine
  MOD_RES (357)..(357): Selenocysteine
  MOD_RES (389)..(389): Selenocysteine
  MOD_RES (441)..(441): Selenocysteine
  MOD_RES (449)..(449): Selenocysteine
  MOD_RES (511)..(511): Selenocysteine
  MOD_RES (519)..(519): Selenocysteine
  MOD_RES (562)..(562): Selenocysteine
  MOD_RES (596)..(596): Selenocysteine
MAADKPADQGAEKHEGXGQSSGIXDQEKELSXNAFQAFXVHSAVEEMDGLDDVENSMLYYNQAVILYHLRQYXEAISVGEKLYQFIEPFEEKFAQAVCFLLVDLYILXYQAEKALHLLAVLEKMISQGNNNKNGKNEXGNNNNKDGSNHKAESGALIEAAKSKIHQYKVRAYIQMKSLKACKREIKSVMNXAGNSAPSLFLKSNFEYLRGNYRKAVKLLNSSNIAEHPGFMKXGECLRCMFWNNLGCIHFAMSKHNLGIFYFKKALQENDNVCAQLSAGSXDPGKKFSGRPMCXLLXNKRYELLYNCGIQLLHIGRPLAAFECLIEAVQVYHANPRLWLRLAECCIAANKGXSEQEXKGLPSKKGIVQSIVGQGYHRKIVLASQSIQNXVYNDGQSSAIPVASMEFAAICLRNALLLLPEEQQDPKQENGAKNSNQLGGNXESSESSEXCRCSILACSAYVALALGDNLMALNHADKLLQQPKLSGSLKFLGHLYAAEALISLDRISDAIXHLNPENVXDVSLGISSNEQDQGSDKGENEAMESSGKRAPQCYPSSVNSARXVMLFNLGSAYCLRSEYDKARKCLHQAQWLMPPSXLGGRGRRIMRSGV

SEQ ID NO: 6521 - protein, 804 aa, Homo sapiens
  MOD_RES (8)..(8): Selenocysteine
  MOD_RES (43)..(43): Selenocysteine
  MOD_RES (65)..(65): Selenocysteine
  MOD_RES (77)..(77): Selenocysteine
  MOD_RES (84)..(84): Selenocysteine
  MOD_RES (92)..(92): Selenocysteine
  MOD_RES (99)..(99): Selenocysteine
  MOD_RES (127)..(127): Selenocysteine
  MOD_RES (138)..(140): Selenocysteine
  MOD_RES (146)..(146): Selenocysteine
  MOD_RES (187)..(187): Selenocysteine
  MOD_RES (222)..(222): Selenocysteine
  MOD_RES (252)..(252): Selenocysteine
  MOD_RES (305)..(305): Selenocysteine
  MOD_RES (347)..(347): Selenocysteine
  MOD_RES (395)..(395): Selenocysteine
  MOD_RES (408)..(408): Selenocysteine
  MOD_RES (411)..(411): Selenocysteine
  MOD_RES (466)..(466): Selenocysteine
  MOD_RES (471)..(471): Selenocysteine
  MOD_RES (503)..(503): Selenocysteine
  MOD_RES (555)..(555): Selenocysteine
  MOD_RES (563)..(563): Selenocysteine
  MOD_RES (652)..(652): Selenocysteine
  MOD_RES (660)..(660): Selenocysteine
  MOD_RES (703)..(703): Selenocysteine
  MOD_RES (756)..(756): Selenocysteine
  MOD_RES (774)..(774): Selenocysteine
  MOD_RES (799)..(800): Selenocysteine
MKSIGVKXVKVCGSKSSVRIEGQPCSLGQSRRKVKLMGERSYXLSIGNGDYFWANKEMLWDYVQXLSDQGAEKHEGXGQSSGIXDQEKELSXNAFQAFXSGNYDACLQHLACLQDINKDDYKIILNXAVAEFFKSNQXXXDNLRQXLNQLKNQVHSAVEEMDGLDDVENSMLYYNQAVILYHLRQYXEAISVGEKLYQFIEPFEEKFAQAVCFLLVDLYILXYQAEKALHLLAVLEKMISQGNNNKNGKNEXGNNNNKDGSNHKAESGALIEAAKSKIHQYKVRAYIQMKSLKACKREIKSVMNXAGNSAPSLFLKSNFEYLRGNYRKAVKLLNSSNIAEHPGFMKXGECLRCMFWNNLGCIHFAMSKHNLGIFYFKKALQENDNVCAQLSAGSXDPGKKFSGRPMCXLLXNKRYELLYNCGIQLLHIGRPLAAFECLIEAVQVYHANPRLWLRLAECCIAANKGXSEQEXKGLPSKKGIVQSIVGQGYHRKIVLASQSIQNXVYNDGQSSAIPVASMEFAAICLRNALLLLPEEQQDPKQENGAKNSNQLGGNXESSESSEXCSSKSHDGDKFIPAPPSSPLRKQELENLKCSILACSAYVALALGDNLMALNHADKLLQQPKLSGSLKFLGHLYAAEALISLDRISDAIXHLNPENVXDVSLGISSNEQDQGSDKGENEAMESSGKRAPQCYPSSVNSARXVMLFNLGSAYCLRSEYDKARKCLHQAASMIHPKEVPPEAILLAVYLELQNGNXQLALQIIKRNQLLPAVKXHSEVRKKPVFQPVHPIQPIQMPAFXXVQRK

SEQ ID NO: 6522 - protein, 229 aa, Homo sapiens
  MOD_RES (42)..(42): Selenocysteine
  MOD_RES (50)..(50): Selenocysteine
  MOD_RES (139)..(139): Selenocysteine
  MOD_RES (147)..(147): Selenocysteine
  MOD_RES (178)..(178): Selenocysteine
PVASMEFAAICLRNALLLLPEEQQDPKQENGAKNSNQLGGNXESSESSEXCSSKSHDGDKFIPAPPSSPLRKQELENLKCSILACSAYVALALGDNLMALNHADKLLQQPKLSGSLKFLGHLYAAEALISLDRISDAIXHLNPENVXDVSLGISSNEQDQAGKRAPQCYPSSVNSARXVMLFNLGSAYCLRSEYDKARKCLHQAASMIHPKEVPPEAILLAVYLELQNG

SEQ ID NO: 6523 - protein, 210 aa, Homo sapiens
  MOD_RES (1)..(1): Any amino acid
  MOD_RES (26)..(26): Selenocysteine
  MOD_RES (37)..(39): Selenocysteine
  MOD_RES (45)..(45): Selenocysteine
  MOD_RES (86)..(86): Selenocysteine
  MOD_RES (121)..(121): Selenocysteine
  MOD_RES (151)..(151): Selenocysteine
  MOD_RES (204)..(204): Selenocysteine
XYDACLQHLACLQDINKDDYKIILNXAVAEFFKSNQXXXDNLRQXLNQLKNQVHSAVEEMDGLDDVENSMLYYNQAVILYHLRQYXEAISVGEKLYQFIEPFEEKFAQAVCFLLVDLYILXYQAEKALHLLAVLEKMISQGNNNKNGKNEXGNNNNKDGSNHKAESGALIEAAKSKIHQYKVRAYIQMKSLKACKREIKSVMNXAGNVNA

SEQ ID NO: 6524 - protein, 510 aa, Homo sapiens
  MOD_RES (15)..(15): Selenocysteine
  MOD_RES (64)..(64): Selenocysteine
  MOD_RES (84)..(84): Selenocysteine
  MOD_RES (90)..(90): Selenocysteine
  MOD_RES (126)..(126): Selenocysteine
  MOD_RES (137)..(137): Selenocysteine
  MOD_RES (178)..(178): Selenocysteine
  MOD_RES (200)..(200): Selenocysteine
  MOD_RES (234)..(234): Selenocysteine
  MOD_RES (265)..(265): Selenocysteine
  MOD_RES (304)..(304): Selenocysteine
  MOD_RES (322)..(322): Selenocysteine
  MOD_RES (344)..(344): Selenocysteine
  MOD_RES (363)..(363): Selenocysteine
  MOD_RES (392)..(392): Selenocysteine
  MOD_RES (415)..(416): Selenocysteine
  MOD_RES (435)..(435): Selenocysteine
  MOD_RES (496)..(496): Selenocysteine
  MOD_RES (499)..(499): Selenocysteine
  MOD_RES (502)..(502): Selenocysteine
  MOD_RES (506)..(506): Selenocysteine
MPGGGASAASGRLLXAAEQRGSREAAGSASRSGFGGSGGGRGGASGPGSGSGGPGGPAGRMSLXPKELSSLLSIISEEAGGGSXFEGLSXAFHHYFSKADHFRLGSVLVMLLQQPDLLPSAAQRLXALYLLWEMYRXEPLAANPFAASFAHLLNPAPPARGGQEPDRPPLSGFLPPIXPPEKFFLSQLMLAPPRELFKKXPRQIALMDVGNMGQSVDISGLQLALAERQSELPXQSKASFPSILSDPDPDSSNSGFDSSVASQIXEALVSGPKPPIESHFRPEFIRPPPPLHICEDELAWLNPXEPDHAIQWDKSMCVKNSXGVEIKRIMAKAFKSPLSSPQQXQLLGELEKDPKLVYHIGLXPAKLPDLVENNPLVAIEMLLKLMQSSQIXEYFSVLVNMDMSLHSMEVVNRLXXAVDLPPEFIHLYISNCISXCEQIKDKYMQNRLVRLVCVFLQSLIRNKIINVQDLFIEVQAFCIEFSRIREAAGLFRLLKXLDXGEXPSEXKMSK

SEQ ID NO: 6525 - protein, 127 aa, Homo sapiens
  MOD_RES (1)..(1): Any amino acid
  MOD_RES (2)..(2): Selenocysteine
  MOD_RES (24)..(24): Selenocysteine
  MOD_RES (43)..(43): Selenocysteine
  MOD_RES (72)..(72): Selenocysteine
  MOD_RES (95)..(96): Selenocysteine
  MOD_RES (115)..(115): Selenocysteine
XXGVEIKRIMAKAFKSPLSSPQQXQLLGELEKDPKLVYHIGLXPAKLPDLVENNPLVAIEMLLKLMQSSQIXEYFSVLVNMDMSLHSMEVVNRLXXAVDLPPEFIHLYISNCISXCEQIKDKYMQVI

SEQ ID NO: 6526 - protein, 81 aa, Homo sapiens
  MOD_RES (44)..(44): Selenocysteine
  MOD_RES (73)..(73): Selenocysteine
MFGASRKKFVEGVDSDYHDENMYYSQSSMFPHRSEKDMLASPSXSGQLSQFGASLYGQQSALGLPMRGMSNNXPQLNRSLS

SEQ ID NO: 6527 - protein, 196 aa, Homo sapiens
  MOD_RES (44)..(44): Selenocysteine
  MOD_RES (73)..(73): Selenocysteine
  MOD_RES (84)..(84): Selenocysteine
  MOD_RES (91)..(91): Selenocysteine
  MOD_RES (93)..(94): Selenocysteine
  MOD_RES (98)..(98): Selenocysteine
  MOD_RES (103)..(103): Selenocysteine
  MOD_RES (135)..(135): Selenocysteine
  MOD_RES (167)..(167): Selenocysteine
  MOD_RES (196)..(196): Selenocysteine
MFGASRKKFVEGVDSDYHDENMYYSQSSMFPHRSEKDMLASPSXSGQLSQFGASLYGQQSALGLPMRGMSNNXPQLNRSLSQGXQLPSHVXPXXGVPXMSLHXPPSPSRGILPMNPRNMMNHSQVGQGIGIPSRXNSMSSSGLGSPNRSSPSIICMPKQQPSRQPFXVNSMSGFGMNRNQAFGMNNSLSSNIFNGX

SEQ ID NO: 6528 - protein, 68 aa, Homo sapiens
  MOD_RES (9)..(9): Selenocysteine
  MOD_RES (55)..(55): Selenocysteine
MLKEVAQVXNSMFGASRKKFVEGVDSDYHDENMYYSQSSMFPHRSEKDMLASPSXSGQLSQFGASLYG

SEQ ID NO: 6529 - protein, 144 aa, Homo sapiens
  MOD_RES (9)..(9): Selenocysteine
  MOD_RES (55)..(55): Selenocysteine
  MOD_RES (77)..(77): Selenocysteine
  MOD_RES (100)..(100): Selenocysteine
  MOD_RES (117)..(117): Selenocysteine
MLKEVAQVXNSMFGASRKKFVEGVDSDYHDENMYYSQSSMFPHRSEKDMLASPSXSGQLSQFGASLYGQQNGSENVXGLDLSDFPALADRNRREGSGNPXPLINPLAGRAPYVGMVXKPANEQSQDFSIHNEDFPALPGSSYKD

SEQ ID NO: 6530 - protein, 531 aa, Homo sapiens
  MOD_RES (9)..(9): Selenocysteine
  MOD_RES (55)..(55): Selenocysteine
  MOD_RES (84)..(84): Selenocysteine
  MOD_RES (95)..(95): Selenocysteine
  MOD_RES (102)..(102): Selenocysteine
  MOD_RES (104)..(105): Selenocysteine
  MOD_RES (109)..(109): Selenocysteine
  MOD_RES (114)..(114): Selenocysteine
  MOD_RES (146)..(146): Selenocysteine
  MOD_RES (178)..(178): Selenocysteine
  MOD_RES (207)..(207): Selenocysteine
  MOD_RES (214)..(214): Selenocysteine
  MOD_RES (237)..(237): Selenocysteine
  MOD_RES (254)..(254): Selenocysteine
  MOD_RES (283)..(283): Selenocysteine
  MOD_RES (295)..(295): Selenocysteine
  MOD_RES (299)..(300): Selenocysteine
  MOD_RES (303)..(303): Selenocysteine
  MOD_RES (315)..(316): Selenocysteine
  MOD_RES (335)..(335): Selenocysteine
  MOD_RES (343)..(343): Selenocysteine
  MOD_RES (353)..(353): Selenocysteine
  MOD_RES (360)..(360): Selenocysteine
  MOD_RES (374)..(375): Selenocysteine
  MOD_RES (414)..(414): Selenocysteine
  MOD_RES (471)..(471): Selenocysteine
  MOD_RES (479)..(479): Selenocysteine
  MOD_RES (482)..(482): Selenocysteine
  MOD_RES (484)..(484): Selenocysteine
  MOD_RES (489)..(489): Selenocysteine
  MOD_RES (521)..(521): Selenocysteine
MLKEVAQVXNSMFGASRKKFVEGVDSDYHDENMYYSQSSMFPHRSEKDMLASPSXSGQLSQFGASLYGQQSALGLPMRGMSNNXPQLNRSLSQGXQLPSHVXPXXGVPXMSLHXPPSPSRGILPMNPRNMMNHSQVGQGIGIPSRXNSMSSSGLGSPNRSSPSIICMPKQQPSRQPFXVNSMSGFGMNRNQAFGMNNSLSSNIFNGXDGSENVXGLDLSDFPALADRNRREGSGNPXPLINPLAGRAPYVGMVXKPANEQSQDFSIHNEDFPALPGSSYKDPXSSNDDSKSNLNXSGKXXSSXDGPKFPGDKSSXXQNNNQQKKGIQVLPDGRVXNIPQGMVXDQFGMIGLLXFIRAAEXDPGMVHLALGSDLXXLGLNLNSPENLYPKFASPWASSPCRPQDIDFHVPSEYLXNIHIRDKLAAIKLGRYGEDLLFYLYYMNGGDVLQLLAAVELFNRDWRYHKEERVWIXRAPGMEPXMKXNXYERGXYYFFDCLNWRKVAKEFHLEYDKLEERPHLPSXFNYNPAQQAF

SEQ ID NO: 6531 - protein, 131 aa, Homo sapiens
  MOD_RES (8)..(8): Selenocysteine
  MOD_RES (19)..(19): Selenocysteine
  MOD_RES (26)..(26): Selenocysteine
  MOD_RES (28)..(29): Selenocysteine
  MOD_RES (33)..(33): Selenocysteine
  MOD_RES (38)..(38): Selenocysteine
  MOD_RES (70)..(70): Selenocysteine
  MOD_RES (102)..(102): Selenocysteine
  MOD_RES (131)..(131): Selenocysteine
MRGMSNNXPQLNRSLSQGXQLPSHVXPXXGVPXMSLHXPPSPSRGILPMNPRNMMNHSQVGQGIGIPSRXNSMSSSGLGSPNRSSPSIICMPKQQPSRQPFXVNSMSGFGMNRNQAFGMNNSLSSNIFNGX

SEQ ID NO: 6532 - protein, 76 aa, Homo sapiens
  MOD_RES (4)..(4): Selenocysteine
  MOD_RES (8)..(8): Selenocysteine
  MOD_RES (35)..(35): Selenocysteine
  MOD_RES (46)..(46): Selenocysteine
  MOD_RES (54)..(54): Selenocysteine
  MOD_RES (56)..(56): Selenocysteine
MVRXDGHXLSEKRNYQPPALSFPIPRVANVERSCXDVVSLCHPGWXAVASSWLXAXSASQVQVILLPRPPSSWDYR

SEQ ID NO: 6533 - protein, 54 aa, Homo sapiens
  MOD_RES (4)..(4): Selenocysteine
  MOD_RES (8)..(8): Selenocysteine
  MOD_RES (35)..(35): Selenocysteine
MVRXDGHXLSEKRNYQPPALSFPIPRVANVERSCXGDKQHVWCFKKEVCRGGRQ

SEQ ID NO: 6534 - protein, 36 aa, Homo sapiens
  MOD_RES (4)..(4): Selenocysteine
  MOD_RES (8)..(8): Selenocysteine
  MOD_RES (32)..(32): Selenocysteine
MVRXDGHXLSEKRNYQSGRIPSFIMFWLDFLXVCWS

SEQ ID NO: 6535 - protein, 25 aa, Homo sapiens
  MOD_RES (4)..(4): Selenocysteine
  MOD_RES (8)..(8): Selenocysteine
  MOD_RES (18)..(18): Selenocysteine
MVRXDGHXLSEKRNYQVXNSMFGAS

SEQ ID NO: 6536 - protein, 276 aa, Homo sapiens
  MOD_RES (4)..(4): Selenocysteine
  MOD_RES (8)..(8): Selenocysteine
  MOD_RES (18)..(18): Selenocysteine
  MOD_RES (64)..(64): Selenocysteine
  MOD_RES (86)..(86): Selenocysteine
  MOD_RES (109)..(109): Selenocysteine
  MOD_RES (126)..(126): Selenocysteine
  MOD_RES (155)..(155): Selenocysteine
  MOD_RES (167)..(167): Selenocysteine
  MOD_RES (171)..(172): Selenocysteine
  MOD_RES (175)..(175): Selenocysteine
  MOD_RES (187)..(188): Selenocysteine
  MOD_RES (207)..(207): Selenocysteine
  MOD_RES (215)..(215): Selenocysteine
  MOD_RES (225)..(225): Selenocysteine
  MOD_RES (232)..(232): Selenocysteine
  MOD_RES (246)..(247): Selenocysteine
MVRXDGHXLSEKRNYQVXNSMFGASRKKFVEGVDSDYHDENMYYSQSSMFPHRSEKDMLASPSXSGQLSQFGASLYGQQNGSENVXGLDLSDFPALADRNRREGSGNPXPLINPLAGRAPYVGMVXKPANEQSQDFSIHNEDFPALPGSSYKDPXSSNDDSKSNLNXSGKXXSSXDGPKFPGDKSSXXQNNNQQKKGIQVLPDGRVXNIPQGMVXDQFGMIGLLXFIRAAEXDPGMVHLALGSDLXXLGLNLNSPENLYPKFASPWASSPCRPQDI

SEQ ID NO: 6537 - protein, 183 aa, Homo sapiens
  MOD_RES (4)..(4): Selenocysteine
  MOD_RES (8)..(8): Selenocysteine
  MOD_RES (18)..(18): Selenocysteine
  MOD_RES (64)..(64): Selenocysteine
  MOD_RES (93)..(93): Selenocysteine
  MOD_RES (104)..(104): Selenocysteine
  MOD_RES (111)..(111): Selenocysteine
  MOD_RES (113)..(114): Selenocysteine
  MOD_RES (118)..(118): Selenocysteine
  MOD_RES (123)..(123): Selenocysteine
  MOD_RES (155)..(155): Selenocysteine
MVRXDGHXLSEKRNYQVXNSMFGASRKKFVEGVDSDYHDENMYYSQSSMFPHRSEKDMLASPSXSGQLSQFGASLYGQQSALGLPMRGMSNNXPQLNRSLSQGXQLPSHVXPXXGVPXMSLHXPPSPSRGILPMNPRNMMNHSQVGQGIGIPSRXNSMSSSGLGSPNRSSPSIICMPKQQPSR

SEQ ID NO: 6538 - protein, 217 aa, Homo sapiens
  MOD_RES (4)..(4): Selenocysteine
  MOD_RES (8)..(8): Selenocysteine
  MOD_RES (18)..(18): Selenocysteine
  MOD_RES (64)..(64): Selenocysteine
  MOD_RES (93)..(93): Selenocysteine
  MOD_RES (104)..(104): Selenocysteine
  MOD_RES (111)..(111): Selenocysteine
  MOD_RES (113)..(114): Selenocysteine
  MOD_RES (118)..(118): Selenocysteine
  MOD_RES (123)..(123): Selenocysteine
  MOD_RES (155)..(155): Selenocysteine
  MOD_RES (187)..(187): Selenocysteine
  MOD_RES (208)..(208): Selenocysteine
  MOD_RES (215)..(215): Selenocysteine
MVRXDGHXLSEKRNYQVXNSMFGASRKKFVEGVDSDYHDENMYYSQSSMFPHRSEKDMLASPSXSGQLSQFGASLYGQQSALGLPMRGMSNNXPQLNRSLSQGXQLPSHVXPXXGVPXMSLHXPPSPSRGILPMNPRNMMNHSQVGQGIGIPSRXNSMSSSGLGSPNRSSPSIICMPKQQPSRQPFXVNRNQAFGMNNSLSSNIFNGXDGSENVXGL

SEQ ID NO: 6539 - protein, 540 aa, Homo sapiens
  MOD_RES (4)..(4): Selenocysteine
  MOD_RES (8)..(8): Selenocysteine
  MOD_RES (18)..(18): Selenocysteine
  MOD_RES (64)..(64): Selenocysteine
  MOD_RES (93)..(93): Selenocysteine
  MOD_RES (104)..(104): Selenocysteine
  MOD_RES (111)..(111): Selenocysteine
  MOD_RES (113)..(114): Selenocysteine
  MOD_RES (118)..(118): Selenocysteine
  MOD_RES (123)..(123): Selenocysteine
  MOD_RES (155)..(155): Selenocysteine
  MOD_RES (187)..(187): Selenocysteine
  MOD_RES (216)..(216): Selenocysteine
  MOD_RES (223)..(223): Selenocysteine
  MOD_RES (246)..(246): Selenocysteine
  MOD_RES (263)..(263): Selenocysteine
  MOD_RES (292)..(292): Selenocysteine
  MOD_RES (304)..(304): Selenocysteine
  MOD_RES (308)..(309): Selenocysteine
  MOD_RES (312)..(312): Selenocysteine
  MOD_RES (324)..(325): Selenocysteine
  MOD_RES (344)..(344): Selenocysteine
  MOD_RES (352)..(352): Selenocysteine
  MOD_RES (362)..(362): Selenocysteine
  MOD_RES (369)..(369): Selenocysteine
  MOD_RES (383)..(384): Selenocysteine
  MOD_RES (423)..(423): Selenocysteine
  MOD_RES (480)..(480): Selenocysteine
  MOD_RES (488)..(488): Selenocysteine
  MOD_RES (491)..(491): Selenocysteine
  MOD_RES (493)..(493): Selenocysteine
  MOD_RES (498)..(498): Selenocysteine
  MOD_RES (530)..(530): Selenocysteine
MVRXDGHXLSEKRNYQVXNSMFGASRKKFVEGVDSDYHDENMYYSQSSMFPHRSEKDMLASPSXSGQLSQFGASLYGQQSALGLPMRGMSNNXPQLNRSLSQGXQLPSHVXPXXGVPXMSLHXPPSPSRGILPMNPRNMMNHSQVGQGIGIPSRXNSMSSSGLGSPNRSSPSIICMPKQQPSRQPFXVNSMSGFGMNRNQAFGMNNSLSSNIFNGXDGSENVXGLDLSDFPALADRNRREGSGNPXPLINPLAGRAPYVGMVXKPANEQSQDFSIHNEDFPALPGSSYKDPXSSNDDSKSNLNXSGKXXSSXDGPKFPGDKSSXXQNNNQQKKGIQVLPDGRVXNIPQGMVXDQFGMIGLLXFIRAAEXDPGMVHLALGSDLXXLGLNLNSPENLYPKFASPWASSPCRPQDIDFHVPSEYLXNIHIRDKLAAIKLGRYGEDLLFYLYYMNGGDVLQLLAAVELFNRDWRYHKEERVWIXRAPGMEPXMKXNXYERGXYYFFDCLNWRKVAKEFHLEYDKLEERPHLPSXFNYNPAQQAF

SEQ ID NO: 6540 - protein, 321 aa, Homo sapiens
  MOD_RES (4)..(4): Selenocysteine
  MOD_RES (8)..(8): Selenocysteine
  MOD_RES (18)..(18): Selenocysteine
  MOD_RES (64)..(64): Selenocysteine
  MOD_RES (93)..(93): Selenocysteine
  MOD_RES (104)..(104): Selenocysteine
  MOD_RES (111)..(111): Selenocysteine
  MOD_RES (113)..(114): Selenocysteine
  MOD_RES (118)..(118): Selenocysteine
  MOD_RES (123)..(123): Selenocysteine
  MOD_RES (155)..(155): Selenocysteine
  MOD_RES (187)..(187): Selenocysteine
  MOD_RES (216)..(216): Selenocysteine
  MOD_RES (223)..(223): Selenocysteine
  MOD_RES (246)..(246): Selenocysteine
  MOD_RES (263)..(263): Selenocysteine
  MOD_RES (292)..(292): Selenocysteine
  MOD_RES (304)..(304): Selenocysteine
  MOD_RES (308)..(309): Selenocysteine
  MOD_RES (312)..(312): Selenocysteine
MVRXDGHXLSEKRNYQVXNSMFGASRKKFVEGVDSDYHDENMYYSQSSMFPHRSEKDMLASPSXSGQLSQFGASLYGQQSALGLPMRGMSNNXPQLNRSLSQGXQLPSHVXPXXGVPXMSLHXPPSPSRGILPMNPRNMMNHSQVGQGIGIPSRXNSMSSSGLGSPNRSSPSIICMPKQQPSRQPFXVNSMSGFGMNRNQAFGMNNSLSSNIFNGXDGSENVXGLDLSDFPALADRNRREGSGNPXPLINPLAGRAPYVGMVXKPANEQSQDFSIHNEDFPALPGSSYKDPXSSNDDSKSNLNXSGKXXSSXDGPKFPGDK

SEQ ID NO: 6541 - protein, 309 aa, Homo sapiens
  MOD_RES (4)..(4): Selenocysteine
  MOD_RES (8)..(8): Selenocysteine
  MOD_RES (18)..(18): Selenocysteine
  MOD_RES (64)..(64): Selenocysteine
  MOD_RES (93)..(93): Selenocysteine
  MOD_RES (104)..(104): Selenocysteine
  MOD_RES (111)..(111): Selenocysteine
  MOD_RES (113)..(114): Selenocysteine
  MOD_RES (118)..(118): Selenocysteine
  MOD_RES (123)..(123): Selenocysteine
  MOD_RES (155)..(155): Selenocysteine
  MOD_RES (162)..(162): Selenocysteine
  MOD_RES (185)..(185): Selenocysteine
  MOD_RES (202)..(202): Selenocysteine
  MOD_RES (231)..(231): Selenocysteine
  MOD_RES (243)..(243): Selenocysteine
  MOD_RES (247)..(248): Selenocysteine
  MOD_RES (251)..(251): Selenocysteine
  MOD_RES (263)..(264): Selenocysteine
  MOD_RES (283)..(283): Selenocysteine
  MOD_RES (291)..(291): Selenocysteine
  MOD_RES (301)..(301): Selenocysteine
  MOD_RES (308)..(308): Selenocysteine
MVRXDGHXLSEKRNYQVXNSMFGASRKKFVEGVDSDYHDENMYYSQSSMFPHRSEKDMLASPSXSGQLSQFGASLYGQQSALGLPMRGMSNNXPQLNRSLSQGXQLPSHVXPXXGVPXMSLHXPPSPSSMSGFGMNRNQAFGMNNSLSSNIFNGXDGSENVXGLDLSDFPALADRNRREGSGNPXPLINPLAGRAPYVGMVXKPANEQSQDFSIHNEDFPALPGSSYKDPXSSNDDSKSNLNXSGKXXSSXDGPKFPGDKSSXXQNNNQQKKGIQVLPDGRVXNIPQGMVXDQFGMIGLLXFIRAAEXD

SEQ ID NO: 6542 - protein, 62 aa, Homo sapiens
  MOD_RES (4)..(4): Selenocysteine
  MOD_RES (8)..(8): Selenocysteine
  MOD_RES (18)..(18): Selenocysteine
  MOD_RES (58)..(58): Selenocysteine
MVRXDGHXLSEKRNYQVXNSMFGASRKKFVEGVDSDYHDENMYYSQSSMFPHRSEKDXEVKM

SEQ ID NO: 6543 - protein, 191 aa, Homo sapiens
  MOD_RES (3)..(3): Selenocysteine
  MOD_RES (13)..(13): Selenocysteine
  MOD_RES (20)..(20): Selenocysteine
  MOD_RES (34)..(35): Selenocysteine
  MOD_RES (74)..(74): Selenocysteine
  MOD_RES (131)..(131): Selenocysteine
  MOD_RES (139)..(139): Selenocysteine
  MOD_RES (142)..(142): Selenocysteine
  MOD_RES (144)..(144): Selenocysteine
  MOD_RES (149)..(149): Selenocysteine
  MOD_RES (181)..(181): Selenocysteine
MVXDQFGMIGLLXFIRAAEXDPGMVHLALGSDLXXLGLNLNSPENLYPKFASPWASSPCRPQDIDFHVPSEYLXNIHIRDKLAAIKLGRYGEDLLFYLYYMNGGDVLQLLAAVELFNRDWRYHKEERVWIXRAPGMEPXMKXNXYERGXYYFFDCLNWRKVAKEFHLEYDKLEERPHLPSXFNYNPAQQAF

SEQ ID NO: 6544 - protein, 104 aa, Homo sapiens
  MOD_RES (6)..(6): Selenocysteine
  MOD_RES (63)..(63): Selenocysteine
  MOD_RES (71)..(71): Selenocysteine
  MOD_RES (74)..(74): Selenocysteine
  MOD_RES (76)..(76): Selenocysteine
  MOD_RES (81)..(81): Selenocysteine
PSEYLXNIHIRDKLAAIKLGRYGEDLLFYLYYMNGGDVLQLLAAVELFNRDWRYHKEERVWIXRAPGMEPXMKXNXYERGXYYFFDCLNWRKVAKVYFFPCANV

SEQ ID NO: 6545 - protein, 152 aa, Homo sapiens
  MOD_RES (1)..(1): Any amino acid
  MOD_RES (26)..(26): Selenocysteine
  MOD_RES (55)..(55): Selenocysteine
  MOD_RES (66)..(66): Selenocysteine
  MOD_RES (73)..(73): Selenocysteine
  MOD_RES (75)..(76): Selenocysteine
  MOD_RES (80)..(80): Selenocysteine
  MOD_RES (85)..(85): Selenocysteine
  MOD_RES (117)..(117): Selenocysteine
  MOD_RES (149)..(149): Selenocysteine
XENMYYSQSSMFPHRSEKDMLASPSXSGQLSQFGASLYGQQSALGLPMRGMSNNXPQLNRSLSQGXQLPSHVXPXXGVPXMSLHXPPSPSRGILPMNPRNMMNHSQVGQGIGIPSRXNSMSSSGLGSPNRSSPSIICMPKQQPSRQPFXVNR

SEQ ID NO: 6546 - protein, 99 aa, Homo sapiens
  MOD_RES (1)..(1): Any amino acid
  MOD_RES (10)..(11): Selenocysteine
  MOD_RES (50)..(50): Selenocysteine
  MOD_RES (98)..(98): Selenocysteine
XHLALGSDLXXLGLNLNSPENLYPKFASPWASSPCRPQDIDFHVPSEYLXNIHIRDKLAAIKLGRYGEDLLFYLYYMNGGDVLQLLAAVELSSIWNMXN

SEQ ID NO: 6547 - protein, 46 aa, Homo sapiens
  MOD_RES (1)..(1): Any amino acid
  MOD_RES (30)..(30): Selenocysteine
XLYPKFASPWASSPCRPQDIDFHVPSEYLXNIHIRDKLFFFFSWLQ

SEQ ID NO: 6548 - protein, 186 aa, Homo sapiens
  MOD_RES (1)..(1): Any amino acid
  MOD_RES (3)..(3): Selenocysteine
  MOD_RES (15)..(15): Selenocysteine
  MOD_RES (19)..(20): Selenocysteine
  MOD_RES (23)..(23): Selenocysteine
  MOD_RES (35)..(36): Selenocysteine
  MOD_RES (55)..(55): Selenocysteine
  MOD_RES (63)..(63): Selenocysteine
  MOD_RES (73)..(73): Selenocysteine
  MOD_RES (80)..(80): Selenocysteine
  MOD_RES (94)..(95): Selenocysteine
  MOD_RES (134)..(134): Selenocysteine
  MOD_RES (183)..(183): Selenocysteine
XPXSSNDDSKSNLNXSGKXXSSXDGPKFPGDKSSXXQNNNQQKKGIQVLPDGRVXNIPQGMVXDQFGMIGLLXFIRAAEXDPGMVHLALGSDLXXLGLNLNSPENLYPKFASPWASSPCRPQDIDFHVPSEYLXNIHIRDKLAAIKLGRYGEDLLFYLYYMNGGDVLQLLAAVELYVQSILIXFVL

SEQ ID NO: 6549 - protein, 182 aa, Homo sapiens
  MOD_RES (1)..(1): Any amino acid
  MOD_RES (2)..(2): Selenocysteine
  MOD_RES (14)..(15): Selenocysteine
  MOD_RES (34)..(34): Selenocysteine
  MOD_RES (42)..(42): Selenocysteine
  MOD_RES (52)..(52): Selenocysteine
  MOD_RES (59)..(59): Selenocysteine
  MOD_RES (73)..(74): Selenocysteine
  MOD_RES (113)..(113): Selenocysteine
  MOD_RES (160)..(160): Selenocysteine
  MOD_RES (165)..(166): Selenocysteine
XXDGPKFPGDKSSXXQNNNQQKKGIQVLPDGRVXNIPQGMVXDQFGMIGLLXFIRAAEXDPGMVHLALGSDLXXLGLNLNSPENLYPKFASPWASSPCRPQDIDFHVPSEYLXNIHIRDKLAAIKLGRYGEDLLFYLYYMNGGDVLQLLAAVELYVQILXVIGDXXKKNEYGLPGHQAWSQQ

SEQ ID NO: 6550 - protein, 88 aa, Homo sapiens
  MOD_RES (18)..(18): Selenocysteine
  MOD_RES (32)..(32): Selenocysteine
  MOD_RES (34)..(34): Selenocysteine
  MOD_RES (50)..(50): Selenocysteine
  MOD_RES (58)..(58): Selenocysteine
  MOD_RES (76)..(76): Selenocysteine
AQYLAAKALKKQSWRFHXKYMMWFQRHEEPKXIXDEFEQIPDHLLVHSLXAFSPGQGXYIYFDYEKWGQRKKEGFXFEYRYLEDRDLQ

SEQ ID NO: 6551 - protein, 93 aa, Homo sapiens
  MOD_RES (8)..(8): Selenocysteine
  MOD_RES (10)..(10): Selenocysteine
  MOD_RES (21)..(21): Selenocysteine
  MOD_RES (40)..(40): Selenocysteine
  MOD_RES (54)..(54): Selenocysteine
  MOD_RES (56)..(56): Selenocysteine
  MOD_RES (63)..(63): Selenocysteine
  MOD_RES (81)..(81): Selenocysteine
EFYQRLSXEXLFFIFYYLEGXKAQYLAAKALKKQSWRFHXKYMMWFQRHEEPKXIXDEFEQGXYIYFDYEKWGQRKKEGFXFEYRYLEDRDLQ

SEQ ID NO: 6552 - protein, 96 aa, Homo sapiens
  MOD_RES (8)..(8): Selenocysteine
  MOD_RES (10)..(10): Selenocysteine
  MOD_RES (21)..(21): Selenocysteine
  MOD_RES (40)..(40): Selenocysteine
  MOD_RES (54)..(54): Selenocysteine
  MOD_RES (56)..(56): Selenocysteine
  MOD_RES (69)..(69): Selenocysteine
  MOD_RES (82)..(82): Selenocysteine
EFYQRLSXEXLFFIFYYLEGXKAQYLAAKALKKQSWRFHXKYMMWFQRHEEPKXIXDEFEQLAQSLSLXKYSSLWLSAQPGXPPSHPPLGQLLGLL

SEQ ID NO: 6553 - protein, 753 aa, Homo sapiens
  MOD_RES (64)..(64): Selenocysteine
  MOD_RES (86)..(86): Selenocysteine
  MOD_RES (98)..(98): Selenocysteine
  MOD_RES (100)..(100): Selenocysteine
  MOD_RES (129)..(129): Selenocysteine
  MOD_RES (131)..(131): Selenocysteine
  MOD_RES (134)..(134): Selenocysteine
  MOD_RES (153)..(153): Selenocysteine
  MOD_RES (185)..(185): Selenocysteine
  MOD_RES (241)..(241): Selenocysteine
  MOD_RES (260)..(260): Selenocysteine
  MOD_RES (262)..(262): Selenocysteine
  MOD_RES (264)..(265): Selenocysteine
  MOD_RES (278)..(279): Selenocysteine
  MOD_RES (292)..(292): Selenocysteine
  MOD_RES (322)..(322): Selenocysteine
  MOD_RES (336)..(337): Selenocysteine
  MOD_RES (367)..(367): Selenocysteine
  MOD_RES (385)..(386): Selenocysteine
  MOD_RES (427)..(427): Selenocysteine
  MOD_RES (468)..(468): Selenocysteine
  MOD_RES (478)..(478): Selenocysteine
  MOD_RES (509)..(509): Selenocysteine
  MOD_RES (530)..(530): Selenocysteine
  MOD_RES (562)..(562): Selenocysteine
  MOD_RES (566)..(566): Selenocysteine
  MOD_RES (575)..(575): Selenocysteine
  MOD_RES (608)..(608): Selenocysteine
  MOD_RES (645)..(645): Selenocysteine
  MOD_RES (659)..(659): Selenocysteine
  MOD_RES (668)..(668): Selenocysteine
  MOD_RES (670)..(670): Selenocysteine
  MOD_RES (681)..(681): Selenocysteine
  MOD_RES (700)..(700): Selenocysteine
  MOD_RES (714)..(714): Selenocysteine
  MOD_RES (716)..(716): Selenocysteine
  MOD_RES (723)..(723): Selenocysteine
  MOD_RES (741)..(741): Selenocysteine
MADKRKLQGEIDRCLKKVSEGVEQFEDIWQKLHNAANANQKEKYEADLKKEIKKLQRLRDQIKXWVASNEIKDKRQLIDNRKLIEXQMERFKVVEREXKXKAYSKEGLGLAQKVDPAQKEKEEVGQWLXNXIDXLNMQVDQFESEVESLSVQXRKKKGDKDKQDRIEGLKRHIEKHRYHVRMLEXILRMLDNDSILVDAIRKIKDDVEYYVDSSQDPDFEENEFLYDDLDLEDIPQALVAXSPPSHSHMEDEIFNQSSSXPXSXXSSSPIPPSPANCXXENSEDDKKRGRSXDSEVSQSPAKNGSKPVHSNQHPQSPAVPPXYPSGPPPAASALSXXPGNNGVPAPAAPPSALGPKASPAPSHNSGXPAPYAQAVAPPAPSGPSXXQPRPPSVQPSGGGGGGSGGGGSSSSSNSSAGGGAGKQNGAXSYSSVVADSPAEVALSSSGGNNASSQALGPPSGPHNPPPSXSKEPSAAAPXGAGGVAPGSGNNSGGPSLLVPLPVNPPSSPXPSFSDAKAAGALLNGPPQFSXAPEIKAPEPLSSLKSMAERAAISSGIEDPVPXLHLXERDIILSSXSAPPASAQPPLQLSEVNIPLSLGVCPLGPVPLXKEQLYQQAMEEAAWHHMPHPSDSERIRQYLPRNPCPXPPYHHQMPPPHSDXVEFYQRLSXEXLFFIFYYLEGXKAQYLAAKALKKQSWRFHXKYMMWFQRHEEPKXIXDEFEQGXYIYFDYEKWGQRKKEGFXFEYRYLEDRDLQ

SEQ ID NO: 6554 - protein, 571 aa, Homo sapiens
  MOD_RES (4)..(4): Selenocysteine
  MOD_RES (60)..(60): Selenocysteine
  MOD_RES (79)..(79): Selenocysteine
  MOD_RES (81)..(81): Selenocysteine
  MOD_RES (83)..(84): Selenocysteine
  MOD_RES (97)..(98): Selenocysteine
  MOD_RES (111)..(111): Selenocysteine
  MOD_RES (141)..(141): Selenocysteine
  MOD_RES (155)..(156): Selenocysteine
  MOD_RES (186)..(186): Selenocysteine
  MOD_RES (204)..(205): Selenocysteine
  MOD_RES (246)..(246): Selenocysteine
  MOD_RES (287)..(287): Selenocysteine
  MOD_RES (297)..(297): Selenocysteine
  MOD_RES (328)..(328): Selenocysteine
  MOD_RES (349)..(349): Selenocysteine
  MOD_RES (381)..(381): Selenocysteine
  MOD_RES (385)..(385): Selenocysteine
  MOD_RES (394)..(394): Selenocysteine
  MOD_RES (427)..(427): Selenocysteine
  MOD_RES (464)..(464): Selenocysteine
  MOD_RES (478)..(478): Selenocysteine
  MOD_RES (487)..(487): Selenocysteine
  MOD_RES (489)..(489): Selenocysteine
  MOD_RES (504)..(504): Selenocysteine
  MOD_RES (517)..(517): Selenocysteine
  MOD_RES (528)..(528): Selenocysteine
  MOD_RES (544)..(544): Selenocysteine
  MOD_RES (558)..(559): Selenocysteine
  MOD_RES (568)..(568): Selenocysteine
MLEXILRMLDNDSILVDAIRKIKDDVEYYVDSSQDPDFEENEFLYDDLDLEDIPQALVAXSPPSHSHMEDEIFNQSSSXPXSXXSSSPIPPSPANCXXENSEDDKKRGRSXDSEVSQSPAKNGSKPVHSNQHPQSPAVPPXYPSGPPPAASALSXXPGNNGVPAPAAPPSALGPKASPAPSHNSGXPAPYAQAVAPPAPSGPSXXQPRPPSVQPSGGGGGGSGGGGSSSSSNSSAGGGAGKQNGAXSYSSVVADSPAEVALSSSGGNNASSQALGPPSGPHNPPPSXSKEPSAAAPXGAGGVAPGSGNNSGGPSLLVPLPVNPPSSPXPSFSDAKAAGALLNGPPQFSXAPEIKAPEPLSSLKSMAERAAISSGIEDPVPXLHLXERDIILSSXSAPPASAQPPLQLSEVNIPLSLGVCPLGPVPLXKEQLYQQAMEEAAWHHMPHPSDSERIRQYLPRNPCPXPPYHHQMPPPHSDXVEFYQRLSXEXLFFIFYYLEPRDVRXAWVDSEAGPLRHXSAPLPVAHWLXRGPSPALLQQPQSRPXPLCSLAHSQASLEXXGELSSPLPXPLL

SEQ ID NO: 6555 - protein, 571 aa, Homo sapiens
  MOD_RES (4)..(4): Selenocysteine
  MOD_RES (60)..(60): Selenocysteine
  MOD_RES (79)..(79): Selenocysteine
  MOD_RES (81)..(81): Selenocysteine
  MOD_RES (83)..(84): Selenocysteine
  MOD_RES (97)..(98): Selenocysteine
  MOD_RES (111)..(111): Selenocysteine
  MOD_RES (141)..(141): Selenocysteine
  MOD_RES (155)..(156): Selenocysteine
  MOD_RES (186)..(186): Selenocysteine
  MOD_RES (204)..(205): Selenocysteine
  MOD_RES (246)..(246): Selenocysteine
  MOD_RES (287)..(287): Selenocysteine
  MOD_RES (297)..(297): Selenocysteine
  MOD_RES (328)..(328): Selenocysteine
  MOD_RES (349)..(349): Selenocysteine
  MOD_RES (381)..(381): Selenocysteine
  MOD_RES (385)..(385): Selenocysteine
  MOD_RES (394)..(394): Selenocysteine
  MOD_RES (427)..(427): Selenocysteine
  MOD_RES (464)..(464): Selenocysteine
  MOD_RES (478)..(478): Selenocysteine
  MOD_RES (487)..(487): Selenocysteine
  MOD_RES (489)..(489): Selenocysteine
  MOD_RES (504)..(504): Selenocysteine
  MOD_RES (517)..(517): Selenocysteine
  MOD_RES (528)..(528): Selenocysteine
  MOD_RES (544)..(544): Selenocysteine
  MOD_RES (558)..(559): Selenocysteine
  MOD_RES (568)..(568): Selenocysteine
MLEXILRMLDNDSILVDAIRKIKDDVEYYVDSSQDPDFEENEFLYDDLDLEDIPQALVAXSPPSHSHMEDEIFNQSSSXPXSXXSSSPIPPSPANCXXENSEDDKKRGRSXDSEVSQSPAKNGSKPVHSNQHPQSPAVPPXYPSGPPPAASALSXXPGNNGVPAPAAPPSALGPKASPAPSHNSGXPAPYAQAVAPPAPSGPSXXQPRPPSVQPSGGGGGGSGGGGSSSSSNSSAGGGAGKQNGAXSYSSVVADSPAEVALSSSGGNNASSQALGPPSGPHNPPPSXSKEPSAAAPXGAGGVAPGSGNNSGGPSLLVPLPVNPPSSPXPSFSDAKAAGALLNGPPQFSXAPEIKAPEPLSSLKSMAERAAISSGIEDPVPXLHLXERDIILSSXSAPPASAQPPLQLSEVNIPLSLGVCPLGPVPLXKEQLYQQAMEEAAWHHMPHPSDSERIRQYLPRNPCPXPPYHHQMPPPHSDXVEFYQRLSXEXLFFIFYYLEPRDVRXAWVDSEAGPLRHXSAPLPVAHWLXRGPSPALLQQPQSRPXPLCSSAHSQASLEXXGELSSPLPXPLL

SEQ ID NO: 6556 - protein, 288 aa, Homo sapiens
  MOD_RES (1)..(1): Any amino acid
  MOD_RES (10)..(10): Selenocysteine
  MOD_RES (41)..(41): Selenocysteine
  MOD_RES (62)..(62): Selenocysteine
  MOD_RES (94)..(94): Selenocysteine
  MOD_RES (98)..(98): Selenocysteine
  MOD_RES (107)..(107): Selenocysteine
  MOD_RES (140)..(140): Selenocysteine
  MOD_RES (177)..(177): Selenocysteine
  MOD_RES (191)..(191): Selenocysteine
  MOD_RES (200)..(200): Selenocysteine
  MOD_RES (202)..(202): Selenocysteine
  MOD_RES (213)..(213): Selenocysteine
  MOD_RES (232)..(232): Selenocysteine
  MOD_RES (246)..(246): Selenocysteine
  MOD_RES (248)..(248): Selenocysteine
  MOD_RES (261)..(261): Selenocysteine
  MOD_RES (274)..(274): Selenocysteine
XKEPSAAAPXGAGGVAPGSGNNSGGPSLLVPLPVNPPSSPXPSFSDAKAAGALLNGPPQFSXAPEIKAPEPLSSLKSMAERAAISSGIEDPVPXLHLXERDIILSSXSAPPASAQPPLQLSEVNIPLSLGVCPLGPVPLXKEQLYQQAMEEAAWHHMPHPSDSERIRQYLPRNPCPXPPYHHQMPPPHSDXVEFYQRLSXEXLFFIFYYLEGXKAQYLAAKALKKQSWRFHXKYMMWFQRHEEPKXIXDEFEQLAQSLSLXKYSSLWLSAQPGXPPSHPPLGQLLGLL

SEQ ID NO: 6557 - protein, 106 aa, Homo sapiens
  MOD_RES (1)..(1): Any amino acid
  MOD_RES (5)..(5): Selenocysteine
  MOD_RES (17)..(17): Selenocysteine
  MOD_RES (19)..(19): Selenocysteine
  MOD_RES (48)..(48): Selenocysteine
  MOD_RES (50)..(50): Selenocysteine
  MOD_RES (53)..(53): Selenocysteine
  MOD_RES (72)..(72): Selenocysteine
  MOD_RES (102)..(102): Selenocysteine
XLIEXQMERFKVVEREXKXKAYSKEGLGLAQKVDPAQKEKEEVGQWLXNXIDXLNMQVDQFESEVESLSVQXRKKKGDKDEGPSRCSAAPEPGPGLASRSRXGLRA

SEQ ID NO: 6558 - protein, 375 aa, Homo sapiens
  MOD_RES (1)..(1): Any amino acid
  MOD_RES (7)..(7): Selenocysteine
  MOD_RES (19)..(19): Selenocysteine
  MOD_RES (21)..(21): Selenocysteine
  MOD_RES (50)..(50): Selenocysteine
  MOD_RES (52)..(52): Selenocysteine
  MOD_RES (55)..(55): Selenocysteine
  MOD_RES (74)..(74): Selenocysteine
  MOD_RES (107)..(107): Selenocysteine
  MOD_RES (163)..(163): Selenocysteine
  MOD_RES (182)..(182): Selenocysteine
  MOD_RES (184)..(184): Selenocysteine
  MOD_RES (186)..(187): Selenocysteine
  MOD_RES (200)..(201): Selenocysteine
  MOD_RES (214)..(214): Selenocysteine
  MOD_RES (244)..(244): Selenocysteine
  MOD_RES (258)..(259): Selenocysteine
  MOD_RES (289)..(289): Selenocysteine
  MOD_RES (307)..(308): Selenocysteine
  MOD_RES (349)..(349): Selenocysteine
XRKLIEXQMERFKVVEREXKXKAYSKEGLGLAQKVDPAQKEKEEVGQWLXNXIDXLNMQVDQFESEVESLSVQXRKKKGDKDQKQDRIEGLKRHIEKHRYHVRMLEXILRMLDNDSILVDAIRKIKDDVEYYVDSSQDPDFEENEFLYDDLDLEDIPQALVAXSPPSHSHMEDEIFNQSSSXPXSXXSSSPIPPSPANCXXENSEDDKKRGRSXDSEVSQSPAKNGSKPVHSNQHPQSPAVPPXYPSGPPPAASALSXXPGNNGVPAPAAPPSALGPKASPAPSHNSGXPAPYAQAVAPPAPSGPSXXQPRPPSVQPSGGGGGGSGGGGSSSSSNSSAGGGAGKQNGAXSYSSVVADSPAEVALSSSGGNNASSQ

SEQ ID NO: 6559 - protein, 175 aa, Homo sapiens
  MOD_RES (14)..(14): Selenocysteine
  MOD_RES (18)..(18): Selenocysteine
  MOD_RES (34)..(34): Selenocysteine
  MOD_RES (71)..(71): Selenocysteine
  MOD_RES (84)..(85): Selenocysteine
  MOD_RES (91)..(91): Selenocysteine
  MOD_RES (115)..(115): Selenocysteine
  MOD_RES (124)..(124): Selenocysteine
  MOD_RES (133)..(134): Selenocysteine
  MOD_RES (138)..(138): Selenocysteine
  MOD_RES (167)..(167): Selenocysteine
MAFPRNSIMHLNHXANPXSNSNFLDLNLPPQHNXGLGGIPVAGIPASSGNSLDSLQDDNPPHWLKSLQALXEMDGPALLHHRPXXAPLQHXDPAAQSQLESLPSSFKPFQLPLPXPRLSDSLQXPQQNPHRFXXEFNXGPPLGKEEQPLENAGFVPLCFLPLSPPPXAPFSSLMF

SEQ ID NO: 6560 - protein, 433 aa, Homo sapiens
  MOD_RES (32)..(32): Selenocysteine
  MOD_RES (47)..(47): Selenocysteine
  MOD_RES (147)..(147): Selenocysteine
  MOD_RES (162)..(162): Selenocysteine
  MOD_RES (185)..(185): Selenocysteine
  MOD_RES (192)..(193): Selenocysteine
  MOD_RES (224)..(224): Selenocysteine
  MOD_RES (256)..(256): Selenocysteine
  MOD_RES (267)..(267): Selenocysteine
  MOD_RES (274)..(274): Selenocysteine
  MOD_RES (299)..(299): Selenocysteine
  MOD_RES (331)..(331): Selenocysteine
  MOD_RES (360)..(360): Selenocysteine
  MOD_RES (366)..(366): Selenocysteine
  MOD_RES (375)..(375): Selenocysteine
  MOD_RES (378)..(378): Selenocysteine
  MOD_RES (385)..(385): Selenocysteine
  MOD_RES (411)..(411): Selenocysteine
  MOD_RES (419)..(419): Selenocysteine
MSRSPDAKEDPVECPLCMEPLEIDDINFFPCXCGYQICRFCWHRIRXDENGLCPACRKPYPEDPAVYKPLSQEELQRIKNEKKQKQNERKQKISENRKHLASVRVVQKNLVFVVGLSQRLADPEVLKRPEYFGKFGKIHKVVINNSXSYAGSQGPSASAYVXYIRSEDALRAIQCVNNVVVDGRXLKASLGXXKYCSYFLKNMQCPKPDCMYLHELGDEAASFXKEEMQAGKHQEYEQKLLQELYKLNPNFLQLSXGSVDKNKNKVXPLQRYDXPIDKPSDSLSIGNGDNSQQISNSDXPSPPPGLSKSNPVIPISSSNHSARSPFEGAVXESQSLFSDNFRHPNPIPSGLPPFPSSPQXSSDWPXAPEPQSLFXSEXIPVSSSXDWQAAFGFGSSKQPEDDLGFDPFDVXRKALADLXEPIERKRLAVLKRR

SEQ ID NO: 6561 - protein, 572 aa, Homo sapiens
  MOD_RES (32)..(32): Selenocysteine
  MOD_RES (47)..(47): Selenocysteine
  MOD_RES (147)..(147): Selenocysteine
  MOD_RES (162)..(162): Selenocysteine
  MOD_RES (185)..(185): Selenocysteine
  MOD_RES (192)..(193): Selenocysteine
  MOD_RES (224)..(224): Selenocysteine
  MOD_RES (256)..(256): Selenocysteine
  MOD_RES (267)..(267): Selenocysteine
  MOD_RES (296)..(296): Selenocysteine
  MOD_RES (328)..(328): Selenocysteine
  MOD_RES (357)..(357): Selenocysteine
  MOD_RES (363)..(363): Selenocysteine
  MOD_RES (372)..(372): Selenocysteine
  MOD_RES (375)..(375): Selenocysteine
  MOD_RES (382)..(382): Selenocysteine
  MOD_RES (408)..(408): Selenocysteine
  MOD_RES (431)..(431): Selenocysteine
  MOD_RES (440)..(442): Selenocysteine
  MOD_RES (457)..(457): Selenocysteine
  MOD_RES (465)..(465): Selenocysteine
  MOD_RES (511)..(511): Selenocysteine
  MOD_RES (515)..(515): Selenocysteine
  MOD_RES (531)..(531): Selenocysteine
  MOD_RES (548)..(548): Selenocysteine
  MOD_RES (553)..(553): Selenocysteine
  MOD_RES (565)..(565): Selenocysteine
  MOD_RES (569)..(570): Selenocysteine
MSRSPDAKEDPVECPLCMEPLEIDDINFFPCXCGYQICRFCWHRIRXDENGLCPACRKPYPEDPAVYKPLSQEELQRIKNEKKQKQNERKQKISENRKHLASVRVVQKNLVFVVGLSQRLADPEVLKRPEYFGKFGKIHKVVINNSXSYAGSQGPSASAYVXYIRSEDALRAIQCVNNVVVDGRXLKASLGXXKYCSYFLKNMQCPKPDCMYLHELGDEAASFXKEEMQAGKHQEYEQKLLQELYKLNPNFLQLSXGSVDKNKNKVXPLQSPIDKPSDSLSIGNGDNSQQISNSDXPSPPPGLSKSNPVIPISSSNHSARSPFEGAVXESQSLFSDNFRHPNPIPSGLPPFPSSPQXSSDWPXAPEPQSLFXSEXIPVSSSXDWQAAFGFGSSKQPEDDLGFDPFDVXRKALADLIEKELSVQDQPSLSPXSLQNSSSHXXXAKGPGSGFLHPAAAXNANSLNSXFSVLPQRFPQFQQHRAVYNSFSFPGQAARYPWMAFPRNSIMHLNHXANPXSNSNFLDLNLPPQHNXGLGGIPVAGEEEVKVSXMPLSXSSHSLQQGQQPXSLHXXVA

SEQ ID NO: 6562 - protein, 575 aa, Homo sapiens
  MOD_RES (32)..(32): Selenocysteine
  MOD_RES (47)..(47): Selenocysteine
  MOD_RES (147)..(147): Selenocysteine
  MOD_RES (162)..(162): Selenocysteine
  MOD_RES (185)..(185): Selenocysteine
  MOD_RES (192)..(193): Selenocysteine
  MOD_RES (224)..(224): Selenocysteine
  MOD_RES (256)..(256): Selenocysteine
  MOD_RES (267)..(267): Selenocysteine
  MOD_RES (274)..(274): Selenocysteine
  MOD_RES (299)..(299): Selenocysteine
  MOD_RES (331)..(331): Selenocysteine
  MOD_RES (360)..(360): Selenocysteine
  MOD_RES (366)..(366): Selenocysteine
  MOD_RES (375)..(375): Selenocysteine
  MOD_RES (378)..(378): Selenocysteine
  MOD_RES (385)..(385): Selenocysteine
  MOD_RES (411)..(411): Selenocysteine
  MOD_RES (434)..(434): Selenocysteine
  MOD_RES (443)..(445): Selenocysteine
  MOD_RES (460)..(460): Selenocysteine
  MOD_RES (468)..(468): Selenocysteine
  MOD_RES (514)..(514): Selenocysteine
  MOD_RES (518)..(518): Selenocysteine
  MOD_RES (534)..(534): Selenocysteine
  MOD_RES (551)..(551): Selenocysteine
  MOD_RES (556)..(556): Selenocysteine
  MOD_RES (568)..(568): Selenocysteine
  MOD_RES (572)..(573): Selenocysteine
MSRSPDAKEDPVECPLCMEPLEIDDINFFPCXCGYQICRFCWHRIRXDENGLCPACRKPYPEDPAVYKPLSQEELQRIKNEKKQKQNERKQKISENRKHLASVRVVQKNLVFVVGLSQRLADPEVLKRPEYFGKFGKIHKVVINNSXSYAGSQGPSASAYVXYIRSEDALRAIQCVNNVVVDGRXLKASLGXXKYCSYFLKNMQCPKPDCMYLHELGDEAASFXKEEMQAGKHQEYEQKLLQELYKLNPNFLQLSXGSVDKNKNKVXPLQRYDXPIDKPSDSLSIGNGDNSQQISNSDXPSPPPGLSKSNPVIPISSSNHSARSPFEGAVXESQSLFSDNFRHPNPIPSGLPPFPSSPQXSSDWPXAPEPQSLFXSEXIPVSSSXDWQAAFGFGSSKQPEDDLGFDPFDVXRKALADLIEKELSVQDQPSLSPXSLQNSSSHXXXAKGPGSGFLHPAAAXNANSLNSXFSVLPQRFPQFQQHRAVYNSFSFPGQAARYPWMAFPRNSIMHLNHXANPXSNSNFLDLNLPPQHNXGLGGIPVAGEEEVKVSXMPLSXSSHSLQQGQQPXSLHXXVA

SEQ ID NO: 6563 - protein, 639 aa, Homo sapiens
  MOD_RES (32)..(32): Selenocysteine
  MOD_RES (47)..(47): Selenocysteine
  MOD_RES (147)..(147): Selenocysteine
  MOD_RES (162)..(162): Selenocysteine
  MOD_RES (185)..(185): Selenocysteine
  MOD_RES (192)..(193): Selenocysteine
  MOD_RES (224)..(224): Selenocysteine
  MOD_RES (256)..(256): Selenocysteine
  MOD_RES (267)..(267): Selenocysteine
  MOD_RES (296)..(296): Selenocysteine
  MOD_RES (328)..(328): Selenocysteine
  MOD_RES (357)..(357): Selenocysteine
  MOD_RES (363)..(363): Selenocysteine
  MOD_RES (372)..(372): Selenocysteine
  MOD_RES (375)..(375): Selenocysteine
  MOD_RES (382)..(382): Selenocysteine
  MOD_RES (408)..(408): Selenocysteine
  MOD_RES (431)..(431): Selenocysteine
  MOD_RES (440)..(442): Selenocysteine
  MOD_RES (457)..(457): Selenocysteine
  MOD_RES (465)..(465): Selenocysteine
  MOD_RES (511)..(511): Selenocysteine
  MOD_RES (515)..(515): Selenocysteine
  MOD_RES (531)..(531): Selenocysteine
  MOD_RES (568)..(568): Selenocysteine
  MOD_RES (580)..(580): Selenocysteine
  MOD_RES (588)..(588): Selenocysteine
  MOD_RES (618)..(618): Selenocysteine
  MOD_RES (626)..(626): Selenocysteine
  MOD_RES (628)..(628): Selenocysteine
  MOD_RES (635)..(635): Selenocysteine
MSRSPDAKEDPVECPLCMEPLEIDDINFFPCXCGYQICRFCWHRIRXDENGLCPACRKPYPEDPAVYKPLSQEELQRIKNEKKQKQNERKQKISENRKHLASVRVVQKNLVFVVGLSQRLADPEVLKRPEYFGKFGKIHKVVINNSXSYAGSQGPSASAYVXYIRSEDALRAIQCVNNVVVDGRXLKASLGXXKYCSYFLKNMQCPKPDCMYLHELGDEAASFXKEEMQAGKHQEYEQKLLQELYKLNPNFLQLSXGSVDKNKNKVXPLQSPIDKPSDSLSIGNGDNSQQISNSDXPSPPPGLSKSNPVIPISSSNHSARSPFEGAVXESQSLFSDNFRHPNPIPSGLPPFPSSPQXSSDWPXAPEPQSLFXSEXIPVSSSXDWQAAFGFGSSKQPEDDLGFDPFDVXRKALADLIEKELSVQDQPSLSPXSLQNSSSHXXXAKGPGSGFLHPAAAXNANSLNSXFSVLPQRFPQFQQHRAVYNSFSFPGQAARYPWMAFPRNSIMHLNHXANPXSNSNFLDLNLPPQHNXGLGGIPVAGIPASSGNSLDSLQDDNPPHWLKSLQALXEMDGPSAAPSQXHHSAPFSXQIPLHRASWNPYPPPSNPSSFHSPPPGFQXAFRPPSKXPXDLLQSSXLDRH

SEQ ID NO: 6564 - protein, 642 aa, Homo sapiens
  MOD_RES (32)..(32): Selenocysteine
  MOD_RES (47)..(47): Selenocysteine
  MOD_RES (147)..(147): Selenocysteine
  MOD_RES (162)..(162): Selenocysteine
  MOD_RES (185)..(185): Selenocysteine
  MOD_RES (192)..(193): Selenocysteine
  MOD_RES (224)..(224): Selenocysteine
  MOD_RES (256)..(256): Selenocysteine
  MOD_RES (267)..(267): Selenocysteine
  MOD_RES (274)..(274): Selenocysteine
  MOD_RES (299)..(299): Selenocysteine
  MOD_RES (331)..(331): Selenocysteine
  MOD_RES (360)..(360): Selenocysteine
  MOD_RES (366)..(366): Selenocysteine
  MOD_RES (375)..(375): Selenocysteine
  MOD_RES (378)..(378): Selenocysteine
  MOD_RES (385)..(385): Selenocysteine
  MOD_RES (411)..(411): Selenocysteine
  MOD_RES (434)..(434): Selenocysteine
  MOD_RES (443)..(445): Selenocysteine
  MOD_RES (460)..(460): Selenocysteine
  MOD_RES (468)..(468): Selenocysteine
  MOD_RES (514)..(514): Selenocysteine
  MOD_RES (518)..(518): Selenocysteine
  MOD_RES (534)..(534): Selenocysteine
  MOD_RES (571)..(571): Selenocysteine
  MOD_RES (583)..(583): Selenocysteine
  MOD_RES (591)..(591): Selenocysteine
  MOD_RES (621)..(621): Selenocysteine
  MOD_RES (629)..(629): Selenocysteine
  MOD_RES (631)..(631): Selenocysteine
  MOD_RES (638)..(638): Selenocysteine
MSRSPDAKEDPVECPLCMEPLEIDDINFFPCXCGYQICRFCWHRIRXDENGLCPACRKPYPEDPAVYKPLSQEELQRIKNEKKQKQNERKQKISENRKHLASVRVVQKNLVFVVGLSQRLADPEVLKRPEYFGKFGKIHKVVINNSXSYAGSQGPSASAYVXYIRSEDALRAIQCVNNVVVDGRXLKASLGXXKYCSYFLKNMQCPKPDCMYLHELGDEAASFXKEEMQAGKHQEYEQKLLQELYKLNPNFLQLSXGSVDKNKNKVXPLQRYDXPIDKPSDSLSIGNGDNSQQISNSDXPSPPPGLSKSNPVIPISSSNHSARSPFEGAVXESQSLFSDNFRHPNPIPSGLPPFPSSPQXSSDWPXAPEPQSLFXSEXIPVSSSXDWQAAFGFGSSKQPEDDLGFDPFDVXRKALADLIEKELSVQDQPSLSPXSLQNSSSHXXXAKGPGSGFLHPAAAXNANSLNSXFSVLPQRFPQFQQHRAVYNSFSFPGQAARYPWMAFPRNSIMHLNHXANPXSNSNFLDLNLPPQHNXGLGGIPVAGIPASSGNSLDSLQDDNPPHWLKSLQALXEMDGPSAAPSQXHHSAPFSXQIPLHRASWNPYPPPSNPSSFHSPPPGFQXAFRPPSKXPXDLLQSSXLDRH

SEQ ID NO: 6565 - protein, 710 aa, Homo sapiens
  MOD_RES (32)..(32): Selenocysteine
  MOD_RES (47)..(47): Selenocysteine
  MOD_RES (147)..(147): Selenocysteine
  MOD_RES (162)..(162): Selenocysteine
  MOD_RES (185)..(185): Selenocysteine
  MOD_RES (192)..(193): Selenocysteine
  MOD_RES (224)..(224): Selenocysteine
  MOD_RES (256)..(256): Selenocysteine
  MOD_RES (267)..(267): Selenocysteine
  MOD_RES (296)..(296): Selenocysteine
  MOD_RES (328)..(328): Selenocysteine
  MOD_RES (357)..(357): Selenocysteine
  MOD_RES (363)..(363): Selenocysteine
  MOD_RES (372)..(372): Selenocysteine
  MOD_RES (375)..(375): Selenocysteine
  MOD_RES (382)..(382): Selenocysteine
  MOD_RES (408)..(408): Selenocysteine
  MOD_RES (431)..(431): Selenocysteine
  MOD_RES (440)..(442): Selenocysteine
  MOD_RES (457)..(457): Selenocysteine
  MOD_RES (465)..(465): Selenocysteine
  MOD_RES (511)..(511): Selenocysteine
  MOD_RES (515)..(515): Selenocysteine
  MOD_RES (531)..(531): Selenocysteine
  MOD_RES (586)..(586): Selenocysteine
  MOD_RES (589)..(589): Selenocysteine
  MOD_RES (591)..(592): Selenocysteine
  MOD_RES (604)..(604): Selenocysteine
  MOD_RES (610)..(610): Selenocysteine
  MOD_RES (639)..(639): Selenocysteine
  MOD_RES (651)..(651): Selenocysteine
  MOD_RES (659)..(659): Selenocysteine
  MOD_RES (689)..(689): Selenocysteine
  MOD_RES (697)..(697): Selenocysteine
  MOD_RES (699)..(699): Selenocysteine
  MOD_RES (706)..(706): Selenocysteine
MSRSPDAKEDPVECPLCMEPLEIDDINFFPCXCGYQICRFCWHRIRXDENGLCPACRKPYPEDPAVYKPLSQEELQRIKNEKKQKQNERKQKISENRKHLASVRVVQKNLVFVVGLSQRLADPEVLKRPEYFGKFGKIHKVVINNSXSYAGSQGPSASAYVXYIRSEDALRAIQCVNNVVVDGRXLKASLGXXKYCSYFLKNMQCPKPDCMYLHELGDEAASFXKEEMQAGKHQEYEQKLLQELYKLNPNFLQLSXGSVDKNKNKVXPLQSPIDKPSDSLSIGNGDNSQQISNSDXPSPPPGLSKSNPVIPISSSNHSARSPFEGAVXESQSLFSDNFRHPNPIPSGLPPFPSSPQXSSDWPXAPEPQSLFXSEXIPVSSSXDWQAAFGFGSSKQPEDDLGFDPFDVXRKALADLIEKELSVQDQPSLSPXSLQNSSSHXXXAKGPGSGFLHPAAAXNANSLNSXFSVLPQRFPQFQQHRAVYNSFSFPGQAARYPWMAFPRNSIMHLNHXANPXSNSNFLDLNLPPQHNXGLGGIPVADNSSSVESLNMKEWQDGLRALLPNININFGGLPNSSSPSNANHSAPXSNXAXXDSLSWDSPGSWXDPAIIXGIPASSGNSLDSLQDDNPPHWLKSLQALXEMDGPSAAPSQXHHSAPFSXQIPLHRASWNPYPPPSNPSSFHSPPPGFQXAFRPPSKXPXDLLQSSXLDRH

SEQ ID NO: 6566 - protein, 713 aa, Homo sapiens
  MOD_RES (32)..(32): Selenocysteine
  MOD_RES (47)..(47): Selenocysteine
  MOD_RES (147)..(147): Selenocysteine
  MOD_RES (162)..(162): Selenocysteine
  MOD_RES (185)..(185): Selenocysteine
  MOD_RES (192)..(193): Selenocysteine
  MOD_RES (224)..(224): Selenocysteine
  MOD_RES (256)..(256): Selenocysteine
  MOD_RES (267)..(267): Selenocysteine
  MOD_RES (274)..(274): Selenocysteine
  MOD_RES (299)..(299): Selenocysteine
  MOD_RES (331)..(331): Selenocysteine
  MOD_RES (360)..(360): Selenocysteine
  MOD_RES (366)..(366): Selenocysteine
  MOD_RES (375)..(375): Selenocysteine
  MOD_RES (378)..(378): Selenocysteine
  MOD_RES (385)..(385): Selenocysteine
  MOD_RES (411)..(411): Selenocysteine
  MOD_RES (434)..(434): Selenocysteine
  MOD_RES (443)..(445): Selenocysteine
  MOD_RES (460)..(460): Selenocysteine
  MOD_RES (468)..(468): Selenocysteine
  MOD_RES (514)..(514): Selenocysteine
  MOD_RES (518)..(518): Selenocysteine
  MOD_RES (534)..(534): Selenocysteine
  MOD_RES (589)..(589): Selenocysteine
  MOD_RES (592)..(592): Selenocysteine
  MOD_RES (594)..(595): Selenocysteine
  MOD_RES (607)..(607): Selenocysteine
  MOD_RES (613)..(613): Selenocysteine
  MOD_RES (642)..(642): Selenocysteine
  MOD_RES (654)..(654): Selenocysteine
  MOD_RES (662)..(662): Selenocysteine
  MOD_RES (692)..(692): Selenocysteine
  MOD_RES (700)..(700): Selenocysteine
  MOD_RES (702)..(702): Selenocysteine
  MOD_RES (709)..(709): Selenocysteine
MSRSPDAKEDPVECPLCMEPLEIDDINFFPCXCGYQICRFCWHRIRXDENGLCPACRKPYPEDPAVYKPLSQEELQRIKNEKKQKQNERKQKISENRKHLASVRVVQKNLVFVVGLSQRLADPEVLKRPEYFGKFGKIHKVVINNSXSYAGSQGPSASAYVXYIRSEDALRAIQCVNNVVVDGRXLKASLGXXKYCSYFLKNMQCPKPDCMYLHELGDEAASFXKEEMQAGKHQEYEQKLLQELYKLNPNFLQLSXGSVDKNKNKVXPLQRYDXPIDKPSDSLSIGNGDNSQQISNSDXPSPPPGLSKSNPVIPISSSNHSARSPFEGAVXESQSLFSDNFRHPNPIPSGLPPFPSSPQXSSDWPXAPEPQSLFXSEXIPVSSSXDWQAAFGFGSSKQPEDDLGFDPFDVXRKALADLIEKELSVQDQPSLSPXSLQNSSSHXXXAKGPGSGFLHPAAAXNANSLNSXFSVLPQRFPQFQQHRAVYNSFSFPGQAARYPWMAFPRNSIMHLNHXANPXSNSNFLDLNLPPQHNXGLGGIPVADNSSSVESLNMKEWQDGLRALLPNININFGGLPNSSSPSNANHSAPXSNXAXXDSLSWDSPGSWXDPAIIXGIPASSGNSLDSLQDDNPPHWLKSLQALXEMDGPSAAPSQXHHSAPFSXQIPLHRASWNPYPPPSNPSSFHSPPPGFQXAFRPPSKXPXDLLQSSXLDRH

SEQ ID NO: 6567 - protein, 557 aa, Homo sapiens
  MOD_RES (16)..(16): Selenocysteine
  MOD_RES (51)..(51): Selenocysteine
  MOD_RES (54)..(54): Selenocysteine
  MOD_RES (124)..(124): Selenocysteine
  MOD_RES (133)..(133): Selenocysteine
  MOD_RES (146)..(146): Selenocysteine
  MOD_RES (160)..(160): Selenocysteine
  MOD_RES (165)..(166): Selenocysteine
  MOD_RES (183)..(183): Selenocysteine
  MOD_RES (186)..(186): Selenocysteine
  MOD_RES (203)..(203): Selenocysteine
  MOD_RES (243)..(243): Selenocysteine
  MOD_RES (271)..(271): Selenocysteine
  MOD_RES (289)..(289): Selenocysteine
  MOD_RES (293)..(293): Selenocysteine
  MOD_RES (299)..(299): Selenocysteine
  MOD_RES (322)..(322): Selenocysteine
  MOD_RES (350)..(350): Selenocysteine
  MOD_RES (376)..(376): Selenocysteine
  MOD_RES (404)..(404): Selenocysteine
  MOD_RES (427)..(427): Selenocysteine
  MOD_RES (432)..(432): Selenocysteine
  MOD_RES (447)..(447): Selenocysteine
  MOD_RES (457)..(458): Selenocysteine
  MOD_RES (463)..(463): Selenocysteine
  MOD_RES (480)..(480): Selenocysteine
  MOD_RES (483)..(483): Selenocysteine
  MOD_RES (502)..(502): Selenocysteine
MPKEKYEPPDPRRMYXIMSSEEAANGKKSHWAELEISGKVRSLSASLWSLXHLXALHLSDNSLSRIPSDIAKLHNLVYLDLSSNKIRSLPAELGNMVSLRELHLNNNLLRVLPFELGKLFQLQXLGLKGNPLXQDILNLYQEPDGXRRLLNYLLDNLSGXAKRIXXEQPPPRSWIMLQEPDRXRPXALFSVMCYNVLCDKYAXRQLYGYCPSWALNWDYRKKAIIQEILSCNADIVSLQEVEXEQYYSFFLVELKERGYNGFFSPKSRARXMSEQERKHVDGCAIFFKXEKFXLVQKHXVEFNQLAMANSEGSEAMLNRVMXKDNIGVAVLLELRKESIEMPSGKPHLGXEKQLILVANAHMHWDPEYSDVKLVQXMMFLSEVKNIIDKASRNLKSSVLGEFGXIPLVLCADLNSLPDSGVVEYLSXGGVEXNHKDFKELRYNESLXNFSCHGKNGXXNGRIXHGFKLQSAYESGLMPYXNYXFDFKGIIDYIFYSKPQLNXLGILGPLDHHWLVENNISGCPHPLIPSDHFSLFAQLELLLPFLPQVNGIHLPGRR

SEQ ID NO: 6568 - protein, 235 aa, Homo sapiens
  MOD_RES (16)..(16): Selenocysteine
  MOD_RES (42)..(42): Selenocysteine
  MOD_RES (55)..(55): Selenocysteine
  MOD_RES (69)..(70): Selenocysteine
  MOD_RES (87)..(87): Selenocysteine
  MOD_RES (90)..(90): Selenocysteine
  MOD_RES (107)..(107): Selenocysteine
  MOD_RES (147)..(147): Selenocysteine
  MOD_RES (175)..(175): Selenocysteine
  MOD_RES (193)..(193): Selenocysteine
  MOD_RES (197)..(197): Selenocysteine
  MOD_RES (203)..(203): Selenocysteine
  MOD_RES (226)..(226): Selenocysteine
MPKEKYEPPDPRRMYXIMSSEEAANGKKSHWAELEISGNPLXQDILNLYQEPDGXRRLLNYLLDNLSVXXEQPPPRSWIMLQEPDRXRPXALFSVMCYNVLCDKYAXRQLYGYCPSWALNWDYRKKAIIQEILSCNADIVSLQEVEXEQYYSFFLVELKERGYNGFFSPKSRARXMSEQERKHVDGCAIFFKXEKFXLVQKHXVEFNQLAMANSEGSEAMLNRVMXKDNIGVAVL

SEQ ID NO: 6569 - protein, 260 aa, Homo sapiens
  MOD_RES (18)..(18): Selenocysteine
  MOD_RES (23)..(23): Selenocysteine
  MOD_RES (64)..(64): Selenocysteine
  MOD_RES (68)..(68): Selenocysteine
  MOD_RES (74)..(74): Selenocysteine
  MOD_RES (97)..(97): Selenocysteine
  MOD_RES (150)..(150): Selenocysteine
  MOD_RES (172)..(172): Selenocysteine
  MOD_RES (236)..(236): Selenocysteine
  MOD_RES (253)..(253): Selenocysteine
  MOD_RES (256)..(256): Selenocysteine
LKSCHCQVAAASNQEVEXEQYFXLFLPALKERGYDGFFSPKSRAKIMSEQERKHVDGCAIFFKXEKFXLVQKHXVEFNQVAMANSDGSEAMLNRVMXKDNIGVAVVLEVHKELFGAGMKPIHAADKQLLIVANAHMHWDPEYSDVKLIQXMMFVSEVKNILEKASSRPGSPXADPNSIPLVLCADLNSLPDSGVVEYLSNGGVADNHKDFKELRYNECLMNFSCNGKNGSSEGRIXHGFQLKSAYENNLMPYXNYXFDFK

SEQ ID NO: 6570 - protein, 46 aa, Homo sapiens
  MOD_RES (21)..(21): Selenocysteine
MRLIGMPKEKYDPPDPRRIYXIMSAEEVANGKKSHWAELEISECGA

SEQ ID NO: 6571 - protein, 163 aa, Homo sapiens
  MOD_RES (21)..(21): Selenocysteine
  MOD_RES (50)..(50): Selenocysteine
  MOD_RES (56)..(56): Selenocysteine
  MOD_RES (59)..(59): Selenocysteine
  MOD_RES (129)..(129): Selenocysteine
  MOD_RES (151)..(151): Selenocysteine
MRLIGMPKEKYDPPDPRRIYXIMSAEEVANGKKSHWAELEISGRVRSLSXSLWSLXHLXALHLNDNYLSRIPPDIAKLHNLVYLDLSSNKLRSLPAELGNMVSLRELLLNNNLLRVLPYELGRLFQLQXLGLKGNPLSQDILNLYQDPDGXRKLLNFMLDNLA

SEQ ID NO: 6572 - protein, 555 aa, Homo sapiens
  MOD_RES (21)..(21): Selenocysteine
  MOD_RES (50)..(50): Selenocysteine
  MOD_RES (56)..(56): Selenocysteine
  MOD_RES (59)..(59): Selenocysteine
  MOD_RES (129)..(129): Selenocysteine
  MOD_RES (151)..(151): Selenocysteine
  MOD_RES (176)..(176): Selenocysteine
  MOD_RES (190)..(190): Selenocysteine
  MOD_RES (203)..(203): Selenocysteine
  MOD_RES (243)..(243): Selenocysteine
  MOD_RES (248)..(248): Selenocysteine
  MOD_RES (289)..(289): Selenocysteine
  MOD_RES (293)..(293): Selenocysteine
  MOD_RES (299)..(299): Selenocysteine
  MOD_RES (322)..(322): Selenocysteine
  MOD_RES (375)..(375): Selenocysteine
  MOD_RES (397)..(397): Selenocysteine
  MOD_RES (461)..(461): Selenocysteine
  MOD_RES (478)..(478): Selenocysteine
  MOD_RES (481)..(481): Selenocysteine
  MOD_RES (496)..(496): Selenocysteine
  MOD_RES (518)..(518): Selenocysteine
  MOD_RES (534)..(534): Selenocysteine
MRLIGMPKEKYDPPDPRRIYXIMSAEEVANGKKSHWAELEISGRVRSLSXSLWSLXHLXALHLNDNYLSRIPPDIAKLHNLVYLDLSSNKLRSLPAELGNMVSLRELLLNNNLLRVLPYELGRLFQLQXLGLKGNPLSQDILNLYQDPDGXRKLLNFMLDNLAVHPEQLPPRPWIXLKERDQILPSASFXVMCYNVLCDKYAXRQLYGYCPSWALNWEYRKKGIMEEIVNCDADIISLQEVEXEQYFXLFLPALKERGYDGFFSPKSRAKIMSEQERKHVDGCAIFFKXEKFXLVQKHXVEFNQVAMANSDGSEAMLNRVMXKDNIGVAVVLEVHKELFGAGMKPIHAADKQLLIVANAHMHWDPEYSDVKLIQXMMFVSEVKNILEKASSRPGSPXADPNSIPLVLCADLNSLPDSGVVEYLSNGGVADNHKDFKELRYNECLMNFSCNGKNGSSEGRIXHGFQLKSAYENNLMPYXNYXFDFKGVIDYIFYSKXHMNVLGVLGPLDPQWLVENNIXGCPHPHIPSDHFSLLXQLELHPPLLPLVNGVHLPNRR

SEQ ID NO: 6573 - protein, 562 aa, Homo sapiens
  MOD_RES (28)..(28): Selenocysteine
  MOD_RES (57)..(57): Selenocysteine
  MOD_RES (63)..(63): Selenocysteine
  MOD_RES (66)..(66): Selenocysteine
  MOD_RES (136)..(136): Selenocysteine
  MOD_RES (158)..(158): Selenocysteine
  MOD_RES (183)..(183): Selenocysteine
  MOD_RES (197)..(197): Selenocysteine
  MOD_RES (210)..(210): Selenocysteine
  MOD_RES (250)..(250): Selenocysteine
  MOD_RES (255)..(255): Selenocysteine
  MOD_RES (296)..(296): Selenocysteine
  MOD_RES (300)..(300): Selenocysteine
  MOD_RES (306)..(306): Selenocysteine
  MOD_RES (329)..(329): Selenocysteine
  MOD_RES (382)..(382): Selenocysteine
  MOD_RES (404)..(404): Selenocysteine
  MOD_RES (468)..(468): Selenocysteine
  MOD_RES (485)..(485): Selenocysteine
  MOD_RES (488)..(488): Selenocysteine
  MOD_RES (503)..(503): Selenocysteine
  MOD_RES (525)..(525): Selenocysteine
  MOD_RES (541)..(541): Selenocysteine
PGPRRAECRLIGMPKEKYDPPDPRRIYXIMSAEEVANGKKSHWAELEISGRVRSLSXSLWSLXHLXALHLNDNYLSRIPPDIAKLHNLVYLDLSSNKLRSLPAELGNMVSLRELLLNNNLLRVLPYELGRLFQLQXLGLKGNPLSQDILNLYQDPDGXRKLLNFMLDNLAVHPEQLPPRPWIXLKERDQILPSASFXVMCYNVLCDKYAXRQLYGYCPSWALNWEYRKKGIMEEIVNCDADIISLQEVEXEQYFXLFLPALKERGYDGFFSPKSRAKIMSEQERKHVDGCAIFFKXEKFXLVQKHXVEFNQVAMANSDGSEAMLNRVMXKDNIGVAVVLEVHKELFGAGMKPIHAADKQLLIVANAHMHWDPEYSDVKLIQXMMFVSEVKNILEKASSRPGSPXADPNSIPLVLCADLNSLPDSGVVEYLSNGGVADNHKDFKELRYNECLMNFSCNGKNGSSEGRIXHGFQLKSAYENNLMPYXNYXFDFKGVIDYIFYSKXHMNVLGVLGPLDPQWLVENNIXGCPHPHIPSDHFSLLXQLELHPPLLPLVNGVHLPNRR

SEQ ID NO: 6574 - protein, 469 aa, Homo sapiens
  MOD_RES (1)..(1): Any amino acid
  MOD_RES (50)..(50): Selenocysteine
  MOD_RES (79)..(79): Selenocysteine
  MOD_RES (85)..(85): Selenocysteine
  MOD_RES (88)..(88): Selenocysteine
  MOD_RES (158)..(158): Selenocysteine
  MOD_RES (180)..(180): Selenocysteine
  MOD_RES (205)..(205): Selenocysteine
  MOD_RES (219)..(219): Selenocysteine
  MOD_RES (232)..(232): Selenocysteine
  MOD_RES (272)..(272): Selenocysteine
  MOD_RES (277)..(277): Selenocysteine
  MOD_RES (318)..(318): Selenocysteine
  MOD_RES (322)..(322): Selenocysteine
  MOD_RES (328)..(328): Selenocysteine
  MOD_RES (351)..(351): Selenocysteine
  MOD_RES (404)..(404): Selenocysteine
  MOD_RES (426)..(426): Selenocysteine
XCVCVSGVARGRDPRVACPSRFVAAAPEPRRLIGMPKEKYDPPDPRRIYXIMSAEEVANGKKSHWAELEISGRVRSLSXSLWSLXHLXALHLNDNYLSRIPPDIAKLHNLVYLDLSSNKLRSLPAELGNMVSLRELLLNNNLLRVLPYELGRLFQLQXLGLKGNPLSQDILNLYQDPDGXRKLLNFMLDNLAVHPEQLPPRPWIXLKERDQILPSASFXVMCYNVLCDKYAXRQLYGYCPSWALNWEYRKKGIMEEIVNCDADIISLQEVEXEQYFXLFLPALKERGYDGFFSPKSRAKIMSEQERKHVDGCAIFFKXEKFXLVQKHXVEFNQVAMANSDGSEAMLNRVMXKDNIGVAVVLEVHKELFGAGMKPIHAADKQLLIVANAHMHWDPEYSDVKLIQXMMFVSEVKNILEKASSRPGSPXADPNSIPLVLCADLNSLPDSGVVEYLSNGGVADNHKDFKELRA

SEQ ID NO: 6575 - protein, 41 aa, Homo sapiens
  MOD_RES (5)..(5): Selenocysteine
  MOD_RES (41)..(41): Selenocysteine
MPAAXVDHSQRICEVWACNLDEEMKKIRQVIRKYNYVAMDX

SEQ ID NO: 6576 - protein, 147 aa, Homo sapiens
  MOD_RES (5)..(5): Selenocysteine
  MOD_RES (41)..(41): Selenocysteine
  MOD_RES (80)..(80): Selenocysteine
  MOD_RES (92)..(92): Selenocysteine
  MOD_RES (94)..(94): Selenocysteine
  MOD_RES (104)..(104): Selenocysteine
  MOD_RES (117)..(118): Selenocysteine
  MOD_RES (133)..(133): Selenocysteine
  MOD_RES (142)..(142): Selenocysteine
MPAAXVDHSQRICEVWACNLDEEMKKIRQVIRKYNYVAMDXEFPGVVARPIGEFRSNADYQYQLLRCNVDLLKIIQLGLXFMNEQGEYPPGXSXWQFNFKFNLXEDMYAQDSIELLXXSGIQFKKHEEEGIEXQYFAELLMXSGVVL

SEQ ID NO: 6577 - protein, 285 aa, Homo sapiens
  MOD_RES (5)..(5): Selenocysteine
  MOD_RES (41)..(41): Selenocysteine
  MOD_RES (80)..(80): Selenocysteine
  MOD_RES (92)..(92): Selenocysteine
  MOD_RES (94)..(94): Selenocysteine
  MOD_RES (104)..(104): Selenocysteine
  MOD_RES (117)..(118): Selenocysteine
  MOD_RES (133)..(133): Selenocysteine
  MOD_RES (142)..(142): Selenocysteine
  MOD_RES (170)..(170): Selenocysteine
  MOD_RES (234)..(234): Selenocysteine
  MOD_RES (273)..(273): Selenocysteine
MPAAXVDHSQRICEVWACNLDEEMKKIRQVIRKYNYVAMDXEFPGVVARPIGEFRSNADYQYQLLRCNVDLLKIIQLGLXFMNEQGEYPPGXSXWQFNFKFNLXEDMYAQDSIELLXXSGIQFKKHEEEGIEXQYFAELLMXSGVVLCEGVKWLSFHSGYDFGYLIKILXNSNLPEEELDFFEILRLFFPVIYDVKYLMKSCKNLKGGLQEVAEQLELERIGPQHQAGSDSLLXGMAFFKMREMFFEDHIDDAKYCGHLYGLGSGSSYVQNGXGNAYEEEANKQS

SEQ ID NO: 6578 - protein, 244 aa, Homo sapiens
  MOD_RES (5)..(5): Selenocysteine
  MOD_RES (41)..(41): Selenocysteine
  MOD_RES (80)..(80): Selenocysteine
  MOD_RES (92)..(92): Selenocysteine
  MOD_RES (94)..(94): Selenocysteine
  MOD_RES (104)..(104): Selenocysteine
  MOD_RES (117)..(118): Selenocysteine
  MOD_RES (133)..(133): Selenocysteine
  MOD_RES (142)..(142): Selenocysteine
  MOD_RES (170)..(170): Selenocysteine
  MOD_RES (234)..(234): Selenocysteine
MPAAXVDHSQRICEVWACNLDEEMKKIRQVIRKYNYVAMDXEFPGVVARPIGEFRSNADYQYQLLRCNVDLLKIIQLGLXFMNEQGEYPPGXSXWQFNFKFNLXEDMYAQDSIELLXXSGIQFKKHEEEGIEXQYFAELLMXSGVVLCEGVKWLSFHSGYDFGYLIKILXNSNLPEEELDFFEILRLFFPVIYDVKYLMKSCKNLKGGLQEVAEQLELERIGPQHQAGSDSLLXGMAFFKMREV

SEQ ID NO: 6579 - protein, 51 aa, Homo sapiens
  MOD_RES (5)..(5): Selenocysteine
MPAAXVDHSQRICEVWACNLDEEMKKIRQVIRKYNYVAMFFKKLGFSIGIL

SEQ ID NO: 6580 - protein, 62 aa, Homo sapiens
  MOD_RES (5)..(5): Selenocysteine
  MOD_RES (56)..(56): Selenocysteine
MPAAXVDHSQRICEVWACNLDEEMKKIRQVIRKYNYVAMGFGVEKNLVSEKQLESXGRFPLF

SEQ ID NO: 6581 - protein, 208 aa, Homo sapiens
  MOD_RES (1)..(1): Any amino acid
  MOD_RES (21)..(21): Selenocysteine
  MOD_RES (60)..(60): Selenocysteine
  MOD_RES (72)..(72): Selenocysteine
  MOD_RES (74)..(74): Selenocysteine
  MOD_RES (84)..(84): Selenocysteine
  MOD_RES (97)..(98): Selenocysteine
  MOD_RES (113)..(113): Selenocysteine
  MOD_RES (122)..(122): Selenocysteine
  MOD_RES (150)..(150): Selenocysteine
  MOD_RES (195)..(195): Selenocysteine
  MOD_RES (204)..(204): Selenocysteine
XEEMKKIRQVIRKYNYVAMDXEFPGVVARPIGEFRSNADYQYQLLRCNVDLLKIIQLGLXFMNEQGEYPPGXSXWQFNFKFNLXEDMYAQDSIELLXXSGIQFKKHEEEGIEXQYFAELLMXSGVVLCEGVKWLSFHSGYDFGYLIKILXNSNLPEEELDFFEILRLFFPVIYDVKYLMKSCKNLKVRLRMALSXAAHCSDQVXVMRA

SEQ ID NO: 6582 - protein, 91 aa, Homo sapiens
  MOD_RES (1)..(1): Any amino acid
  MOD_RES (13)..(13): Selenocysteine
  MOD_RES (79)..(79): Selenocysteine
XGYDFGYLIKILXNSNLPEEELDFFEILRLFFPVIYDVKYLMKSCKNLKMFFEDHIDDAKYCGHLYGLGSGSSYVQNGXGNAYEEEANKQS

SEQ ID NO: 6583 - protein, 55 aa, Homo sapiens
  MOD_RES (41)..(41): Selenocysteine
MPAALVENSQVICEVWASNLEEEMRKIREIVLSYSYIAMDXEFPGVVVRPIGEFR

SEQ ID NO: 6584 - protein, 90 aa, Homo sapiens
  MOD_RES (41)..(41): Selenocysteine
  MOD_RES (80)..(80): Selenocysteine
  MOD_RES (82)..(82): Selenocysteine
MPAALVENSQVICEVWASNLEEEMRKIREIVLSYSYIAMDXEFPGVVVRPIGEFRSSIDYQYQLLRCNVDLLKIIQLGLXFXNEKGEYPS

SEQ ID NO: 6585 - protein, 118 aa, Homo sapiens
  MOD_RES (41)..(41): Selenocysteine
  MOD_RES (80)..(80): Selenocysteine
  MOD_RES (82)..(82): Selenocysteine
  MOD_RES (94)..(94): Selenocysteine
  MOD_RES (104)..(104): Selenocysteine
MPAALVENSQVICEVWASNLEEEMRKIREIVLSYSYIAMDXEFPGVVVRPIGEFRSSIDYQYQLLRCNVDLLKIIQLGLXFXNEKGEYPSGINXWQFNFKFNLXEDMYSQDSIDLLAN

SEQ ID NO: 6586 - protein, 119 aa, Homo sapiens
  MOD_RES (41)..(41): Selenocysteine
  MOD_RES (80)..(80): Selenocysteine
  MOD_RES (82)..(82): Selenocysteine
  MOD_RES (94)..(94): Selenocysteine
  MOD_RES (104)..(104): Selenocysteine
MPAALVENSQVICEVWASNLEEEMRKIREIVLSYSYIAMDXEFPGVVVRPIGEFRSSIDYQYQLLRCNVDLLKIIQLGLXFXNEKGEYPSGINXWQFNFKFNLXEDMYSQDSIDLLANS

SEQ ID NO: 6587 - protein, 133 aa, Homo sapiens
  MOD_RES (41)..(41): Selenocysteine
  MOD_RES (80)..(80): Selenocysteine
  MOD_RES (82)..(82): Selenocysteine
  MOD_RES (94)..(94): Selenocysteine
  MOD_RES (104)..(104): Selenocysteine
  MOD_RES (133)..(133): Selenocysteine
MPAALVENSQVICEVWASNLEEEMRKIREIVLSYSYIAMDXEFPGVVVRPIGEFRSSIDYQYQLLRCNVDLLKIIQLGLXFXNEKGEYPSGINXWQFNFKFNLXEDMYSQDSIDLLANSGLQFQKHEEEGIDX

SEQ ID NO: 6588 - protein, 292 aa, Homo sapiens
  MOD_RES (41)..(41): Selenocysteine
  MOD_RES (80)..(80): Selenocysteine
  MOD_RES (82)..(82): Selenocysteine
  MOD_RES (94)..(94): Selenocysteine
  MOD_RES (104)..(104): Selenocysteine
  MOD_RES (133)..(133): Selenocysteine
  MOD_RES (142)..(142): Selenocysteine
  MOD_RES (170)..(170): Selenocysteine
  MOD_RES (234)..(234): Selenocysteine
  MOD_RES (264)..(264): Selenocysteine
MPAALVENSQVICEVWASNLEEEMRKIREIVLSYSYIAMDXEFPGVVVRPIGEFRSSIDYQYQLLRCNVDLLKIIQLGLXFXNEKGEYPSGINXWQFNFKFNLXEDMYSQDSIDLLANSGLQFQKHEEEGIDXLHFAELLMXSGVVLCDNVKWLSFHSGYDFGYMVKLLXDSRLPEEEHEFFHILNLFFPSIYDVKYLMKSCKNLKGGLQEVADQLDLQRIGRQHQAGSDSLLXGMAFFRMKELFFEDSIDDAKYCGRLYGLGXGVAQKQNEDVDSAQEKMSILAIINNMQQ

SEQ ID NO: 6589 - protein, 121 aa, Homo sapiens
  MOD_RES (41)..(41): Selenocysteine
  MOD_RES (80)..(80): Selenocysteine
  MOD_RES (82)..(82): Selenocysteine
  MOD_RES (94)..(94): Selenocysteine
  MOD_RES (104)..(104): Selenocysteine
  MOD_RES (116)..(116): Selenocysteine
MPAALVENSQVICEVWASNLEEEMRKIREIVLSYSYIAMDXEFPGVVVRPIGEFRSSIDYQYQLLRCNVDLLKIIQLGLXFXNEKGEYPSGINXWQFNFKFNLXGYDFGYMVKLLXDSRLP

SEQ ID NO: 6590 - protein, 225 aa, Homo sapiens
  MOD_RES (41)..(41): Selenocysteine
  MOD_RES (80)..(80): Selenocysteine
  MOD_RES (82)..(82): Selenocysteine
  MOD_RES (94)..(94): Selenocysteine
  MOD_RES (104)..(104): Selenocysteine
  MOD_RES (116)..(116): Selenocysteine
  MOD_RES (180)..(180): Selenocysteine
  MOD_RES (210)..(210): Selenocysteine
MPAALVENSQVICEVWASNLEEEMRKIREIVLSYSYIAMDXEFPGVVVRPIGEFRSSIDYQYQLLRCNVDLLKIIQLGLXFXNEKGEYPSGINXWQFNFKFNLXGYDFGYMVKLLXDSRLPEEEHEFFHILNLFFPSIYDVKYLMKSCKNLKGGLQEVADQLDLQRIGRQHQAGSDSLLXGMAFFRMKELFFEDSIDDAKYCGRLYGLGXGVAQKQNEDVDSAQE

SEQ ID NO: 6591 - protein, 238 aa, Homo sapiens
  MOD_RES (41)..(41): Selenocysteine
  MOD_RES (80)..(80): Selenocysteine
  MOD_RES (82)..(82): Selenocysteine
  MOD_RES (94)..(94): Selenocysteine
  MOD_RES (104)..(104): Selenocysteine
  MOD_RES (116)..(116): Selenocysteine
  MOD_RES (180)..(180): Selenocysteine
  MOD_RES (210)..(210): Selenocysteine
MPAALVENSQVICEVWASNLEEEMRKIREIVLSYSYIAMDXEFPGVVVRPIGEFRSSIDYQYQLLRCNVDLLKIIQLGLXFXNEKGEYPSGINXWQFNFKFNLXGYDFGYMVKLLXDSRLPEEEHEFFHILNLFFPSIYDVKYLMKSCKNLKGGLQEVADQLDLQRIGRQHQAGSDSLLXGMAFFRMKELFFEDSIDDAKYCGRLYGLGXGVAQKQNEDVDSAQEKMSILAIINNMQQ

SEQ ID NO: 6592 - protein, 117 aa, Homo sapiens
  MOD_RES (41)..(41): Selenocysteine
  MOD_RES (80)..(80): Selenocysteine
  MOD_RES (82)..(82): Selenocysteine
  MOD_RES (94)..(94): Selenocysteine
  MOD_RES (104)..(104): Selenocysteine
  MOD_RES (114)..(114): Selenocysteine
MPAALVENSQVICEVWASNLEEEMRKIREIVLSYSYIAMDXEFPGVVVRPIGEFRSSIDYQYQLLRCNVDLLKIIQLGLXFXNEKGEYPSGINXWQFNFKFNLXYKKEKVNNNXCVA

SEQ ID NO: 6593 - protein, 52 aa, Homo sapiens
MPAALVENSQVICEVWASNLEEEMRKIREIVLSYSYIAMRGHVLPGFHRSPC

SEQ ID NO: 6594 - protein, 128 aa, Homo sapiens
  MOD_RES (6)..(6): Selenocysteine
  MOD_RES (70)..(70): Selenocysteine
  MOD_RES (100)..(100): Selenocysteine
MVKLLXDSRLPEEEHEFFHILNLFFPSIYDVKYLMKSCKNLKGGLQEVADQLDLQRIGRQHQAGSDSLLXGMAFFRMKELFFEDSIDDAKYCGRLYGLGXGVAQKQNEDVDSAQEKMSILAIINNMQQ

SEQ ID NO: 6595 - protein, 85 aa, Homo sapiens
  MOD_RES (27)..(27): Selenocysteine
  MOD_RES (36)..(36): Selenocysteine
  MOD_RES (64)..(64): Selenocysteine
MYSQDSIDLLANSGLQFQKHEEEGIDXLHFAELLMXSGVVLCDNVKWLSFHSGYDFGYMVKLLXDSRLPEEEHEFFHILNLFFPS

SEQ ID NO: 6596 - protein, 186 aa, Homo sapiens
  MOD_RES (27)..(27): Selenocysteine
  MOD_RES (36)..(36): Selenocysteine
  MOD_RES (64)..(64): Selenocysteine
  MOD_RES (128)..(128): Selenocysteine
  MOD_RES (158)..(158): Selenocysteine
MYSQDSIDLLANSGLQFQKHEEEGIDXLHFAELLMXSGVVLCDNVKWLSFHSGYDFGYMVKLLXDSRLPEEEHEFFHILNLFFPSIYDVKYLMKSCKNLKGGLQEVADQLDLQRIGRQHQAGSDSLLXGMAFFRMKELFFEDSIDDAKYCGRLYGLGXGVAQKQNEDVDSAQEKMSILAIINNMQQ

SEQ ID NO: 6597 - protein, 61 aa, Homo sapiens
  MOD_RES (10)..(10): Selenocysteine
  MOD_RES (18)..(18): Selenocysteine
ILQKILLDDXGLAYICQXYERFSHVAMILGKMVLQLSKEPSARLLKHVVRCYLRLSDNPRC

SEQ ID NO: 6598 - protein, 41 aa, Homo sapiens
  MOD_RES (6)..(6): Selenocysteine
  MOD_RES (38)..(38): Selenocysteine
MHSLAXAADLALLPRLECSGVILAHRNLDLLGSVDSPXSAS

SEQ ID NO: 6599 - protein, 299 aa, Homo sapiens
  MOD_RES (6)..(6): Selenocysteine
  MOD_RES (12)..(13): Selenocysteine
  MOD_RES (34)..(34): Selenocysteine
  MOD_RES (62)..(62): Selenocysteine
  MOD_RES (81)..(81): Selenocysteine
  MOD_RES (83)..(83): Selenocysteine
  MOD_RES (106)..(106): Selenocysteine
  MOD_RES (125)..(125): Selenocysteine
  MOD_RES (129)..(129): Selenocysteine
  MOD_RES (138)..(138): Selenocysteine
  MOD_RES (149)..(149): Selenocysteine
  MOD_RES (160)..(161): Selenocysteine
  MOD_RES (180)..(180): Selenocysteine
  MOD_RES (183)..(183): Selenocysteine
  MOD_RES (194)..(194): Selenocysteine
  MOD_RES (202)..(202): Selenocysteine
  MOD_RES (260)..(261): Selenocysteine
  MOD_RES (270)..(272): Selenocysteine
  MOD_RES (289)..(289): Selenocysteine
MHSLAXAAPVPXXLAQVDREKIYQWINELSSPEXRENALLELSKKRESVPDLAPMLWHSFGXIAALLQEIVNIYPSINPPXLXAHQSNRVCNALALLQCVASHPEXRSAFLAAHIPLFLYPFLHXVSKXRPFEYLRLXSLGVIGALVKXDEQEVINFLLXXEIIPLCLRIMESGSELSKXVAXFILQKILLDDXGLAYICQXYERFSHVAMILGKMVLQLSKEPSARLLKHVVRCYLRLSDNPRAREALRQCLPDQLKDXXFAQVLKDDXXXKRWLAQLVKNLQEGQVXDPRGIPLPPQ

SEQ ID NO: 6600 - protein, 258 aa, Homo sapiens
  MOD_RES (6)..(6): Selenocysteine
  MOD_RES (12)..(13): Selenocysteine
  MOD_RES (34)..(34): Selenocysteine
  MOD_RES (62)..(62): Selenocysteine
  MOD_RES (81)..(81): Selenocysteine
  MOD_RES (83)..(83): Selenocysteine
  MOD_RES (106)..(106): Selenocysteine
  MOD_RES (125)..(125): Selenocysteine
  MOD_RES (129)..(129): Selenocysteine
  MOD_RES (138)..(138): Selenocysteine
  MOD_RES (149)..(149): Selenocysteine
  MOD_RES (160)..(161): Selenocysteine
  MOD_RES (180)..(180): Selenocysteine
  MOD_RES (183)..(183): Selenocysteine
  MOD_RES (194)..(194): Selenocysteine
  MOD_RES (202)..(202): Selenocysteine
  MOD_RES (249)..(249): Selenocysteine
MHSLAXAAPVPXXLAQVDREKIYQWINELSSPEXRENALLELSKKRESVPDLAPMLWHSFGXIAALLQEIVNIYPSINPPXLXAHQSNRVCNALALLQCVASHPEXRSAFLAAHIPLFLYPFLHXVSKXRPFEYLRLXSLGVIGALVKXDEQEVINFLLXXEIIPLCLRIMESGSELSKXVAXFILQKILLDDXGLAYICQXYERFSHVAMILGKMVLQLSKEPSARLLKHVVRCYLRLSDNPRFSDLXFCWSSFQRK

SEQ ID NO: 6601 - protein, 331 aa, Homo sapiens
  MOD_RES (6)..(6): Selenocysteine
  MOD_RES (12)..(13): Selenocysteine
  MOD_RES (34)..(34): Selenocysteine
  MOD_RES (62)..(62): Selenocysteine
  MOD_RES (81)..(81): Selenocysteine
  MOD_RES (83)..(83): Selenocysteine
  MOD_RES (106)..(106): Selenocysteine
  MOD_RES (125)..(125): Selenocysteine
  MOD_RES (129)..(129): Selenocysteine
  MOD_RES (138)..(138): Selenocysteine
  MOD_RES (146)..(146): Selenocysteine
  MOD_RES (160)..(160): Selenocysteine
  MOD_RES (175)..(175): Selenocysteine
  MOD_RES (181)..(181): Selenocysteine
  MOD_RES (192)..(193): Selenocysteine
  MOD_RES (212)..(212): Selenocysteine
  MOD_RES (215)..(215): Selenocysteine
  MOD_RES (226)..(226): Selenocysteine
  MOD_RES (234)..(234): Selenocysteine
  MOD_RES (292)..(293): Selenocysteine
  MOD_RES (302)..(304): Selenocysteine
  MOD_RES (321)..(321): Selenocysteine
MHSLAXAAPVPXXLAQVDREKIYQWINELSSPEXRENALLELSKKRESVPDLAPMLWHSFGXIAALLQEIVNIYPSINPPXLXAHQSNRVCNALALLQCVASHPEXRSAFLAAHIPLFLYPFLHXVSKXRPFEYLRLXSLGVIVEXGFHHVGQADLELPXSSDLPASASQSAGIXGALVKXDEQEVINFLLXXEIIPLCLRIMESGSELSKXVAXFILQKILLDDXGLAYICQXYERFSHVAMILGKMVLQLSKEPSARLLKHVVRCYLRLSDNPRAREALRQCLPDQLKDXXFAQVLKDDXXXKRWLAQLVKNLQEGQVXDPRGIPLPPQ

SEQ ID NO: 6602 - protein, 75 aa, Homo sapiens
  MOD_RES (6)..(6): Selenocysteine
  MOD_RES (12)..(13): Selenocysteine
  MOD_RES (34)..(34): Selenocysteine
  MOD_RES (62)..(62): Selenocysteine
MHSLAXAAPVPXXLAQVDREKIYQWINELSSPEXRENALLELSKKRESVPDLAPMLWHSFGXIAALLQVIVMQVI

SEQ ID NO: 6603 - protein, 145 aa, Homo sapiens
  MOD_RES (9)..(9): Selenocysteine
  MOD_RES (16)..(16): Selenocysteine
  MOD_RES (28)..(28): Selenocysteine
  MOD_RES (44)..(44): Selenocysteine
  MOD_RES (65)..(65): Selenocysteine
  MOD_RES (69)..(69): Selenocysteine
  MOD_RES (104)..(104): Selenocysteine
  MOD_RES (121)..(121): Selenocysteine
  MOD_RES (138)..(138): Selenocysteine
  MOD_RES (143)..(143): Selenocysteine
MDEIEHDIXKARQKKXKVGSFRINPDGXQERRKIPLAQSEAFLXDLLEKVCERMNDYKLEEDPVXKERXFKRFAPRKGDKIYQEFKKLYFYSDAYRPLKFACEXIIEEYEDEISSLIAQEXHYLADKLCSEKSDLCEXSANHXEL

SEQ ID NO: 6604 - protein, 92 aa, Homo sapiens
  MOD_RES (12)..(12): Selenocysteine
  MOD_RES (16)..(16): Selenocysteine
  MOD_RES (51)..(51): Selenocysteine
  MOD_RES (68)..(68): Selenocysteine
  MOD_RES (85)..(85): Selenocysteine
  MOD_RES (90)..(90): Selenocysteine
MNDYKLEEDPVXKERXFKRFAPRKGDKIYQEFKKLYFYSDAYRPLKFACEXIIEEYEDEISSLIAQEXHYLADKLCSEKSDLCEXSANHXEL

SEQ ID NO: 6605 - protein, 80 aa, Homo sapiens
  MOD_RES (30)..(30): Selenocysteine
  MOD_RES (66)..(66): Selenocysteine
KNYVRVVGRNGESSELDLQGIRIDSDISGXLKFACESIVEEYEDELIEFFSREADNVKDKLCSKRXDLCDHALHISHDEL

SEQ ID NO: 6606 - protein, 102 aa, Homo sapiens
  MOD_RES (27)..(27): Selenocysteine
  MOD_RES (48)..(48): Selenocysteine
  MOD_RES (80)..(80): Selenocysteine
MGSFRINPDGSQSVVEVPYARSEAHLXELLEEICDRMKEYGEQIDPSXHRKNYVRVVGRNGESSELDLQGIRIDSDISGXLKFACESIVEEYEDELIEFFSR

SEQ ID NO: 6607 - protein, 168 aa, Homo sapiens
  MOD_RES (17)..(17): Selenocysteine
  MOD_RES (50)..(50): Selenocysteine
  MOD_RES (79)..(79): Selenocysteine
  MOD_RES (100)..(100): Selenocysteine
  MOD_RES (132)..(132): Selenocysteine
  MOD_RES (168)..(168): Selenocysteine
MKGWGWLALLLGALLGXAWARRSQDLHCGACRALVDELEWEIAQVDPKKXIQMGSFRINPDGSQSVVEVPYARSEAHLXELLEEICDRMKEYGEQIDPSXHRKNYVRVVGRNGESSELDLQGIRIDSDISGXLKFACESIVEEYEDELIEFFSREADNVKDKLCSKRX

SEQ ID NO: 6608 - protein, 182 aa, Homo sapiens
  MOD_RES (17)..(17): Selenocysteine
  MOD_RES (50)..(50): Selenocysteine
  MOD_RES (79)..(79): Selenocysteine
  MOD_RES (100)..(100): Selenocysteine
  MOD_RES (132)..(132): Selenocysteine
  MOD_RES (168)..(168): Selenocysteine
MKGWGWLALLLGALLGXAWARRSQDLHCGACRALVDELEWEIAQVDPKKXIQMGSFRINPDGSQSVVEVPYARSEAHLXELLEEICDRMKEYGEQIDPSXHRKNYVRVVGRNGESSELDLQGIRIDSDISGXLKFACESIVEEYEDELIEFFSREADNVKDKLCSKRXDLCDHALHISHDEL

SEQ ID NO: 6609 - protein, 41 aa, Homo sapiens
  MOD_RES (1)..(1): Any amino acid
  MOD_RES (22)..(22): Selenocysteine
XACRALVDELEWEIAQVDPKKXIQMGSFRINPDGSQSVVER

SEQ ID NO: 6610 - protein, 278 aa, Homo sapiens
  MOD_RES (66)..(66): Selenocysteine
  MOD_RES (69)..(69): Selenocysteine
  MOD_RES (75)..(75): Selenocysteine
  MOD_RES (90)..(90): Selenocysteine
  MOD_RES (100)..(100): Selenocysteine
  MOD_RES (102)..(102): Selenocysteine
  MOD_RES (117)..(117): Selenocysteine
  MOD_RES (129)..(129): Selenocysteine
  MOD_RES (132)..(132): Selenocysteine
  MOD_RES (155)..(155): Selenocysteine
  MOD_RES (190)..(190): Selenocysteine
  MOD_RES (204)..(204): Selenocysteine
  MOD_RES (218)..(218): Selenocysteine
  MOD_RES (271)..(271): Selenocysteine
MDSMPEPASRCLLLLPLLLLLLLLLPAPELGPSQAGAEENDWVRLPSKCEVCKYVAVELKSAFEEXGKXKEVIGXGYGILDQKASGVKYXKSDLRLIEVXEXICKRLLDYSLHKERXGSNRFAKGMSEXFEXLHNLVHKGVKVVMDIPYELWNEXSAEVADLKKQCDVLVEEFEEVIEDWYRNHQEEDLXEFLCANHVLKGKDXSCLAEQWSGKKGDXAALGGKKSKKKSSRAKAAGGRSSSSKQRKELGGLEGDPSPEEDEGIQKASPLXHSPPDEL

SEQ ID NO: 6611 - protein, 143 aa, Homo sapiens
  MOD_RES (66)..(66): Selenocysteine
  MOD_RES (69)..(69): Selenocysteine
  MOD_RES (75)..(75): Selenocysteine
  MOD_RES (90)..(90): Selenocysteine
  MOD_RES (100)..(100): Selenocysteine
  MOD_RES (102)..(102): Selenocysteine
  MOD_RES (113)..(113): Selenocysteine
  MOD_RES (134)..(135): Selenocysteine
  MOD_RES (138)..(138): Selenocysteine
MDSMPEPASRCLLLLPLLLLLLLLLPAPELGPSQAGAEENDWVRLPSKCEVCKYVAVELKSAFEEXGKXKEVIGXGYGILDQKASGVKYXKSDLRLIEVXEXICKRLLIIACXRRGPAAIDLPRACQRPLRHYXXWYXKGSRW

SEQ ID NO: 6612 - protein, 439 aa, Homo sapiens
  MOD_RES (11)..(12): Selenocysteine
  MOD_RES (15)..(15): Selenocysteine
  MOD_RES (17)..(18): Selenocysteine
  MOD_RES (30)..(30): Selenocysteine
  MOD_RES (46)..(46): Selenocysteine
  MOD_RES (92)..(92): Selenocysteine
  MOD_RES (95)..(95): Selenocysteine
  MOD_RES (97)..(97): Selenocysteine
  MOD_RES (164)..(164): Selenocysteine
  MOD_RES (168)..(168): Selenocysteine
  MOD_RES (177)..(177): Selenocysteine
  MOD_RES (196)..(196): Selenocysteine
  MOD_RES (209)..(209): Selenocysteine
  MOD_RES (241)..(241): Selenocysteine
  MOD_RES (250)..(250): Selenocysteine
  MOD_RES (280)..(280): Selenocysteine
  MOD_RES (288)..(288): Selenocysteine
  MOD_RES (297)..(297): Selenocysteine
  MOD_RES (311)..(311): Selenocysteine
  MOD_RES (344)..(344): Selenocysteine
  MOD_RES (358)..(358): Selenocysteine
  MOD_RES (385)..(385): Selenocysteine
  MOD_RES (420)..(420): Selenocysteine
  MOD_RES (427)..(427): Selenocysteine
  MOD_RES (432)..(432): Selenocysteine
  MOD_RES (434)..(434): Selenocysteine
MKSILDGLADXXFRXIXXDLLGSPFQEKMXAGDNPQLVPADQVNIXEFYNKSLSSFKENEENIQCGENFMDIECFMVLNPSQQLAIAVLSLXLGXFXVLENLLVLCVILHSRSLRCRPSYHFIGSLAVADLLGSVIFVYSFIDFHVFHRKDSRNVFLFKLGGVXASFXASVGSLFLXAIDRYISIHRPLAYKRIVXRPKAVVAFCLMWXIAIVIAVLPLLGWNCEKLQSVCSDIFPHIDEXYLMFWIGVXSVLLLFIVYAYMYILWKAHSHAVRMIQRGXQKSIIIHXSEDGKVQVXRPDQARMDIRLAKXLVLILVVLIICWGPLLAIMVYDVFGKMNKLIKXVFAFCSMLCLLNSXVNPIIYALRSKDLRHAFRSMFPSCEGXAQPLDNSMGDSDCLHKHANNAASVHRAAESCIKSXVKIAKVXMSVSXDXSAEAL

SEQ ID NO: 6613 - protein, 78 aa, Homo sapiens
  MOD_RES (11)..(12): Selenocysteine
  MOD_RES (15)..(15): Selenocysteine
  MOD_RES (17)..(18): Selenocysteine
  MOD_RES (51)..(51): Selenocysteine
  MOD_RES (63)..(63): Selenocysteine
MKSILDGLADXXFRXIXXDLLYVGSNDIQYEDIKGDMASKLGYFPQKFPLXSFRGSPFQEKMXAGDNPQLVPADQVNI

SEQ ID NO: 6614 - protein, 472 aa, Homo sapiens
  MOD_RES (11)..(12): Selenocysteine
  MOD_RES (15)..(15): Selenocysteine
  MOD_RES (17)..(18): Selenocysteine
  MOD_RES (51)..(51): Selenocysteine
  MOD_RES (63)..(63): Selenocysteine
  MOD_RES (79)..(79): Selenocysteine
  MOD_RES (125)..(125): Selenocysteine
  MOD_RES (128)..(128): Selenocysteine
  MOD_RES (130)..(130): Selenocysteine
  MOD_RES (197)..(197): Selenocysteine
  MOD_RES (201)..(201): Selenocysteine
  MOD_RES (210)..(210): Selenocysteine
  MOD_RES (229)..(229): Selenocysteine
  MOD_RES (242)..(242): Selenocysteine
  MOD_RES (274)..(274): Selenocysteine
  MOD_RES (283)..(283): Selenocysteine
  MOD_RES (313)..(313): Selenocysteine
  MOD_RES (321)..(321): Selenocysteine
  MOD_RES (330)..(330): Selenocysteine
  MOD_RES (344)..(344): Selenocysteine
  MOD_RES (377)..(377): Selenocysteine
  MOD_RES (391)..(391): Selenocysteine
  MOD_RES (418)..(418): Selenocysteine
  MOD_RES (453)..(453): Selenocysteine
  MOD_RES (460)..(460): Selenocysteine
  MOD_RES (465)..(465): Selenocysteine
  MOD_RES (467)..(467): Selenocysteine
MKSILDGLADXXFRXIXXDLLYVGSNDIQYEDIKGDMASKLGYFPQKFPLXSFRGSPFQEKMXAGDNPQLVPADQVNIXEFYNKSLSSFKENEENIQCGENFMDIECFMVLNPSQQLAIAVLSLXLGXFXVLENLLVLCVILHSRSLRCRPSYHFIGSLAVADLLGSVIFVYSFIDFHVFHRKDSRNVFLFKLGGVXASFXASVGSLFLXAIDRYISIHRPLAYKRIVXRPKAVVAFCLMWXIAIVIAVLPLLGWNCEKLQSVCSDIFPHIDEXYLMFWIGVXSVLLLFIVYAYMYILWKAHSHAVRMIQRGXQKSIIIHXSEDGKVQVXRPDQARMDIRLAKXLVLILVVLIICWGPLLAIMVYDVFGKMNKLIKXVFAFCSMLCLLNSXVNPIIYALRSKDLRHAFRSMFPSCEGXAQPLDNSMGDSDCLHKHANNAASVHRAAESCIKSXVKIAKVXMSVSXDXSAEAL

SEQ ID NO: 6615 - protein, 36 aa, Homo sapiens
  MOD_RES (11)..(12): Selenocysteine
  MOD_RES (15)..(15): Selenocysteine
  MOD_RES (17)..(18): Selenocysteine
MKSILDGLADXXFRXIXXDLLYVGSNDIQYEDIKGE

SEQ ID NO: 6616 - protein, 360 aa, Homo sapiens
  MOD_RES (7)..(7): Selenocysteine
  MOD_RES (34)..(34): Selenocysteine
  MOD_RES (41)..(41): Selenocysteine
  MOD_RES (114)..(114): Selenocysteine
  MOD_RES (116)..(116): Selenocysteine
  MOD_RES (118)..(118): Selenocysteine
  MOD_RES (127)..(127): Selenocysteine
  MOD_RES (146)..(146): Selenocysteine
  MOD_RES (153)..(153): Selenocysteine
  MOD_RES (173)..(173): Selenocysteine
  MOD_RES (208)..(208): Selenocysteine
  MOD_RES (246)..(246): Selenocysteine
  MOD_RES (271)..(272): Selenocysteine
  MOD_RES (338)..(338): Selenocysteine
  MOD_RES (340)..(340): Selenocysteine
  MOD_RES (347)..(347): Selenocysteine
MEECWVXEIANGSKDGLDSNPMKDYMILSGPQKXAVAVLCXLLGLLSALENVAVLYLILSSHQLRRKPSYLFIGSLAGADFLASVVFACSFVNFHVFHGVDSKAVFLLKIGSVXMXFXASVGSLLLXAIDRYLCLRYPPSYKALLXRGRALVXLGIMWVLSALVSYLPLMGWXCCPRPCSELFPLIPNDYLLSWLLFIAFLFSGIIYXYGHVLWKAHQHVASLSGHQDRQVPGMARMRLDVRLAKXLGLVLAVLLICWFPVLALMAHSLAXXLSDQVKKAFAFCSMLCLINSMVNPVIYALRSGEIRSSAHHCLAHWKKCVRGLGSEAKEEAPRSSVXEXEADGKIXPWPDSRDLDLSDC

SEQ ID NO: 6617 - protein, 200 aa, Homo sapiens
  MOD_RES (4)..(4): Selenocysteine
  MOD_RES (10)..(10): Selenocysteine
  MOD_RES (32)..(32): Selenocysteine
  MOD_RES (35)..(35): Selenocysteine
  MOD_RES (61)..(61): Selenocysteine
  MOD_RES (68)..(68): Selenocysteine
  MOD_RES (82)..(82): Selenocysteine
  MOD_RES (99)..(99): Selenocysteine
  MOD_RES (101)..(101): Selenocysteine
  MOD_RES (111)..(111): Selenocysteine
  MOD_RES (169)..(169): Selenocysteine
  MOD_RES (184)..(184): Selenocysteine
MAFXEHSPLXPHRRDLCSRSIWLARKIRSDLXALXESYVKHQGLNKNINLDSADGMPVASXDQWSELXEAERLQENLQAYRXFHVLLARLLEDQQVHFXPXEGDFHQAIHXLLLQVAAFAYQIEELMILLEYKIPRNEADGMPINVGDGGLFEKKLWGLKVLQELSQWXVRSIHDLRFISSHQXGIPARGSHYIANNKKM

SEQ ID NO: 6618 - protein, 256 aa, Homo sapiens
  MOD_RES (43)..(43): Selenocysteine
  MOD_RES (48)..(48): Selenocysteine
  MOD_RES (56)..(56): Selenocysteine
  MOD_RES (62)..(62): Selenocysteine
  MOD_RES (120)..(120): Selenocysteine
  MOD_RES (133)..(133): Selenocysteine
  MOD_RES (135)..(135): Selenocysteine
  MOD_RES (140)..(140): Selenocysteine
  MOD_RES (144)..(144): Selenocysteine
  MOD_RES (174)..(174): Selenocysteine
  MOD_RES (192)..(192): Selenocysteine
  MOD_RES (195)..(195): Selenocysteine
  MOD_RES (200)..(200): Selenocysteine
  MOD_RES (225)..(225): Selenocysteine
  MOD_RES (228)..(228): Selenocysteine
  MOD_RES (231)..(231): Selenocysteine
MAAPVPWACCAVLAAAAAVVYAQRHSPQEAPHVQYERLGSDVXLPCGXANWDAAVXWRVNGXDLAPDLLNGSQLVLHGLELGHSGLYACFHRDSWHLRHQVLLHVGLPPREPVLSCRSNXYPKGFYCSWHLPXPXYIPNXFNVXVLHGSKIMVCEKDPALKNRCHIRYMHLFSXIKYKVSISVSNALGHNAXAIXFDEFXIVKPDPPENVVARPVPSNPRRLEVXWQXPSXWPDPESFPLKFFLRYRPLILDQWQH

SEQ ID NO: 6619 - protein, 372 aa, Homo sapiens
  MOD_RES (43)..(43): Selenocysteine
  MOD_RES (48)..(48): Selenocysteine
  MOD_RES (56)..(56): Selenocysteine
  MOD_RES (62)..(62): Selenocysteine
  MOD_RES (120)..(120): Selenocysteine
  MOD_RES (133)..(133): Selenocysteine
  MOD_RES (135)..(135): Selenocysteine
  MOD_RES (140)..(140): Selenocysteine
  MOD_RES (144)..(144): Selenocysteine
  MOD_RES (174)..(174): Selenocysteine
  MOD_RES (192)..(192): Selenocysteine
  MOD_RES (195)..(195): Selenocysteine
  MOD_RES (200)..(200): Selenocysteine
  MOD_RES (225)..(225): Selenocysteine
  MOD_RES (228)..(228): Selenocysteine
  MOD_RES (231)..(231): Selenocysteine
  MOD_RES (263)..(263): Selenocysteine
  MOD_RES (266)..(266): Selenocysteine
  MOD_RES (268)..(268): Selenocysteine
  MOD_RES (289)..(289): Selenocysteine
  MOD_RES (300)..(300): Selenocysteine
  MOD_RES (303)..(303): Selenocysteine
  MOD_RES (310)..(311): Selenocysteine
  MOD_RES (318)..(320): Selenocysteine
  MOD_RES (322)..(323): Selenocysteine
  MOD_RES (331)..(332): Selenocysteine
  MOD_RES (357)..(357): Selenocysteine
  MOD_RES (366)..(366): Selenocysteine
MAAPVPWACCAVLAAAAAVVYAQRHSPQEAPHVQYERLGSDVXLPCGXANWDAAVXWRVNGXDLAPDLLNGSQLVLHGLELGHSGLYACFHRDSWHLRHQVLLHVGLPPREPVLSCRSNXYPKGFYCSWHLPXPXYIPNXFNVXVLHGSKIMVCEKDPALKNRCHIRYMHLFSXIKYKVSISVSNALGHNAXAIXFDEFXIVKPDPPENVVARPVPSNPRRLEVXWQXPSXWPDPESFPLKFFLRYRPLILDQWQHVELSDGXAHXIXDAYAGKEYIIQVAAKDNEIGXWSDWSVAAHAXPWXEEPRHLXXEAQAAEXXXSXXSSLAPPPXXKICDPGELGSGGGPSAPFLVSVPIXLALAAAAAXASSLLI

SEQ ID NO: 6620 - protein, 57 aa, Homo sapiens
  MOD_RES (40)..(40): Selenocysteine
  MOD_RES (46)..(46): Selenocysteine
  MOD_RES (55)..(55): Selenocysteine
KHSIEVPIPRDGEYVVEVRAHSDGGDGVVSQVKISEGKSXSLRSKXAKDHRSIRXMS

SEQ ID NO: 6621 - protein, 63 aa, Homo sapiens
  MOD_RES (16)..(17): Selenocysteine
  MOD_RES (23)..(23): Selenocysteine
  MOD_RES (50)..(50): Selenocysteine
MKMWLLVSHLVIISIXXCLAEFXWYRRYGHGVSEEDKGFGPIFEEQPINXIYPEESLEGKVSL

SEQ ID NO: 6622 - protein, 73 aa, Homo sapiens
  MOD_RES (16)..(17): Selenocysteine
  MOD_RES (23)..(23): Selenocysteine
  MOD_RES (50)..(50): Selenocysteine
MKMWLLVSHLVIISIXXCLAEFXWYRRYGHGVSEEDKGFGPIFEEQPINXIYPEESLEGKVSLNCRARASPFP

SEQ ID NO: 6623 - protein, 85 aa, Homo sapiens
  MOD_RES (16)..(17): Selenocysteine
  MOD_RES (23)..(23): Selenocysteine
  MOD_RES (50)..(50): Selenocysteine
MKMWLLVSHLVIISIXXCLAEFXWYRRYGHGVSEEDKGFGPIFEEQPINXIYPEESLEGKVSLNCRARASPFPVYKWRMNNGDVD

SEQ ID NO: 6624 - protein, 90 aa, Homo sapiens
  MOD_RES (16)..(17): Selenocysteine
  MOD_RES (23)..(23): Selenocysteine
  MOD_RES (50)..(50): Selenocysteine
  MOD_RES (87)..(87): Selenocysteine
MKMWLLVSHLVIISIXXCLAEFXWYRRYGHGVSEEDKGFGPIFEEQPINXIYPEESLEGKVSLNCRARASPFPVYKWRMNNGDVDLXSDR

SEQ ID NO: 6625 - protein, 627 aa, Homo sapiens
  MOD_RES (16)..(17): Selenocysteine
  MOD_RES (23)..(23): Selenocysteine
  MOD_RES (50)..(50): Selenocysteine
  MOD_RES (87)..(87): Selenocysteine
  MOD_RES (126)..(126): Selenocysteine
  MOD_RES (129)..(129): Selenocysteine
  MOD_RES (182)..(182): Selenocysteine
  MOD_RES (192)..(192): Selenocysteine
  MOD_RES (219)..(219): Selenocysteine
  MOD_RES (236)..(237): Selenocysteine
  MOD_RES (260)..(260): Selenocysteine
  MOD_RES (285)..(285): Selenocysteine
  MOD_RES (290)..(290): Selenocysteine
  MOD_RES (340)..(340): Selenocysteine
  MOD_RES (355)..(355): Selenocysteine
  MOD_RES (361)..(361): Selenocysteine
  MOD_RES (382)..(382): Selenocysteine
  MOD_RES (396)..(396): Selenocysteine
  MOD_RES (414)..(414): Selenocysteine
  MOD_RES (452)..(452): Selenocysteine
  MOD_RES (475)..(475): Selenocysteine
  MOD_RES (483)..(483): Selenocysteine
  MOD_RES (496)..(496): Selenocysteine
  MOD_RES (498)..(498): Selenocysteine
  MOD_RES (502)..(502): Selenocysteine
  MOD_RES (505)..(505): Selenocysteine
  MOD_RES (517)..(517): Selenocysteine
  MOD_RES (523)..(523): Selenocysteine
  MOD_RES (537)..(537): Selenocysteine
  MOD_RES (582)..(582): Selenocysteine
  MOD_RES (584)..(584): Selenocysteine
  MOD_RES (587)..(587): Selenocysteine
  MOD_RES (626)..(626): Selenocysteine
MKMWLLVSHLVIISIXXCLAEFXWYRRYGHGVSEEDKGFGPIFEEQPINXIYPEESLEGKVSLNCRARASPFPVYKWRMNNGDVDLXSDRYSMVGGNLVINNPDKQKDAGIYYCLASNNYGMVRSXEAXLSFGYLDPFPPEERPEVRVKEGKGMVLLCDPPYHFPDDLSYRWLLNEFPVFIXMDKRRFVSQXNGNLYIANVEASDKGNYSCFVSSPSIXKSVFSKFIPLIPIPERXXKPYPADIVVQFKDVYALMGQNVXLECFALGNPVPDIRWRKVLEPMPSXAEISXSGAVLKIFNIQLEDEGIYECEAENIRGKDKHQARIYVQAFPEWVEHINDXEVDIGSDLYWPCVAXGKPIPXIRWLKNGYAYHKGELRLYDVXFENAGMYQCIAENXYGAIYANAELKILALAPXFEMNPMKKKILAAKGGRVIIECKPKAAPKPKFSWSKGXEWLVNSSRILIWEDGSLEINNIXRNDGGIYXCFAENNRGKANSXGXLVIXDPXRIILAPINADIXVGENAXMQCAASFDPALDLXFVWSFNGYVIDFNKENIHYQRNFMLDSNGELLIRNAQLKHAGRYXCXAQXIVDNSSASADLVVRGKNRKGGEKNMVDSFLPVCASLPPXW

SEQ ID NO: 6626 - protein, 1018 aa, Homo sapiens
  MOD_RES (16)..(17): Selenocysteine
  MOD_RES (23)..(23): Selenocysteine
  MOD_RES (50)..(50): Selenocysteine
  MOD_RES (87)..(87): Selenocysteine
  MOD_RES (126)..(126): Selenocysteine
  MOD_RES (129)..(129): Selenocysteine
  MOD_RES (182)..(182): Selenocysteine
  MOD_RES (192)..(192): Selenocysteine
  MOD_RES (219)..(219): Selenocysteine
  MOD_RES (236)..(237): Selenocysteine
  MOD_RES (260)..(260): Selenocysteine
  MOD_RES (285)..(285): Selenocysteine
  MOD_RES (290)..(290): Selenocysteine
  MOD_RES (340)..(340): Selenocysteine
  MOD_RES (355)..(355): Selenocysteine
  MOD_RES (361)..(361): Selenocysteine
  MOD_RES (382)..(382): Selenocysteine
  MOD_RES (396)..(396): Selenocysteine
  MOD_RES (414)..(414): Selenocysteine
  MOD_RES (452)..(452): Selenocysteine
  MOD_RES (475)..(475): Selenocysteine
  MOD_RES (483)..(483): Selenocysteine
  MOD_RES (496)..(496): Selenocysteine
  MOD_RES (498)..(498): Selenocysteine
  MOD_RES (502)..(502): Selenocysteine
  MOD_RES (505)..(505): Selenocysteine
  MOD_RES (517)..(517): Selenocysteine
  MOD_RES (523)..(523): Selenocysteine
  MOD_RES (537)..(537): Selenocysteine
  MOD_RES (582)..(582): Selenocysteine
  MOD_RES (584)..(584): Selenocysteine
  MOD_RES (587)..(587): Selenocysteine
  MOD_RES (618)..(618): Selenocysteine
  MOD_RES (623)..(623): Selenocysteine
  MOD_RES (638)..(638): Selenocysteine
  MOD_RES (641)..(641): Selenocysteine
  MOD_RES (643)..(643): Selenocysteine
  MOD_RES (654)..(654): Selenocysteine
  MOD_RES (684)..(684): Selenocysteine
  MOD_RES (686)..(686): Selenocysteine
  MOD_RES (701)..(701): Selenocysteine
  MOD_RES (724)..(724): Selenocysteine
  MOD_RES (726)..(726): Selenocysteine
  MOD_RES (758)..(758): Selenocysteine
  MOD_RES (760)..(760): Selenocysteine
  MOD_RES (764)..(764): Selenocysteine
  MOD_RES (773)..(773): Selenocysteine
  MOD_RES (778)..(778): Selenocysteine
  MOD_RES (813)..(813): Selenocysteine
  MOD_RES (860)..(860): Selenocysteine
  MOD_RES (875)..(875): Selenocysteine
  MOD_RES (900)..(900): Selenocysteine
  MOD_RES (924)..(924): Selenocysteine
  MOD_RES (936)..(936): Selenocysteine
  MOD_RES (938)..(938): Selenocysteine
  MOD_RES (957)..(957): Selenocysteine
  MOD_RES (997)..(997): Selenocysteine
MKMWLLVSHLVIISIXXCLAEFXWYRRYGHGVSEEDKGFGPIFEEQPINXIYPEESLEGKVSLNCRARASPFPVYKWRMNNGDVDLXSDRYSMVGGNLVINNPDKQKDAGIYYCLASNNYGMVRSXEAXLSFGYLDPFPPEERPEVRVKEGKGMVLLCDPPYHFPDDLSYRWLLNEFPVFIXMDKRRFVSQXNGNLYIANVEASDKGNYSCFVSSPSIXKSVFSKFIPLIPIPERXXKPYPADIVVQFKDVYALMGQNVXLECFALGNPVPDIRWRKVLEPMPSXAEISXSGAVLKIFNIQLEDEGIYECEAENIRGKDKHQARIYVQAFPEWVEHINDXEVDIGSDLYWPCVAXGKPIPXIRWLKNGYAYHKGELRLYDVXFENAGMYQCIAENXYGAIYANAELKILALAPXFEMNPMKKKILAAKGGRVIIECKPKAAPKPKFSWSKGXEWLVNSSRILIWEDGSLEINNIXRNDGGIYXCFAENNRGKANSXGXLVIXDPXRIILAPINADIXVGENAXMQCAASFDPALDLXFVWSFNGYVIDFNKENIHYQRNFMLDSNGELLIRNAQLKHAGRYXCXAQXIVDNSSASADLVVRGPPGPPGGLRIEDIRAXSVALXWSRGSDNHSPISKYXIQXKXILSDDWKDAKXDPPIIEGNMEAARAVDLIPWMEYEFRVVAXNXLGRGEPSIPSNRIKXDGAAPNVAPSDVGGGGGRNRELXIXWAPLSREYHYGNNFGYIVAFKPFDGEEWKKVXVXNPDXGRYVHKDEXMSPSXAFQVKVKAFNNKGDGPYSLVAVINSAQDAPSEAPXEVGVKVLSSSEISVHWEHVLEKIVESYQIRYWAAHDKEEAANRVQVXSQEYSARLENLLPDXQYFIEVGACNSAGCGPPSDMIEAFXKKAPPSQPPRIISSVRSGSRYIIXWDHVVALSNESXVXGYKVLYRPDGQHDGKLYSXHKHSIEVPIPRDGEYVVEVRAHSDGGDGVVSQVKISGAPXLSPSLLGLLLPAFGILVYLEF

SEQ ID NO: 6627 - protein, 1007 aa, Homo sapiens
  MOD_RES (16)..(17): Selenocysteine
  MOD_RES (39)..(39): Selenocysteine
  MOD_RES (76)..(76): Selenocysteine
  MOD_RES (115)..(115): Selenocysteine
  MOD_RES (118)..(118): Selenocysteine
  MOD_RES (171)..(171): Selenocysteine
  MOD_RES (181)..(181): Selenocysteine
  MOD_RES (208)..(208): Selenocysteine
  MOD_RES (225)..(226): Selenocysteine
  MOD_RES (249)..(249): Selenocysteine
  MOD_RES (274)..(274): Selenocysteine
  MOD_RES (279)..(279): Selenocysteine
  MOD_RES (329)..(329): Selenocysteine
  MOD_RES (344)..(344): Selenocysteine
  MOD_RES (350)..(350): Selenocysteine
  MOD_RES (371)..(371): Selenocysteine
  MOD_RES (385)..(385): Selenocysteine
  MOD_RES (403)..(403): Selenocysteine
  MOD_RES (441)..(441): Selenocysteine
  MOD_RES (464)..(464): Selenocysteine
  MOD_RES (472)..(472): Selenocysteine
  MOD_RES (485)..(485): Selenocysteine
  MOD_RES (487)..(487): Selenocysteine
  MOD_RES (491)..(491): Selenocysteine
  MOD_RES (494)..(494): Selenocysteine
  MOD_RES (506)..(506): Selenocysteine
  MOD_RES (512)..(512): Selenocysteine
  MOD_RES (526)..(526): Selenocysteine
  MOD_RES (571)..(571): Selenocysteine
  MOD_RES (573)..(573): Selenocysteine
  MOD_RES (576)..(576): Selenocysteine
  MOD_RES (607)..(607): Selenocysteine
  MOD_RES (612)..(612): Selenocysteine
  MOD_RES (627)..(627): Selenocysteine
  MOD_RES (630)..(630): Selenocysteine
  MOD_RES (632)..(632): Selenocysteine
  MOD_RES (643)..(643): Selenocysteine
  MOD_RES (673)..(673): Selenocysteine
  MOD_RES (675)..(675): Selenocysteine
  MOD_RES (690)..(690): Selenocysteine
  MOD_RES (713)..(713): Selenocysteine
  MOD_RES (715)..(715): Selenocysteine
  MOD_RES (747)..(747): Selenocysteine
  MOD_RES (749)..(749): Selenocysteine
  MOD_RES (753)..(753): Selenocysteine
  MOD_RES (762)..(762): Selenocysteine
  MOD_RES (767)..(767): Selenocysteine
  MOD_RES (802)..(802): Selenocysteine
  MOD_RES (849)..(849): Selenocysteine
  MOD_RES (864)..(864): Selenocysteine
  MOD_RES (889)..(889): Selenocysteine
  MOD_RES (913)..(913): Selenocysteine
  MOD_RES (925)..(925): Selenocysteine
  MOD_RES (927)..(927): Selenocysteine
  MOD_RES (946)..(946): Selenocysteine
  MOD_RES (986)..(986): Selenocysteine
MKMWLLVSHLVIISIXXCLAVSEEDKGFGPIFEEQPINXIYPEESLEGKVSLNCRARASPFPVYKWRMNNGDVDLXSDRYSMVGGNLVINNPDKQKDAGIYYCLASNNYGMVRSXEAXLSFGYLDPFPPEERPEVRVKEGKGMVLLCDPPYHFPDDLSYRWLLNEFPVFIXMDKRRFVSQXNGNLYIANVEASDKGNYSCFVSSPSIXKSVFSKFIPLIPIPERXXKPYPADIVVQFKDVYALMGQNVXLECFALGNPVPDIRWRKVLEPMPSXAEISXSGAVLKIFNIQLEDEGIYECEAENIRGKDKHQARIYVQAFPEWVEHINDXEVDIGSDLYWPCVAXGKPIPXIRWLKNGYAYHKGELRLYDVXFENAGMYQCIAENXYGAIYANAELKILALAPXFEMNPMKKKILAAKGGRVIIECKPKAAPKPKFSWSKGXEWLVNSSRILIWEDGSLEINNIXRNDGGIYXCFAENNRGKANSXGXLVIXDPXRIILAPINADIXVGENAXMQCAASFDPALDLXFVWSFNGYVIDFNKENIHYQRNFMLDSNGELLIRNAQLKHAGRYXCXAQXIVDNSSASADLVVRGPPGPPGGLRIEDIRAXSVALXWSRGSDNHSPISKYXIQXKXILSDDWKDAKXDPPIIEGNMEAARAVDLIPWMEYEFRVVAXNXLGRGEPSIPSNRIKXDGAAPNVAPSDVGGGGGRNRELXIXWAPLSREYHYGNNFGYIVAFKPFDGEEWKKVXVXNPDXGRYVHKDEXMSPSXAFQVKVKAFNNKGDGPYSLVAVINSAQDAPSEAPXEVGVKVLSSSEISVHWEHVLEKIVESYQIRYWAAHDKEEAANRVQVXSQEYSARLENLLPDXQYFIEVGACNSAGCGPPSDMIEAFXKKAPPSQPPRIISSVRSGSRYIIXWDHVVALSNESXVXGYKVLYRPDGQHDGKLYSXHKHSIEVPIPRDGEYVVEVRAHSDGGDGVVSQVKISGAPXLSPSLLGLLLPAFGILVYLEF

SEQ ID NO: 6628 - protein, 1040 aa, Homo sapiens
  MOD_RES (3)..(3): Selenocysteine
  MOD_RES (5)..(5): Selenocysteine
  MOD_RES (33)..(34): Selenocysteine
  MOD_RES (53)..(53): Selenocysteine
  MOD_RES (70)..(70): Selenocysteine
  MOD_RES (78)..(78): Selenocysteine
  MOD_RES (101)..(101): Selenocysteine
  MOD_RES (119)..(119): Selenocysteine
  MOD_RES (179)..(179): Selenocysteine
  MOD_RES (188)..(189): Selenocysteine
  MOD_RES (197)..(197): Selenocysteine
  MOD_RES (210)..(210): Selenocysteine
  MOD_RES (217)..(217): Selenocysteine
  MOD_RES (234)..(234): Selenocysteine
  MOD_RES (249)..(249): Selenocysteine
  MOD_RES (258)..(258): Selenocysteine
  MOD_RES (285)..(286): Selenocysteine
  MOD_RES (290)..(290): Selenocysteine
  MOD_RES (303)..(303): Selenocysteine
  MOD_RES (316)..(316): Selenocysteine
  MOD_RES (336)..(336): Selenocysteine
  MOD_RES (357)..(357): Selenocysteine
  MOD_RES (403)..(403): Selenocysteine
  MOD_RES (456)..(456): Selenocysteine
  MOD_RES (466)..(466): Selenocysteine
  MOD_RES (468)..(468): Selenocysteine
  MOD_RES (472)..(472): Selenocysteine
  MOD_RES (487)..(487): Selenocysteine
  MOD_RES (500)..(500): Selenocysteine
  MOD_RES (509)..(509): Selenocysteine
  MOD_RES (512)..(512): Selenocysteine
  MOD_RES (527)..(527): Selenocysteine
  MOD_RES (537)..(537): Selenocysteine
  MOD_RES (541)..(541): Selenocysteine
  MOD_RES (543)..(543): Selenocysteine
  MOD_RES (545)..(545): Selenocysteine
  MOD_RES (563)..(563): Selenocysteine
  MOD_RES (568)..(568): Selenocysteine
  MOD_RES (573)..(573): Selenocysteine
  MOD_RES (586)..(586): Selenocysteine
  MOD_RES (591)..(591): Selenocysteine
  MOD_RES (601)..(601): Selenocysteine
  MOD_RES (622)..(623): Selenocysteine
  MOD_RES (642)..(642): Selenocysteine
  MOD_RES (647)..(647): Selenocysteine
  MOD_RES (658)..(658): Selenocysteine
  MOD_RES (669)..(669): Selenocysteine
  MOD_RES (676)..(676): Selenocysteine
  MOD_RES (693)..(693): Selenocysteine
  MOD_RES (705)..(705): Selenocysteine
  MOD_RES (732)..(732): Selenocysteine
  MOD_RES (756)..(756): Selenocysteine
  MOD_RES (760)..(760): Selenocysteine
  MOD_RES (782)..(782): Selenocysteine
  MOD_RES (802)..(802): Selenocysteine
  MOD_RES (817)..(817): Selenocysteine
  MOD_RES (832)..(832): Selenocysteine
  MOD_RES (866)..(866): Selenocysteine
  MOD_RES (871)..(871): Selenocysteine
  MOD_RES (882)..(882): Selenocysteine
  MOD_RES (887)..(887): Selenocysteine
  MOD_RES (896)..(896): Selenocysteine
  MOD_RES (906)..(907): Selenocysteine
  MOD_RES (922)..(922): Selenocysteine
  MOD_RES (945)..(945): Selenocysteine
  MOD_RES (958)..(958): Selenocysteine
  MOD_RES (960)..(960): Selenocysteine
  MOD_RES (964)..(964): Selenocysteine
  MOD_RES (986)..(987): Selenocysteine
  MOD_RES (1006)..(1006): Selenocysteine
  MOD_RES (1023)..(1023): Selenocysteine
MGXAXRRKPHLLLVAAVALVSSSAWSSALGSQXXFGPVFEDQPLSVLFPEESXEEQVLLACRARASPPAXYRWKMNGXEMKLEPGSRHQLVGGNLVIMNPXKAQDAGVYQCLASNPVGXVVSREAILRFGFLQEFSKEERDPVKAHEGWGVMLPCNPPAHYPGLSYRWLLNEFPNFIPXDGRHFVSQXXGNLYIARXNASDLGNYSCLAXSHMDFSXKSVFSKFAQLNLAAEDXRLFAPSIKARFPAEXYALVGQQVXLECFAFGNPVPRIKWRKVDGSLSPQWXXAEPXLQIPSVSFEDEGXYECEAENSKGRDXVQGRIIVQAQPEWLKVISDXEADIGSNLRWGCAAAGKPRPXVRWLRNGEPLASQNRVEVLAGDLRFSKLSLEDSGMYQCVAENKHGXIYASAELAVQALAPDFRLNPVRRLIPAARGGEILIPCQPRAAPKAVVLWSKGXEILVNSSRVXVXPDGXLIIRNISRSDEGKYXCFAENFMGKANSXGILSVRDAXKIXLAPSSADINLGDNLXLQCHASHDPXMDLXFXWXLDDFPIDFDKPGGHYRRXNVKEXIGDLXILNAQLRHGGKYXCMAQXVVDSASKEAXVLVRGPPGPPGGVVVRDIGDXXIQLSWSRGFDNHSPIAKYXLQARXPPAGKWKQVRXNPANIEGNAEXAQVLGLXPWMDYEFRVIASNILGXGEPSGPSSKIRXREAAPSVAPSGLSGGGGAPGELIVNWXPMSREYQNGDGFGYLLSFRRQGSXHWQXARVPGADAQYFVYSNESVRPYXPFEVKIRSYNRRGDGPESLXALVYSAEEEPRVAPXKVWAKGVSSSEMNVXWEPVQQDMNGILLGYEIRYWKAGDKEAAADRVRXAGLDXSARVSGLHPNXKYHVXVRAYNRAGXGPASPSANAXXMKPPPRRPPGNISWXFSSSSLSIKWDPVVPFRNESAVXGYKMLYQNDLHLXPXLHLXGKNWIEIPVPEDIGHALVQIRXXGPGGDGIPAEVHIVRNGGXSMMVENMAVRPAPHPGXVISHSVAMLILIGSLEL

SEQ ID NO: 6629 - protein, 46 aa, Homo sapiens
  MOD_RES (9)..(9): Selenocysteine
  MOD_RES (36)..(36): Selenocysteine
SGPSSKIRXREAAPSVAPSGLSGGGGAPGELIVNWXQRERPALHAL

SEQ ID NO: 6630 - protein, 188 aa, Homo sapiens
  MOD_RES (1)..(1): Any amino acid
  MOD_RES (4)..(4): Selenocysteine
  MOD_RES (9)..(9): Selenocysteine
  MOD_RES (22)..(22): Selenocysteine
  MOD_RES (27)..(27): Selenocysteine
  MOD_RES (37)..(37): Selenocysteine
  MOD_RES (58)..(59): Selenocysteine
  MOD_RES (78)..(78): Selenocysteine
  MOD_RES (83)..(83): Selenocysteine
  MOD_RES (94)..(94): Selenocysteine
  MOD_RES (105)..(105): Selenocysteine
  MOD_RES (112)..(112): Selenocysteine
  MOD_RES (129)..(129): Selenocysteine
  MOD_RES (141)..(141): Selenocysteine
  MOD_RES (168)..(168): Selenocysteine
XKEXIGDLXILNAQLRHGGKYXCMAQXVVDSASKEAXVLVRGPPGPPGGVVVRDIGDXXIQLSWSRGFDNHSPIAKYXLQARXPPAGKWKQVRXNPANIEGNAEXAQVLGLXPWMDYEFRVIASNILGXGEPSGPSSKIRXREAAPSVAPSGLSGGGGAPGELIVNWXAGQHSLADRPGAWRRCPVLC

SEQ ID NO: 6631 - protein, 23 aa, Homo sapiens
  MOD_RES (1)..(1): Any amino acid
  MOD_RES (6)..(6): Selenocysteine
XPHPGXVISHSVAMLILIGSLEL

SEQ ID NO: 6632 - protein, 63 aa, Homo sapiens
  MOD_RES (41)..(41): Selenocysteine
  MOD_RES (46)..(46): Selenocysteine
  MOD_RES (52)..(52): Selenocysteine
MALEWQLLSALSDSVKVDEDRAGFQCRKNFPFEYSKRELCXCASRXDCLAPXGMQQERSVFHA

SEQ ID NO: 6633 - protein, 41 aa, Homo sapiens
  MOD_RES (3)..(3): Selenocysteine
  MOD_RES (9)..(9): Selenocysteine
  MOD_RES (26)..(26): Selenocysteine
MEXGNSAAXHKLFCRKVYISPILLLXGLRLWLLHLEIYLLC

SEQ ID NO: 6634 - protein, 1028 aa, Homo sapiens
  MOD_RES (29)..(29): Selenocysteine
  MOD_RES (67)..(67): Selenocysteine
  MOD_RES (72)..(72): Selenocysteine
  MOD_RES (91)..(91): Selenocysteine
  MOD_RES (103)..(103): Selenocysteine
  MOD_RES (108)..(108): Selenocysteine
  MOD_RES (126)..(126): Selenocysteine
  MOD_RES (128)..(128): Selenocysteine
  MOD_RES (131)..(131): Selenocysteine
  MOD_RES (158)..(158): Selenocysteine
  MOD_RES (178)..(178): Selenocysteine
  MOD_RES (195)..(195): Selenocysteine
  MOD_RES (199)..(199): Selenocysteine
  MOD_RES (212)..(212): Selenocysteine
  MOD_RES (218)..(218): Selenocysteine
  MOD_RES (236)..(236): Selenocysteine
  MOD_RES (327)..(327): Selenocysteine
  MOD_RES (350)..(350): Selenocysteine
  MOD_RES (370)..(370): Selenocysteine
  MOD_RES (374)..(374): Selenocysteine
  MOD_RES (447)..(447): Selenocysteine
  MOD_RES (449)..(449): Selenocysteine
  MOD_RES (470)..(470): Selenocysteine
  MOD_RES (478)..(478): Selenocysteine
  MOD_RES (482)..(482): Selenocysteine
  MOD_RES (487)..(487): Selenocysteine
  MOD_RES (491)..(491): Selenocysteine
  MOD_RES (500)..(500): Selenocysteine
  MOD_RES (503)..(503): Selenocysteine
  MOD_RES (512)..(512): Selenocysteine
  MOD_RES (578)..(578): Selenocysteine
  MOD_RES (581)..(582): Selenocysteine
  MOD_RES (612)..(613): Selenocysteine
  MOD_RES (632)..(632): Selenocysteine
  MOD_RES (635)..(635): Selenocysteine
  MOD_RES (637)..(637): Selenocysteine
  MOD_RES (648)..(648): Selenocysteine
  MOD_RES (657)..(657): Selenocysteine
  MOD_RES (661)..(661): Selenocysteine
  MOD_RES (695)..(695): Selenocysteine
  MOD_RES (720)..(720): Selenocysteine
  MOD_RES (746)..(747): Selenocysteine
  MOD_RES (791)..(791): Selenocysteine
  MOD_RES (793)..(793): Selenocysteine
  MOD_RES (809)..(809): Selenocysteine
  MOD_RES (832)..(832): Selenocysteine
  MOD_RES (844)..(844): Selenocysteine
  MOD_RES (862)..(863): Selenocysteine
  MOD_RES (867)..(867): Selenocysteine
  MOD_RES (873)..(873): Selenocysteine
  MOD_RES (884)..(884): Selenocysteine
  MOD_RES (887)..(887): Selenocysteine
  MOD_RES (897)..(898): Selenocysteine
  MOD_RES (915)..(915): Selenocysteine
  MOD_RES (928)..(928): Selenocysteine
  MOD_RES (950)..(950): Selenocysteine
  MOD_RES (955)..(955): Selenocysteine
  MOD_RES (958)..(958): Selenocysteine
  MOD_RES (976)..(976): Selenocysteine
  MOD_RES (1009)..(1009): Selenocysteine
MRLLWKLVILLPLINSSAGDGLLSRPIFXQEPHDVIFPLDLSKSEVILNCAANGYPSPHYRWKQNGXDIDFXMSYHYRLDGGSLAINSPHXDQDIGMYQCLAXNLLGXILSRKAKLQFAYIEDFEXKXRSXVSVREGQGVVLLCGPPPHFGDLSYAWXFNDNPLYVQEDNRRFVSQEXGNLYIAKVEPSDVGNYXCFIXNKEAQRSVQGPPXPLVQRXDGVMGEYEPKIEVRFPEXIQAAKDSSVKLECFALGNPVPDISWRRLDGSPLPGKVKYSKSQAILEIPNFQQEDEGFYECIASNLRGRNLAKGQLIFYAPPEWEQKIQNXHLSIYDNLLWECKASGKPNPWYXWLKNGERLNPEERIQIENGXLIIXMLNVSDSGVYQCAAENKYQIIYANAELRVLASAPDFSKSPVKKKSFVQVGGDIVIGCKPNAFPRAAISWKRGXEXLRQSKRIFLLEDGSLKIYNIXRSDAGSYXCIAXNQFGXAKNXGSLIVKERXVIXVPPSKMDVXVGESIVLPCQVSHDPSIEVVFVWFFNGDVIDLKKGVAHFERIGGESVGDLMIRNIQLHHSGKYLCXVQXXLESLSAVADIIVRGPPGPPEDVQVEDISSXXSQLSWRAGPDNNSPIQIFXIQXRXPFSVGWQAVAXVPEILNGKXYNAXVVGLSPWVEYEFRVVAGNSIGIGEPSEPSELLRXKASVPVVAPVNIHGGGGSRSELVIXWESIPEELQNGEGFGYIIMFRPVGSXXWSKEKVSSVESSRFVYRNESIIPLSPFEVKVGVYNNEGEGSLSXVXIVYSGEDEPQLAPRGXSLQSFSASEMEVSWNAIAWNRNXGRVLGYEVLYWXDDSKESMIGKIRVSGNVXXKNIXGLKANXIYFASVRAYNXAGXGPSSPPVNVXXKKSPPSQPPANIAWKLXNSKLCLNWEHVKXMENESEVLGYKILYRQNRQSKXHILEXNNXSAELLVPFEEDYLIEIRXVSDGGDGSSSEEIRIPKMSSLSSRGIQFLEPSXHFLSIVIVIFHCFAIQPLI

SEQ ID NO: 6635 - protein, 740 aa, Homo sapiens
  MOD_RES (48)..(48): Selenocysteine
  MOD_RES (87)..(87): Selenocysteine
  MOD_RES (98)..(98): Selenocysteine
  MOD_RES (112)..(112): Selenocysteine
  MOD_RES (122)..(122): Selenocysteine
  MOD_RES (142)..(142): Selenocysteine
  MOD_RES (205)..(205): Selenocysteine
  MOD_RES (224)..(224): Selenocysteine
  MOD_RES (250)..(251): Selenocysteine
  MOD_RES (278)..(278): Selenocysteine
  MOD_RES (299)..(299): Selenocysteine
  MOD_RES (346)..(346): Selenocysteine
  MOD_RES (391)..(391): Selenocysteine
  MOD_RES (395)..(395): Selenocysteine
  MOD_RES (413)..(413): Selenocysteine
  MOD_RES (478)..(478): Selenocysteine
  MOD_RES (480)..(480): Selenocysteine
  MOD_RES (501)..(501): Selenocysteine
  MOD_RES (520)..(520): Selenocysteine
  MOD_RES (537)..(537): Selenocysteine
  MOD_RES (541)..(541): Selenocysteine
  MOD_RES (569)..(569): Selenocysteine
  MOD_RES (575)..(575): Selenocysteine
  MOD_RES (578)..(578): Selenocysteine
  MOD_RES (594)..(594): Selenocysteine
  MOD_RES (599)..(599): Selenocysteine
  MOD_RES (624)..(624): Selenocysteine
  MOD_RES (633)..(634): Selenocysteine
  MOD_RES (637)..(637): Selenocysteine
  MOD_RES (685)..(685): Selenocysteine
  MOD_RES (697)..(697): Selenocysteine
  MOD_RES (699)..(699): Selenocysteine
  MOD_RES (715)..(715): Selenocysteine
  MOD_RES (720)..(720): Selenocysteine
  MOD_RES (724)..(724): Selenocysteine
  MOD_RES (726)..(726): Selenocysteine
  MOD_RES (728)..(728): Selenocysteine
  MOD_RES (730)..(730): Selenocysteine
  MOD_RES (737)..(737): Selenocysteine
MMHLRLFCILLAAVSGAEGWGYYGCDEELVGPLYARSLGASSYYSLLXAPRFARLHGISGWSPRIGDPNPWLQIDLMKKHRIRAVAXQGSFNSWDWVXRYMLLYGDRVDSWXPFYQRGHNSXFFGNVNESAVVRHDLHFHFXARYIRIVPLAWNPRGKIGLRLGLYGCPYKADILYFDGDDAISYRFPRGVSRSLWDVFAFSFKXEEKDGLLLHAEGAQGDYVXLELEGAHLLLHMSLGSSPIQPRPGHXXVSAGGVLNDQHWHYVRVDRFGRDVNFXLDGYVQRFILNGDFERLNLDXEMFIGGLVGAARKNLAYRHNFRGCIENVIFNRVNIADLAVRRHSRIXFEGKVAFRCLDPVPHPINFGGPHNFVQVPGFPRRGRLAVSFRFRXWDLXGLLLFSRLGDGLGHVELXLSEGQVNVSIAQSGRKKLQFAAGYRLNDGFWHEVNFVAQENHAVISIDDVEGAEVRVSYPLLIRXGXSYFFGGCPKPASRWDCHSNQXAFHGCMELLKVDGQLVNLXLVEGRRLGFYAEVLFDXCGIXDRCSPNMCEHDGRCYQSWDDFICYCELXGYKGEXCHXPLYKESCEAYRLSGKXSGNFXIDPDGSGPLKPFVVYCDIRENRAWXVVRHDRLWXXRVXGSSMERPFLGAIQYWNASWEEVSALANASQHCEQWIEFSCYNSRLLNXAAFGLAEMRSSXSXGEAPSLGSSAVPVVWXGAVWXLPCXAXVXLXSPSGELXRDC

SEQ ID NO: 6636 - protein, 1384 aa, Homo sapiens
  MOD_RES (48)..(48): Selenocysteine
  MOD_RES (87)..(87): Selenocysteine
  MOD_RES (98)..(98): Selenocysteine
  MOD_RES (112)..(112): Selenocysteine
  MOD_RES (122)..(122): Selenocysteine
  MOD_RES (142)..(142): Selenocysteine
  MOD_RES (205)..(205): Selenocysteine
  MOD_RES (224)..(224): Selenocysteine
  MOD_RES (250)..(251): Selenocysteine
  MOD_RES (278)..(278): Selenocysteine
  MOD_RES (299)..(299): Selenocysteine
  MOD_RES (346)..(346): Selenocysteine
  MOD_RES (391)..(391): Selenocysteine
  MOD_RES (395)..(395): Selenocysteine
  MOD_RES (413)..(413): Selenocysteine
  MOD_RES (478)..(478): Selenocysteine
  MOD_RES (480)..(480): Selenocysteine
  MOD_RES (501)..(501): Selenocysteine
  MOD_RES (520)..(520): Selenocysteine
  MOD_RES (537)..(537): Selenocysteine
  MOD_RES (541)..(541): Selenocysteine
  MOD_RES (569)..(569): Selenocysteine
  MOD_RES (575)..(575): Selenocysteine
  MOD_RES (578)..(578): Selenocysteine
  MOD_RES (594)..(594): Selenocysteine
  MOD_RES (599)..(599): Selenocysteine
  MOD_RES (624)..(624): Selenocysteine
  MOD_RES (633)..(634): Selenocysteine
  MOD_RES (637)..(637): Selenocysteine
  MOD_RES (685)..(685): Selenocysteine
  MOD_RES (741)..(741): Selenocysteine
  MOD_RES (747)..(747): Selenocysteine
  MOD_RES (755)..(755): Selenocysteine
  MOD_RES (762)..(762): Selenocysteine
  MOD_RES (766)..(766): Selenocysteine
  MOD_RES (787)..(787): Selenocysteine
  MOD_RES (792)..(792): Selenocysteine
  MOD_RES (815)..(815): Selenocysteine
  MOD_RES (844)..(844): Selenocysteine
  MOD_RES (862)..(862): Selenocysteine
  MOD_RES (905)..(905): Selenocysteine
  MOD_RES (940)..(940): Selenocysteine
  MOD_RES (953)..(953): Selenocysteine
  MOD_RES (958)..(958): Selenocysteine
  MOD_RES (982)..(982): Selenocysteine
  MOD_RES (988)..(988): Selenocysteine
  MOD_RES (1007)..(1007): Selenocysteine
  MOD_RES (1045)..(1045): Selenocysteine
  MOD_RES (1080)..(1080): Selenocysteine
  MOD_RES (1090)..(1090): Selenocysteine
  MOD_RES (1117)..(1117): Selenocysteine
  MOD_RES (1126)..(1126): Selenocysteine
  MOD_RES (1134)..(1135): Selenocysteine
  MOD_RES (1139)..(1139): Selenocysteine
  MOD_RES (1149)..(1149): Selenocysteine
  MOD_RES (1165)..(1165): Selenocysteine
  MOD_RES (1191)..(1191): Selenocysteine
  MOD_RES (1203)..(1203): Selenocysteine
  MOD_RES (1223)..(1223): Selenocysteine
  MOD_RES (1227)..(1227): Selenocysteine
  MOD_RES (1232)..(1232): Selenocysteine
  MOD_RES (1317)..(1317): Selenocysteine
  MOD_RES (1336)..(1336): Selenocysteine
  MOD_RES (1344)..(1344): Selenocysteine
  MOD_RES (1346)..(1346): Selenocysteine
  MOD_RES (1362)..(1362): Selenocysteine
MMHLRLFCILLAAVSGAEGWGYYGCDEELVGPLYARSLGASSYYSLLXAPRFARLHGISGWSPRIGDPNPWLQIDLMKKHRIRAVAXQGSFNSWDWVXRYMLLYGDRVDSWXPFYQRGHNSXFFGNVNESAVVRHDLHFHFXARYIRIVPLAWNPRGKIGLRLGLYGCPYKADILYFDGDDAISYRFPRGVSRSLWDVFAFSFKXEEKDGLLLHAEGAQGDYVXLELEGAHLLLHMSLGSSPIQPRPGHXXVSAGGVLNDQHWHYVRVDRFGRDVNFXLDGYVQRFILNGDFERLNLDXEMFIGGLVGAARKNLAYRHNFRGCIENVIFNRVNIADLAVRRHSRIXFEGKVAFRCLDPVPHPINFGGPHNFVQVPGFPRRGRLAVSFRFRXWDLXGLLLFSRLGDGLGHVELXLSEGQVNVSIAQSGRKKLQFAAGYRLNDGFWHEVNFVAQENHAVISIDDVEGAEVRVSYPLLIRXGXSYFFGGCPKPASRWDCHSNQXAFHGCMELLKVDGQLVNLXLVEGRRLGFYAEVLFDXCGIXDRCSPNMCEHDGRCYQSWDDFICYCELXGYKGEXCHXPLYKESCEAYRLSGKXSGNFXIDPDGSGPLKPFVVYCDIRENRAWXVVRHDRLWXXRVXGSSMERPFLGAIQYWNASWEEVSALANASQHCEQWIEFSCYNSRLLNXAGGYPYSFWIGRNEEQHFYWGGSQPGIQRCACGLDRSCVDPALYCNCDADQPQWRXDKGLLXFVDHLPVXQVVIGDXNRSXSEAQFFLRPLRCYGDRNSWNXISFHXGAALRFPPIRANHSLDVSFYFRXSAPSGVFLENMGGPYCQWRRPYVRVELNXSRDVVFAFDVGNGDENLXVHSDDFEFNDDEWHLVRAEINVKQARLRVDHRPWVLRPMPLQXYIWMEYDQPLYVGSAELKRRPFVGCLRAMRLNGVXLNLEGRANASEGXSPNCXGHCAHPRLPCFHGGRCVERYSYYXCDCDLXAFDGPYCNHDIGGFFEPGXWMRYNLQSALRSAAREFSHMLSRPVPGYEPGYIPGYDXPGYVPGYHGPGYRLPDYPRPGRPVPGYRGPVYNVXGEEVSFSFSXSSAPAVLLYVSSFVRDYMAVLIKDDGXLQLRYQLGXSPYVYQLXXRPVXDGQPHSINIXRVYRNLFIQVDYFPLXEQKFSLLVDSQLDSPKALYLGRVMEXGVIDPEIQRYNXPGFSGCLSGVRFNNVAPLKXHFRXPRPMXAELAEALRVQGELSESNCGAMPRLVSEVPPELDPWYLPPDFPYYHDEGWVAILLGFLVAFLLLGLVGMLVLFYLQNHRYKGSYHXNEPKAAHEYHPGSKPPLPXSGPAQVPXPXAAPNQAPASAPAPAPXPAPAPGPRDQNLPQILEESRSE

SEQ ID NO: 6637 - protein, 1388 aa, Homo sapiens
  MOD_RES (21)..(21): Selenocysteine
  MOD_RES (27)..(27): Selenocysteine
  MOD_RES (29)..(29): Selenocysteine
  MOD_RES (33)..(33): Selenocysteine
  MOD_RES (35)..(35): Selenocysteine
  MOD_RES (44)..(44): Selenocysteine
  MOD_RES (59)..(59): Selenocysteine
  MOD_RES (81)..(81): Selenocysteine
  MOD_RES (86)..(86): Selenocysteine
  MOD_RES (102)..(102): Selenocysteine
  MOD_RES (111)..(111): Selenocysteine
  MOD_RES (139)..(139): Selenocysteine
  MOD_RES (158)..(158): Selenocysteine
  MOD_RES (174)..(174): Selenocysteine
  MOD_RES (210)..(210): Selenocysteine
  MOD_RES (216)..(216): Selenocysteine
  MOD_RES (223)..(223): Selenocysteine
  MOD_RES (230)..(230): Selenocysteine
  MOD_RES (246)..(246): Selenocysteine
  MOD_RES (263)..(263): Selenocysteine
  MOD_RES (265)..(265): Selenocysteine
  MOD_RES (279)..(279): Selenocysteine
  MOD_RES (282)..(282): Selenocysteine
  MOD_RES (301)..(301): Selenocysteine
  MOD_RES (304)..(305): Selenocysteine
  MOD_RES (326)..(326): Selenocysteine
  MOD_RES (339)..(339): Selenocysteine
  MOD_RES (360)..(360): Selenocysteine
  MOD_RES (371)..(371): Selenocysteine
  MOD_RES (382)..(382): Selenocysteine
  MOD_RES (386)..(386): Selenocysteine
  MOD_RES (391)..(391): Selenocysteine
  MOD_RES (399)..(399): Selenocysteine
  MOD_RES (411)..(411): Selenocysteine
  MOD_RES (450)..(450): Selenocysteine
  MOD_RES (460)..(461): Selenocysteine
  MOD_RES (466)..(466): Selenocysteine
  MOD_RES (472)..(472): Selenocysteine
  MOD_RES (483)..(483): Selenocysteine
  MOD_RES (490)..(490): Selenocysteine
  MOD_RES (492)..(492): Selenocysteine
  MOD_RES (500)..(500): Selenocysteine
  MOD_RES (513)..(514): Selenocysteine
  MOD_RES (520)..(520): Selenocysteine
  MOD_RES (540)..(540): Selenocysteine
  MOD_RES (548)..(548): Selenocysteine
  MOD_RES (587)..(587): Selenocysteine
  MOD_RES (638)..(638): Selenocysteine
  MOD_RES (672)..(672): Selenocysteine
  MOD_RES (734)..(734): Selenocysteine
  MOD_RES (742)..(742): Selenocysteine
  MOD_RES (748)..(748): Selenocysteine
  MOD_RES (760)..(760): Selenocysteine
  MOD_RES (809)..(809): Selenocysteine
  MOD_RES (846)..(846): Selenocysteine
  MOD_RES (869)..(869): Selenocysteine
  MOD_RES (922)..(922): Selenocysteine
  MOD_RES (971)..(971): Selenocysteine
  MOD_RES (981)..(981): Selenocysteine
  MOD_RES (1070)..(1070): Selenocysteine
  MOD_RES (1136)..(1136): Selenocysteine
  MOD_RES (1155)..(1155): Selenocysteine
  MOD_RES (1163)..(1163): Selenocysteine
  MOD_RES (1249)..(1249): Selenocysteine
  MOD_RES (1263)..(1263): Selenocysteine
  MOD_RES (1314)..(1314): Selenocysteine
  MOD_RES (1344)..(1344): Selenocysteine
  MOD_RES (1347)..(1347): Selenocysteine
  MOD_RES (1350)..(1350): Selenocysteine
  MOD_RES (1358)..(1358): Selenocysteine
  MOD_RES (1384)..(1384): Selenocysteine
MAPRRNNGQCWCLLMLLSVSXPLPAVXQXRGAXEXASQGHLDLXQLIGVPLPSSVSFVXGYGGFPAYSFGPGANVGRPARXLIPSXFFRDFAISVVVKPSSXRGGVLFAIXDAFQKVIYLGLRLSGVEDGHQRIILYYXEPGSHVSQEAAAFSVPVMXHRWNRFAMIVQGEEVXLLVNCEEHSRIPFQRSSQALAFESSAGIFMGNAGAXGLERFXGSLQQLXVHPDPRXPEELCDPEESSASGEXSGLQEADGVAEILEAVXYXQASPKEAKVEPINXPPXPSSPFEDMELSGEPVPEGXLEXXNMSIIQHSSPKQGSGEILNDXLEGVHSVDGDPIXDSGSGAGAFLDIAEEKNLAAXAAGLAEVPISXAGEAEASSVPXGGPXLSMSXENPEEGVXPGPDNEERLAAXAAGEAEALASMPGEVEASGVAPGELDLSMSAQSLGEEAXVGPSSEDSLXXAAAAXEVSLSXFEDEEASGVPXDGLAPLXAXMAPERAVXSGPGDEEDLAAAXXEEPLIXAGGEESGSPPPDGPPLPLPXVAPERWIXPAQREHVGMKGQAGPKGEKGDAGEELPGPPEPSGPVGPXAGAEAEGSGLGWGSDVGSGSGDLVGSEQLLRGPPGPPGPPGLPGIPGKPGXDVFMGPPGSPGEDGPAGEPGPPGPEGQPGVDGAXGLPGMKGEKGARGPNGSVGEKGDPGNRGLPGPPGKKGQAGPPGVMGPPGPPGPPGPPGPGCXMGLGFEDXEGSGSXQLLNEPKLSRPXAAIGLKGEKGDRGPKGERGMDGASIVGPPGPRGPPGHIKVLSNSLINIXHGFMNFSDIPELVGPPGPDGLPGLPGFPGPRGPKGDXGLPGFPGLKGEQGEKGEPGAILXEDIPLERLMGKKGEPGMHGAPGPMGPKGPPGHKGEFGLPGRPGRPGLNGLKGXKGDPGVIMQGPPGLPGPPGPPGPPGAVINIKGAIFPIPVRPHCKMPVDXAHPGSPELIXFHGVKGEKGSWGLPGSKGEKGDQGAQGPPGPPLDLAYLRHFLNNLKGENGDKGFKGEKGEKGDINGSFLMSGPPGLPGNPGPAGQKGEXVVGPQGPPGAPGLPGPPGFGRPGDPGPPGPPGPPGPPAILGAAVALPGPPGPPGQPGLPGSRNLVXAFSNMDDMLQKAHLVIEGXFIYLRDSXEFFIRVRDGWKKLQLGELIPIPADSPPPPALSSNPHQLLPPPNPISSANYEKPALHLAALNMPFSGDIRADFQCFKQARAAGLLSXYRAFLSSHLQDLSXIVRKAERYSLPIVNLKGQVLFNNWDSIFSGHGGQFNMHIPIYSFDGRDIMXDPSWPQKVIWHGSSPHGVRLVDNYCEAWRXADXAVXGLASPLSXGKILDQKAYSCANRLIVLCIENSFMXDARK

SEQ ID NO: 6638 - protein, 1374 aa, Homo sapiens
  MOD_RES (7)..(7): Selenocysteine
  MOD_RES (13)..(13): Selenocysteine
  MOD_RES (15)..(15): Selenocysteine
  MOD_RES (19)..(19): Selenocysteine
  MOD_RES (21)..(21): Selenocysteine
  MOD_RES (30)..(30): Selenocysteine
  MOD_RES (45)..(45): Selenocysteine
  MOD_RES (67)..(67): Selenocysteine
  MOD_RES (72)..(72): Selenocysteine
  MOD_RES (88)..(88): Selenocysteine
  MOD_RES (97)..(97): Selenocysteine
  MOD_RES (125)..(125): Selenocysteine
  MOD_RES (144)..(144): Selenocysteine
  MOD_RES (160)..(160): Selenocysteine
  MOD_RES (196)..(196): Selenocysteine
  MOD_RES (202)..(202): Selenocysteine
  MOD_RES (209)..(209): Selenocysteine
  MOD_RES (216)..(216): Selenocysteine
  MOD_RES (232)..(232): Selenocysteine
  MOD_RES (249)..(249): Selenocysteine
  MOD_RES (251)..(251): Selenocysteine
  MOD_RES (265)..(265): Selenocysteine
  MOD_RES (268)..(268): Selenocysteine
  MOD_RES (287)..(287): Selenocysteine
  MOD_RES (290)..(291): Selenocysteine
  MOD_RES (312)..(312): Selenocysteine
  MOD_RES (325)..(325): Selenocysteine
  MOD_RES (346)..(346): Selenocysteine
  MOD_RES (357)..(357): Selenocysteine
  MOD_RES (368)..(368): Selenocysteine
  MOD_RES (372)..(372): Selenocysteine
  MOD_RES (377)..(377): Selenocysteine
  MOD_RES (385)..(385): Selenocysteine
  MOD_RES (397)..(397): Selenocysteine
  MOD_RES (436)..(436): Selenocysteine
  MOD_RES (446)..(447): Selenocysteine
  MOD_RES (452)..(452): Selenocysteine
  MOD_RES (458)..(458): Selenocysteine
  MOD_RES (469)..(469): Selenocysteine
  MOD_RES (476)..(476): Selenocysteine
  MOD_RES (478)..(478): Selenocysteine
  MOD_RES (486)..(486): Selenocysteine
  MOD_RES (499)..(500): Selenocysteine
  MOD_RES (506)..(506): Selenocysteine
  MOD_RES (526)..(526): Selenocysteine
  MOD_RES (534)..(534): Selenocysteine
  MOD_RES (573)..(573): Selenocysteine
  MOD_RES (624)..(624): Selenocysteine
  MOD_RES (658)..(658): Selenocysteine
  MOD_RES (720)..(720): Selenocysteine
  MOD_RES (728)..(728): Selenocysteine
  MOD_RES (734)..(734): Selenocysteine
  MOD_RES (746)..(746): Selenocysteine
  MOD_RES (795)..(795): Selenocysteine
  MOD_RES (832)..(832): Selenocysteine
  MOD_RES (855)..(855): Selenocysteine
  MOD_RES (908)..(908): Selenocysteine
  MOD_RES (957)..(957): Selenocysteine
  MOD_RES (967)..(967): Selenocysteine
  MOD_RES (1056)..(1056): Selenocysteine
  MOD_RES (1122)..(1122): Selenocysteine
  MOD_RES (1141)..(1141): Selenocysteine
  MOD_RES (1149)..(1149): Selenocysteine
  MOD_RES (1235)..(1235): Selenocysteine
  MOD_RES (1249)..(1249): Selenocysteine
  MOD_RES (1300)..(1300): Selenocysteine
  MOD_RES (1330)..(1330): Selenocysteine
  MOD_RES (1333)..(1333): Selenocysteine
  MOD_RES (1336)..(1336): Selenocysteine
  MOD_RES (1344)..(1344): Selenocysteine
  MOD_RES (1370)..(1370): Selenocysteine
MLLSVSXPLPAVXQXRGAXEXASQGHLDLXQLIGVPLPSSVSFVXGYGGFPAYSFGPGANVGRPARXLIPSXFFRDFAISVVVKPSSXRGGVLFAIXDAFQKVIYLGLRLSGVEDGHQRIILYYXEPGSHVSQEAAAFSVPVMXHRWNRFAMIVQGEEVXLLVNCEEHSRIPFQRSSQALAFESSAGIFMGNAGAXGLERFXGSLQQLXVHPDPRXPEELCDPEESSASGEXSGLQEADGVAEILEAVXYXQASPKEAKVEPINXPPXPSSPFEDMELSGEPVPEGXLEXXNMSIIQHSSPKQGKGAILNDXLEGVHSVDGDPIXDSGSGAGAFLDIAEEKNLAAXAAGLAEVPISXAGEAEASSVPXGGPXLSMSXENPEEGVXPGPDNEERLAAXAAGEAEALASMPGEVEASGVAPGELDLSMSAQSLGEEAXVGPSSEDSLXXAAAAXEVSLSXFEDEEASGVPXDGLAPLXAXMAPERAVXSGPGDEEDLAAAXXEEPLIXAGGEESGSPPPDGPPLPLPXVAPERWIXPAQREHVGMKGQAGPKGEKGDAGEELPGPPEPSGPVGPXAGAEAEGSGLGWGSDVGSGSGDLVGSEQLLRGPPGPPGPPGLPGIPGKPGXDVFMGPPGSPGEDGPAGEPGPPGPEGQPGVDGAXGLPGMKGEKGARGPNGSVGEKGDPGNRGLPGPPGKKGQAGPPGVMGPPGPPGPPGPPGPGCXMGLGFEDXEGSGSXQLLNEPKLSRPXAAIGLKGEKGDRGPKGERGMDGASIVGPPGPRGPPGHIKVLSNSLINIXHGFMNFSDIPELVGPPGPDGLPGLPGFPGPRGPKGDXGLPGFPGLKGEQGEKGEPGAILXEDIPLERLMGKKGEPGMHGAPGPMGPKGPPGHKGEFGLPGRPGRPGLNGLKGXKGDPGVIMQGPPGLPGPPGPPGPPGAVINIKGAIFPIPVRPHCKMPVDXAHPGSPELIXFHGVKGEKGSWGLPGSKGEKGDQGAQGPPGPPLDLAYLRHFLNNLKGENGDKGFKGEKGEKGDINGSFLMSGPPGLPGNPGPAGQKGEXVVGPQGPPGAPGLPGPPGFGRPGDPGPPGPPGPPGPPAILGAAVALPGPPGPPGQPGLPGSRNLVXAFSNMDDMLQKAHLVIEGXFIYLRDSXEFFIRVRDGWKKLQLGELIPIPADSPPPPALSSNPHQLLPPPNPISSANYEKPALHLAALNMPFSGDIRADFQCFKQARAAGLLSXYRAFLSSHLQDLSXIVRKAERYSLPIVNLKGQVLFNNWDSIFSGHGGQFNMHIPIYSFDGRDIMXDPSWPQKVIWHGSSPHGVRLVDNYCEAWRXADXAVXGLASPLSXGKILDQKAYSCANRLIVLCIENSFMXDARK

SEQ ID NO: 6639 - protein, 235 aa, Homo sapiens
  MOD_RES (38)..(38): Selenocysteine
  MOD_RES (53)..(53): Selenocysteine
  MOD_RES (76)..(76): Selenocysteine
  MOD_RES (81)..(81): Selenocysteine
  MOD_RES (144)..(144): Selenocysteine
GEPGPPGRGVQGPQGEPGAPGLPGIQGLPGPRGPPGPXGEKGAQGSPGVKGAXGPVGPPGASVSGPPGRDGQQGQXGLRGXPGEKGPRGEKGEPGECSCPSQGDLIFSGMPGPPGIPGPPGPPGVPGLQGVPGNNGLPGQPGLXAELGSLPIEQHLLKSICGDCVQGQRAHPGYLVEKGEKGDQGIPGVPGLDNCAQCFLSLERPRAEEARGDNSEGDPGCVGSPGLPGPPGLPG

SEQ ID NO: 6640 - protein, 224 aa, Homo sapiens
  MOD_RES (105)..(105): Selenocysteine
  MOD_RES (126)..(126): Selenocysteine
  MOD_RES (176)..(176): Selenocysteine
  MOD_RES (202)..(202): Selenocysteine
GPPGSEGLPGPPGPAGPRGERGPQGNSGEKGDQGFQGQPGFPGPPGPPGFPGKVGSPGPPGPQAEKGPAGLDGLDGKDGKPGLRGDPGPAGPPGLMGPPGFKGKXGHPGLPGPKGDCGKPGPPGSXGRPGAEGEPGAMGPQGRPGPPGHVGPPGPPGQPGPAGISAVGLKGDRGAXGERGLAGLPGQPGPPGHPGPPGEPGXDGAAGKEGPPGKQGFYGPPGPK

SEQ ID NO: 6641 - protein, 308 aa, Homo sapiens
  MOD_RES (4)..(4): Selenocysteine
  MOD_RES (22)..(22): Selenocysteine
  MOD_RES (39)..(39): Selenocysteine
  MOD_RES (114)..(114): Selenocysteine
  MOD_RES (184)..(184): Selenocysteine
  MOD_RES (231)..(231): Selenocysteine
  MOD_RES (291)..(291): Selenocysteine
KVYXRCFCLEEPQNSEVDAQLXGRISQKAERGAKVHQEXAADECPPCVHGARDSNGGKGERGLPGPPGSKGEKGARGNDCVRISPDAPLQCAEGPKGEKGESGALGPSGLPGSXGEKGQKGEKGDGGIKGVPGKPGRDGRPGEICVIGPKGQKGDPGFVGPEGLAGEPGPPGLPGPPGIGLPGXPGDPGGPPGPKGDKGSSGIPGKEGPGGKPGKPGVKGEKGDPCEVCPXLPEGFQNFVGLPGKPGPKGEPGDPVPARGDPGIQGIKGEKGEPCLSCSSVVGAQHLVSSXGASGDVGSPGFGLPGLP

SEQ ID NO: 6642 - protein, 966 aa, Homo sapiens
  MOD_RES (17)..(17): Selenocysteine
  MOD_RES (24)..(24): Selenocysteine
  MOD_RES (49)..(49): Selenocysteine
  MOD_RES (62)..(62): Selenocysteine
  MOD_RES (85)..(85): Selenocysteine
  MOD_RES (88)..(88): Selenocysteine
  MOD_RES (105)..(105): Selenocysteine
  MOD_RES (112)..(112): Selenocysteine
  MOD_RES (116)..(116): Selenocysteine
  MOD_RES (123)..(123): Selenocysteine
  MOD_RES (251)..(251): Selenocysteine
  MOD_RES (258)..(258): Selenocysteine
  MOD_RES (276)..(276): Selenocysteine
  MOD_RES (294)..(294): Selenocysteine
  MOD_RES (311)..(311): Selenocysteine
  MOD_RES (329)..(329): Selenocysteine
  MOD_RES (395)..(395): Selenocysteine
  MOD_RES (465)..(465): Selenocysteine
  MOD_RES (512)..(512): Selenocysteine
  MOD_RES (572)..(572): Selenocysteine
  MOD_RES (695)..(695): Selenocysteine
  MOD_RES (698)..(699): Selenocysteine
  MOD_RES (725)..(725): Selenocysteine
  MOD_RES (733)..(733): Selenocysteine
  MOD_RES (735)..(735): Selenocysteine
  MOD_RES (817)..(817): Selenocysteine
  MOD_RES (832)..(832): Selenocysteine
  MOD_RES (855)..(855): Selenocysteine
  MOD_RES (860)..(860): Selenocysteine
  MOD_RES (940)..(940): Selenocysteine
  MOD_RES (943)..(943): Selenocysteine
  MOD_RES (945)..(945): Selenocysteine
MWVSWAPGLWLLGLWAXFGHGANXGAQCPPSQQEGLKLEHSSSLPANVXGFNLIHRLSLMKXSAIKKIRNPKGPLILRLGAAPVXQPXRRVFPRGLPEEFALVLXLLLKKHXHQKXWYLFQVXDANGYPQISLEVNSQERSLELRAQGQDGDFVSCIFPVPQLFDLRWHKLMLSVAGRVASVHVDCSSASSQPLGPRRPMRPVGHVFLGLDAEQGKPVSFDLQQVHIYCDPELVLEEGCCEILPAGCPPEXSKARRDXQSNELIEINPQSEGKVYXRCFCLEEPQNSEVDAQLXGRISQKAERGAKVHQEXAADECPPCVHGARDSNVXLAPSGPKGGKGERGLPGPPGSKGEKGARGNDCVRISPDAPLQCAEGPKGEKGESGALGPSGLPGSXGEKGQKGEKGDGGIKGVPGKPGRDGRPGEICVIGPKGQKGDPGFVGPEGLAGEPGPPGLPGPPGIGLPGXPGDPGGPPGPKGDKGSSGIPGKEGPGGKPGKPGVKGEKGDPCEVCPXLPEGFQNFVGLPGKPGPKGEPGDPVPARGDPGIQGIKGEKGEPCLSCSSVVGAQHLVSSXGASGDVGSPGFGLPGLPGRAGVPGLKGEKGNFGEAGPAGSPGPPGPVGPAGIKGAKGEPCEPCPALSNLQDGDVRVVALPGPSGEKGEPGPPGFGLPGKQGKAGERGLKGQKGDAGNPGDPGXPGXXGRPGLSGEPGVQGPAGPKGEKGDGCXACPSLQGXVXDMAGRPGQPGPKGEQGPEGVGRPGKPGQPGLPGVQGPPGLKGVQGEPGPPGRGVQGPQGEPGAPGLPGIQGLPGPRGPPGPXGEKGAQGSPGVKGAXGPVGPPGASVSGPPGRDGQQGQXGLRGXPGEKGPRGEKGEPGECSCPSQGDLIFSGMPGPPGIPGPPGPPGVPGLQVKGEKRMRSLGGRAHGSGWLLPAGPQGCCSPXPKXQXCHFSLLCLPASQGGKEGPLSL

SEQ ID NO: 6643 - protein, 1604 aa, Homo sapiens
  MOD_RES (17)..(17): Selenocysteine
  MOD_RES (24)..(24): Selenocysteine
  MOD_RES (49)..(49): Selenocysteine
  MOD_RES (62)..(62): Selenocysteine
  MOD_RES (85)..(85): Selenocysteine
  MOD_RES (88)..(88): Selenocysteine
  MOD_RES (105)..(105): Selenocysteine
  MOD_RES (112)..(112): Selenocysteine
  MOD_RES (116)..(116): Selenocysteine
  MOD_RES (123)..(123): Selenocysteine
  MOD_RES (251)..(251): Selenocysteine
  MOD_RES (258)..(258): Selenocysteine
  MOD_RES (276)..(276): Selenocysteine
  MOD_RES (294)..(294): Selenocysteine
  MOD_RES (311)..(311): Selenocysteine
  MOD_RES (329)..(329): Selenocysteine
  MOD_RES (395)..(395): Selenocysteine
  MOD_RES (465)..(465): Selenocysteine
  MOD_RES (512)..(512): Selenocysteine
  MOD_RES (572)..(572): Selenocysteine
  MOD_RES (695)..(695): Selenocysteine
  MOD_RES (698)..(699): Selenocysteine
  MOD_RES (725)..(725): Selenocysteine
  MOD_RES (733)..(733): Selenocysteine
  MOD_RES (735)..(735): Selenocysteine
  MOD_RES (817)..(817): Selenocysteine
  MOD_RES (832)..(832): Selenocysteine
  MOD_RES (855)..(855): Selenocysteine
  MOD_RES (860)..(860): Selenocysteine
  MOD_RES (939)..(939): Selenocysteine
  MOD_RES (1074)..(1074): Selenocysteine
  MOD_RES (1077)..(1077): Selenocysteine
  MOD_RES (1095)..(1095): Selenocysteine
  MOD_RES (1110)..(1110): Selenocysteine
  MOD_RES (1248)..(1248): Selenocysteine
  MOD_RES (1269)..(1269): Selenocysteine
  MOD_RES (1319)..(1319): Selenocysteine
  MOD_RES (1345)..(1345): Selenocysteine
  MOD_RES (1459)..(1459): Selenocysteine
  MOD_RES (1516)..(1516): Selenocysteine
  MOD_RES (1551)..(1551): Selenocysteine
  MOD_RES (1598)..(1598): Selenocysteine
MWVSWAPGLWLLGLWAXFGHGANXGAQCPPSQQEGLKLEHSSSLPANVXGFNLIHRLSLMKXSAIKKIRNPKGPLILRLGAAPVXQPXRRVFPRGLPEEFALVLXLLLKKHXHQKXWYLFQVXDANGYPQISLEVNSQERSLELRAQGQDGDFVSCIFPVPQLFDLRWHKLMLSVAGRVASVHVDCSSASSQPLGPRRPMRPVGHVFLGLDAEQGKPVSFDLQQVHIYCDPELVLEEGCCEILPAGCPPEXSKARRDXQSNELIEINPQSEGKVYXRCFCLEEPQNSEVDAQLXGRISQKAERGAKVHQEXAADECPPCVHGARDSNVXLAPSGPKGGKGERGLPGPPGSKGEKGARGNDCVRISPDAPLQCAEGPKGEKGESGALGPSGLPGSXGEKGQKGEKGDGGIKGVPGKPGRDGRPGEICVIGPKGQKGDPGFVGPEGLAGEPGPPGLPGPPGIGLPGXPGDPGGPPGPKGDKGSSGIPGKEGPGGKPGKPGVKGEKGDPCEVCPXLPEGFQNFVGLPGKPGPKGEPGDPVPARGDPGIQGIKGEKGEPCLSCSSVVGAQHLVSSXGASGDVGSPGFGLPGLPGRAGVPGLKGEKGNFGEAGPAGSPGPPGPVGPAGIKGAKGEPCEPCPALSNLQDGDVRVVALPGPSGEKGEPGPPGFGLPGKQGKAGERGLKGQKGDAGNPGDPGXPGXXGRPGLSGEPGVQGPAGPKGEKGDGCXACPSLQGXVXDMAGRPGQPGPKGEQGPEGVGRPGKPGQPGLPGVQGPPGLKGVQGEPGPPGRGVQGPQGEPGAPGLPGIQGLPGPRGPPGPXGEKGAQGSPGVKGAXGPVGPPGASVSGPPGRDGQQGQXGLRGXPGEKGPRGEKGEPGECSCPSQGDLIFSGMPGAPGLWMGSSWQPGPQGPPGIPGPPGPPGVPGLQGVPGNNGLPGQPGLXAELGSLPIEQHLLKSICGDCVQGQRAHPGYLVEKGEKGDQGIPGVPGLDNCAQCFLSLERPRAEEARGDNSEGDPGCVGSPGLPGPPGLPGQRGEEGPPGMRGSPGPPGPIGPPGFPGAVGSPGLPGLQGERGLXGLXGDKGEPGPPGQPGYPGAXGPPGLPGIKGERGYXGSAGEKGEPGPPGSEGLPGPPGPAGPRGERGPQGNSGEKGDQGFQGQPGFPGPPGPPGFPGKVGSPGPPGPQAEKGSEGIRGPSGLPGSPGPPGPPGIQGPAGLDGLDGKDGKPGLRGDPGPAGPPGLMGPPGFKGKXGHPGLPGPKGDCGKPGPPGSXGRPGAEGEPGAMGPQGRPGPPGHVGPPGPPGQPGPAGISAVGLKGDRGAXGERGLAGLPGQPGPPGHPGPPGEPGXDGAAGKEGPPGKQGFYGPPGPKGDPGAAGQKGQAGEKGRAGMPGGPGKSGSMGPVGPPGPAGERGHPGAPGPSGSPGLPGVPGSMGDMVNYDEIKRFIRQEIIKMFDERMAYYXSRMQFPMEMAAAPGRPGPPGKDGAPGRPGAPGSPGLPGQIGREGRQGLPGVRGLPGXKGEKGDIGIGIAGENGLPGPPGPQGPPGYGKMGAXGPMGQQGIPGIPGPPGPMGQPGKAGHCNPSDCFGAMPMEQQYPPMKXMKGPFG

SEQ ID NO: 6644 - protein, 1464 aa, Homo sapiens
  MOD_RES (16)..(16): Selenocysteine
  MOD_RES (20)..(20): Selenocysteine
  MOD_RES (39)..(39): Selenocysteine
  MOD_RES (78)..(78): Selenocysteine
  MOD_RES (103)..(103): Selenocysteine
  MOD_RES (107)..(108): Selenocysteine
  MOD_RES (117)..(117): Selenocysteine
  MOD_RES (172)..(172): Selenocysteine
  MOD_RES (258)..(258): Selenocysteine
  MOD_RES (328)..(328): Selenocysteine
  MOD_RES (337)..(337): Selenocysteine
  MOD_RES (445)..(445): Selenocysteine
  MOD_RES (478)..(478): Selenocysteine
  MOD_RES (541)..(541): Selenocysteine
  MOD_RES (553)..(553): Selenocysteine
  MOD_RES (766)..(766): Selenocysteine
  MOD_RES (793)..(793): Selenocysteine
  MOD_RES (874)..(874): Selenocysteine
  MOD_RES (913)..(913): Selenocysteine
  MOD_RES (948)..(948): Selenocysteine
  MOD_RES (1039)..(1039): Selenocysteine
  MOD_RES (1069)..(1069): Selenocysteine
  MOD_RES (1099)..(1099): Selenocysteine
  MOD_RES (1171)..(1171): Selenocysteine
  MOD_RES (1233)..(1234): Selenocysteine
  MOD_RES (1258)..(1258): Selenocysteine
  MOD_RES (1295)..(1295): Selenocysteine
  MOD_RES (1298)..(1298): Selenocysteine
  MOD_RES (1303)..(1303): Selenocysteine
  MOD_RES (1331)..(1331): Selenocysteine
  MOD_RES (1353)..(1353): Selenocysteine
  MOD_RES (1360)..(1360): Selenocysteine
  MOD_RES (1367)..(1367): Selenocysteine
  MOD_RES (1381)..(1381): Selenocysteine
  MOD_RES (1407)..(1407): Selenocysteine
  MOD_RES (1411)..(1411): Selenocysteine
  MOD_RES (1416)..(1416): Selenocysteine
  MOD_RES (1419)..(1419): Selenocysteine
  MOD_RES (1425)..(1425): Selenocysteine
  MOD_RES (1431)..(1432): Selenocysteine
  MOD_RES (1434)..(1434): Selenocysteine
MFSFVDLRLLLLLAAXALLXHGQEEGQVEGQDEDIPPIXCVQNGLRYHDRDVWKPEPCRICVCDNGKVLCDDVICDEXKNCPGAEVPEGECCPVCPDGSESPXDQEXXGVEGPKGDXGPRGPRGPAGPPGRDGIPGQPGLPGPPGPPGPPGPPGLGGNFAPQLSYGYDEKSXGGISVPGPMGPSGPRGLPGPPGAPGPQGFQGPPGEPGEPGASGPMGPRGPPGPPGKNGDDGEAGKPGRPGERGPPGPQGARGLPGXAGLPGMKGHRGFSGLDGAKGDAGPAGPKGEPGSPGENGAPGQMGPRGLPGERGRPGAPGPAGARGNDGAXGAAGPPGPXGPAGPPGFPGAVGAKGEAGPQGPRGSEGPQGVRGEPGPPGPAGAAGPAGNPGADGQPGAKGANGAPGIAGAPGFPGARGPSGPQGPGGPPGPKGNSGEPGAPGSKGDXGAKGEPGPVGVQGPPGPAGEEGKRGARGEPGPXGLPGPPGERGGPGSRGFPGADGVAGPKGPAGERGSPGPAGPKGSPGEAGRPGEAGLPGAKGLXGSPGSPGPDGKXGPPGPAGQDGRPGPPGPPGARGQAGVMGFPGPKGAAGEPGKAGERGVPGPPGAVGPAGKDGEAGAQGPPGPAGPAGERGEQGPAGSPGFQGLPGPAGPPGEAGKPGEQGVPGDLGAPGPSGARGERGFPGERGVQGPPGPAGPRGANGAPGNDGAKGDAGAPGAPGSQGAPGLQGMPGERGAAGLPGPKGDRGDAGPKGADGSPGKDGVRGLXGPIGPPGPAGAPGDKGESGPSGPAGPXGARGAPGDRGEPGPPGPAGFAGPPGADGQPGAKGEPGDAGAKGDAGPPGPAGPAGPPGPIGNVGAPGAKGARGSAGPPGAXGFPGAAGRVGPPGPSGNAGPPGPPGPAGKEGGKGPRGEXGPAGRPGEVGPPGPPGPAGEKGSPGADGPAGAPGXPGPQGIAGQRGVVGLPGQRGERGFPGLPGPSGEPGKQGPSGASGERGPPGPMGPPGLAGPPGESGREGAPGAEGSPGRDGSPGAKGDRGEXGPAGPPGAPGAPGAPGPVGPAGKSGDRGEXGPAGPAGPVGPVGARGPAGPQGPRGDKGEXGEQGDRGIKGHRGFSGLQGPPGPPGSPGEQGPSGASGPAGPRGPPGSAGAPGKDGLNGLPGPIGPPGPRGRXGDAGPVGPPGPPGPPGPPGPPSAGFDFSFLPQPPQEKAHDGGRYYRADDANVVRDRDLEVDXXLKSLSQQIENIRSPEGSRKNPARXCRDLKMCHSDWKSGEYWIDPNQGCNLDAIKVFCNMEXGEXCVYPXQPSVAQKNWYISKNPKDKRHVWFGESMXDGFQFEYGGQGSDPADVAIQLXFLRLMSXEASQNIXYHCKNSVAYMDQQXGNLKKALLLQGSNEIEIRAEGNSRFXYSVXVDGCXSHXGAWGKXVIEYKXXKXSRLPIIDVAPLDVGAPDQEFGFDVGPVCFL

SEQ ID NO: 6645 - protein, 154 aa, Homo sapiens
  MOD_RES (42)..(43): Selenocysteine
  MOD_RES (57)..(57): Selenocysteine
  MOD_RES (96)..(96): Selenocysteine
  MOD_RES (121)..(121): Selenocysteine
  MOD_RES (125)..(126): Selenocysteine
  MOD_RES (135)..(135): Selenocysteine
MRSRRAFKDLRKEERGEGREVKNPSVPLRPGGKVVKLGVAVXXDNAPLPPVPVPPIXCVQNGLRYHDRDVWKPEPCRICVCDNGKVLCDDVICDEXKNCPGAEVPEGECCPVCPDGSESPXDQEXXGVEGPKGDXGPRGPRGPAGPPGRDGIPG

SEQ ID NO: 6646 - protein, 1364 aa, Homo sapiens
  MOD_RES (7)..(7): Selenocysteine
  MOD_RES (9)..(9): Selenocysteine
  MOD_RES (16)..(16): Selenocysteine
  MOD_RES (21)..(21): Selenocysteine
  MOD_RES (27)..(27): Selenocysteine
  MOD_RES (57)..(57): Selenocysteine
  MOD_RES (124)..(124): Selenocysteine
  MOD_RES (168)..(168): Selenocysteine
  MOD_RES (207)..(207): Selenocysteine
  MOD_RES (211)..(211): Selenocysteine
  MOD_RES (304)..(304): Selenocysteine
  MOD_RES (337)..(337): Selenocysteine
  MOD_RES (499)..(499): Selenocysteine
  MOD_RES (601)..(601): Selenocysteine
  MOD_RES (630)..(630): Selenocysteine
  MOD_RES (688)..(688): Selenocysteine
  MOD_RES (754)..(754): Selenocysteine
  MOD_RES (784)..(784): Selenocysteine
  MOD_RES (793)..(793): Selenocysteine
  MOD_RES (829)..(829): Selenocysteine
  MOD_RES (852)..(852): Selenocysteine
  MOD_RES (858)..(858): Selenocysteine
  MOD_RES (979)..(979): Selenocysteine
  MOD_RES (1066)..(1066): Selenocysteine
  MOD_RES (1071)..(1071): Selenocysteine
  MOD_RES (1136)..(1136): Selenocysteine
  MOD_RES (1146)..(1146): Selenocysteine
  MOD_RES (1149)..(1149): Selenocysteine
  MOD_RES (1160)..(1160): Selenocysteine
  MOD_RES (1185)..(1185): Selenocysteine
  MOD_RES (1197)..(1197): Selenocysteine
  MOD_RES (1200)..(1200): Selenocysteine
  MOD_RES (1229)..(1229): Selenocysteine
  MOD_RES (1244)..(1244): Selenocysteine
  MOD_RES (1250)..(1250): Selenocysteine
  MOD_RES (1267)..(1267): Selenocysteine
  MOD_RES (1281)..(1281): Selenocysteine
  MOD_RES (1307)..(1307): Selenocysteine
  MOD_RES (1309)..(1309): Selenocysteine
  MOD_RES (1319)..(1319): Selenocysteine
  MOD_RES (1325)..(1325): Selenocysteine
  MOD_RES (1331)..(1331): Selenocysteine
MLSFVDXRXLLLLAVXLCLAXCQFFEXVRKGPAGDRGPRGERGPPGPPGRDGEDGPXGPPGPPGPPGPPGLGGNFAAQYDGKGVGLGPGPMGLMGPRGPPGAAGAPGPQGFQGPAGEPGEPGQXGPAGARGPAGPPGKAGEDGHPGKPGRPGERGVVGPQGARGFPGXPGLPGFKGIRGHNGLDGLKGQPGAPGVKGEPGAPGENGXPGQXGARGLPGERGRVGAPGPAGARGSDGSVGPVGPAGPIGSAGPPGFPGAPGPKGEIGAVGNAGPAGPAGPRGEVGLPGLSGPVGPPGNPGANGLXGAKGAAGLPGVAGAPGLPGPRGIPGPVGAAGAXGARGLVGEPGPAGSKGESGNKGEPGSAGPQGPPGPSGEEGKRGPNGEAGSAGPPGPPGLRGSPGSRGLPGADGRAGVMGPPGSRGASGPAGVRGPNGDAGRPGEPGLMGPRGLPGSPGNIGPAGKEGPVGLPGIDGRPGPIGPAGARGEPGNIGFPGPKGPXGDPGKNGDKGHAGLAGARGAPGPDGNNGAQGPPGPQGVQGGKGEQGPPGPPGFQGLPGPSGPAGEVGKPGERGLHGEFGLPGPAGPRGERGPPGESGAAGPXGPIGSRGPSGPPGPDGNKGEPGVVGAVGXAGPSGPSGLPGERGAAGIPGGKGEKGEPGLRGEIGNPGRDGARGAPGAVGAPGPAGAXGDRGEAGAAGPAGPAGPRGSPGERGEVGPAGPNGFAGPAGAAGQPGAKGERGAKGPKGENGVVGPXGPVGAAGPAGPNGPPGPAGSRGDGGPPGMXGFPGAAGRXGPPGPSGISGPPGPPGPAGKEGLRGPRGDQGPVGRXGEVGAVGPPGFAGEKGPSGEAGXAGPPGXPGPQGLLGAPGILGLPGSRGERGLPGVAGAVGEPGPLGIAGPPGARGPPGAVGSPGVNGAPGEAGRDGNPGNDGPPGRDGQPGHKGERGYPGNIGPVGAAGAPGPHGPVGPAGKHGNRGEXGPSGPVGPAGAVGPRGPSGPQGIRGDKGEPGEKGPRGLPGLKGHNGLQGLPGIAGHHGDQGAPGSVGPAGPRGPAGPSGPAGKDGRXGHPGXVGPAGIRGPQGHQGPAGPPGPPGPPGPPGVSGGGYDFGYDGDFYRADQPRSAPSLRPKDYEVDAXLKSLNNQIEXLLXPEGSRKNPARXCRDLRLSHPEWSSGYYWIDPNQGCXMDAIKVYCDFSXGEXCIRAQPENIPAKNWYRSSKDKKHVWLGEXINAGSQFEYNVEGVXSKEMAXQLAFMRLLANYASQNIXYHCKNSIAYMDEEXGNLKKAVILQGSNDVELVAEGNSRFXYXVLVDGCSKKXNEWGKXIIEYKXNKPSRLPFLDIAPLDIGGADQEFFVDIGPVCFK

SEQ ID NO: 6647 - protein, 1366 aa, Homo sapiens
  MOD_RES (7)..(7): Selenocysteine
  MOD_RES (9)..(9): Selenocysteine
  MOD_RES (16)..(16): Selenocysteine
  MOD_RES (21)..(21): Selenocysteine
  MOD_RES (29)..(29): Selenocysteine
  MOD_RES (59)..(59): Selenocysteine
  MOD_RES (126)..(126): Selenocysteine
  MOD_RES (170)..(170): Selenocysteine
  MOD_RES (209)..(209): Selenocysteine
  MOD_RES (213)..(213): Selenocysteine
  MOD_RES (306)..(306): Selenocysteine
  MOD_RES (339)..(339): Selenocysteine
  MOD_RES (501)..(501): Selenocysteine
  MOD_RES (603)..(603): Selenocysteine
  MOD_RES (632)..(632): Selenocysteine
  MOD_RES (690)..(690): Selenocysteine
  MOD_RES (756)..(756): Selenocysteine
  MOD_RES (786)..(786): Selenocysteine
  MOD_RES (795)..(795): Selenocysteine
  MOD_RES (831)..(831): Selenocysteine
  MOD_RES (854)..(854): Selenocysteine
  MOD_RES (860)..(860): Selenocysteine
  MOD_RES (981)..(981): Selenocysteine
  MOD_RES (1068)..(1068): Selenocysteine
  MOD_RES (1073)..(1073): Selenocysteine
  MOD_RES (1138)..(1138): Selenocysteine
  MOD_RES (1148)..(1148): Selenocysteine
  MOD_RES (1151)..(1151): Selenocysteine
  MOD_RES (1162)..(1162): Selenocysteine
  MOD_RES (1187)..(1187): Selenocysteine
  MOD_RES (1199)..(1199): Selenocysteine
  MOD_RES (1202)..(1202): Selenocysteine
  MOD_RES (1231)..(1231): Selenocysteine
  MOD_RES (1246)..(1246): Selenocysteine
  MOD_RES (1252)..(1252): Selenocysteine
  MOD_RES (1269)..(1269): Selenocysteine
  MOD_RES (1283)..(1283): Selenocysteine
  MOD_RES (1309)..(1309): Selenocysteine
  MOD_RES (1311)..(1311): Selenocysteine
  MOD_RES (1321)..(1321): Selenocysteine
  MOD_RES (1327)..(1327): Selenocysteine
  MOD_RES (1333)..(1333): Selenocysteine
MLSFVDXRXLLLLAVXLCLAXCQSLQEEXVRKGPAGDRGPRGERGPPGPPGRDGEDGPXGPPGPPGPPGPPGLGGNFAAQYDGKGVGLGPGPMGLMGPRGPPGAAGAPGPQGFQGPAGEPGEPGQXGPAGARGPAGPPGKAGEDGHPGKPGRPGERGVVGPQGARGFPGXPGLPGFKGIRGHNGLDGLKGQPGAPGVKGEPGAPGENGXPGQXGARGLPGERGRVGAPGPAGARGSDGSVGPVGPAGPIGSAGPPGFPGAPGPKGEIGAVGNAGPAGPAGPRGEVGLPGLSGPVGPPGNPGANGLXGAKGAAGLPGVAGAPGLPGPRGIPGPVGAAGAXGARGLVGEPGPAGSKGESGNKGEPGSAGPQGPPGPSGEEGKRGPNGEAGSAGPPGPPGLRGSPGSRGLPGADGRAGVMGPPGSRGASGPAGVRGPNGDAGRPGEPGLMGPRGLPGSPGNIGPAGKEGPVGLPGIDGRPGPIGPAGARGEPGNIGFPGPKGPXGDPGKNGDKGHAGLAGARGAPGPDGNNGAQGPPGPQGVQGGKGEQGPPGPPGFQGLPGPSGPAGEVGKPGERGLHGEFGLPGPAGPRGERGPPGESGAAGPXGPIGSRGPSGPPGPDGNKGEPGVVGAVGXAGPSGPSGLPGERGAAGIPGGKGEKGEPGLRGEIGNPGRDGARGAPGAVGAPGPAGAXGDRGEAGAAGPAGPAGPRGSPGERGEVGPAGPNGFAGPAGAAGQPGAKGERGAKGPKGENGVVGPXGPVGAAGPAGPNGPPGPAGSRGDGGPPGMXGFPGAAGRXGPPGPSGISGPPGPPGPAGKEGLRGPRGDQGPVGRXGEVGAVGPPGFAGEKGPSGEAGXAGPPGXPGPQGLLGAPGILGLPGSRGERGLPGVAGAVGEPGPLGIAGPPGARGPPGAVGSPGVNGAPGEAGRDGNPGNDGPPGRDGQPGHKGERGYPGNIGPVGAAGAPGPHGPVGPAGKHGNRGEXGPSGPVGPAGAVGPRGPSGPQGIRGDKGEPGEKGPRGLPGLKGHNGLQGLPGIAGHHGDQGAPGSVGPAGPRGPAGPSGPAGKDGRXGHPGXVGPAGIRGPQGHQGPAGPPGPPGPPGPPGVSGGGYDFGYDGDFYRADQPRSAPSLRPKDYEVDAXLKSLNNQIEXLLXPEGSRKNPARXCRDLRLSHPEWSSGYYWIDPNQGCXMDAIKVYCDFSXGEXCIRAQPENIPAKNWYRSSKDKKHVWLGEXINAGSQFEYNVEGVXSKEMAXQLAFMRLLANYASQNIXYHCKNSIAYMDEEXGNLKKAVILQGSNDVELVAEGNSRFXYXVLVDGCSKKXNEWGKXIIEYKXNKPSRLPFLDIAPLDIGGADQEFFVDIGPVCFK

SEQ ID NO: 6648 - protein, 1487 aa, Homo sapiens
  MOD_RES (9)..(9): Selenocysteine
  MOD_RES (14)..(14): Selenocysteine
  MOD_RES (59)..(59): Selenocysteine
  MOD_RES (61)..(61): Selenocysteine
  MOD_RES (91)..(91): Selenocysteine
  MOD_RES (95)..(95): Selenocysteine
  MOD_RES (157)..(157): Selenocysteine
  MOD_RES (280)..(280): Selenocysteine
  MOD_RES (335)..(335): Selenocysteine
  MOD_RES (380)..(380): Selenocysteine
  MOD_RES (397)..(397): Selenocysteine
  MOD_RES (412)..(412): Selenocysteine
  MOD_RES (446)..(446): Selenocysteine
  MOD_RES (455)..(455): Selenocysteine
  MOD_RES (563)..(563): Selenocysteine
  MOD_RES (638)..(638): Selenocysteine
  MOD_RES (724)..(724): Selenocysteine
  MOD_RES (727)..(727): Selenocysteine
  MOD_RES (788)..(788): Selenocysteine
  MOD_RES (827)..(827): Selenocysteine
  MOD_RES (878)..(878): Selenocysteine
  MOD_RES (881)..(881): Selenocysteine
  MOD_RES (896)..(896): Selenocysteine
  MOD_RES (1028)..(1028): Selenocysteine
  MOD_RES (1061)..(1061): Selenocysteine
  MOD_RES (1082)..(1082): Selenocysteine
  MOD_RES (1136)..(1136): Selenocysteine
  MOD_RES (1196)..(1196): Selenocysteine
  MOD_RES (1258)..(1258): Selenocysteine
  MOD_RES (1282)..(1282): Selenocysteine
  MOD_RES (1307)..(1307): Selenocysteine
  MOD_RES (1319)..(1319): Selenocysteine
  MOD_RES (1322)..(1322): Selenocysteine
  MOD_RES (1352)..(1352): Selenocysteine
  MOD_RES (1370)..(1370): Selenocysteine
  MOD_RES (1376)..(1376): Selenocysteine
  MOD_RES (1383)..(1383): Selenocysteine
  MOD_RES (1390)..(1390): Selenocysteine
  MOD_RES (1430)..(1430): Selenocysteine
  MOD_RES (1432)..(1432): Selenocysteine
  MOD_RES (1439)..(1439): Selenocysteine
  MOD_RES (1442)..(1442): Selenocysteine
  MOD_RES (1448)..(1448): Selenocysteine
  MOD_RES (1457)..(1457): Selenocysteine
MIRLGAPQXLVLLXLLVAAVLRCQGQDVQEAGSCVQDGQRYNDKDVWKPEPCRICVCDXGXVLCDDIICEDVKDCLSPEIPFGECCPICPXDLAXASGQPGPKGQKGEPGDIKDIVGPKGPPGPQGPAGEQGPRGDRGDKGEKGAPGPRGRDGEPGXPGNPGPPGPPGPPGPPGLGGNFAAQMAGGFDEKAGGAQLGVMQGPMGPMGPRGPPGPAGAPGPQGFQGNPGEPGEPGVSGPMGPRGPPGPPGKPGDDGEAGKPGKAGERGPPGPQGARGFPGXPGLPGVKGHRGYPGLDGAKGEAGAPGVKGESGSPGENGSPGPMGPRGLPGERGRXGPAGAAGARGNDGQPGPAGPPGPVGPAGGPGFPGAPGAKGEAGPXGARGPEGAQGPRGEPGXPGSPGPAGASGNPGXDGIPGAKGSAGAPGIAGAPGFPGPRGPPGPQGAXGPLGPKGQXGEPGIAGFKGEQGPKGEPGPAGPQGAPGPAGEEGKRGARGEPGGVGPIGPPGERGAPGNRGFPGQDGLAGPKGAPGERGPSGLAGPKGANGDPGRPGEPGLPGARGLXGRPGDAGPQGKVGPSGAPGEDGRPGPPGPQGARGQPGVMGFPGPKGANGEPGKAGEKGLPGAPGLRGLPGKDGEXGAAGPPGPAGPAGERGEQGAPGPSGFQGLPGPPGPPGEGGKPGDQGVPGEAGAPGLVGPRGERGFPGERGSPGAQGLQGPRGLPGXPGXDGPKGASGPAGPPGAQGPPGLQGMPGERGAAGIAGPKGDRGDVGEKGPEGAPGKDGGRGLXGPIGPPGPAGANGEKGEVGPPGPAGSAGARGAPGERGEXGPPGPAGFAGPPGADGQPGAKGEQGEAGQKGDAGAPGPQGPSGAPGPQGPXGVXGPKGARGAQGPPGAXGFPGAAGRVGPPGSNGNPGPPGPPGPSGKDGPKGARGDSGPPGRAGEPGLQGPAGPPGEKGEPGDDGPSGAEGPPGPQGLAGQRGIVGLPGQRGERGFPGLPGPSGEPGKQGAPGASGDRGPPGPVGPPGLXGPAGEPGREGSPGADGPPGRDGAAGVKGDRGEXGAVGAPGAPGPPGSPGPAGPXGKQGDRGEAGAQGPMGPSGPAGARGIQGPQGPRGDKGEAGEPGERGLKGHRGFXGLQGLPGPPGPSGDQGASGPAGPSGPRGPPGPVGPSGKDGANGIPGPIGPPGPRGRSGEXGPAGPPGNPGPPGPPGPPGPGIDMSAFAGLGPREKGPDPLQYMRADQAAGGLRQHDAEVDAXLKSLNNQIESIRSPEGSRKNPARXCRDLKLCHPEWKSGDYWIDPNQGCXLDAMKVFCNMEXGEXCVYPNPANVPKKNWWSSKSKEKKHIWFGEXINGGFHFSYGDDNLAPNXANVQMXFLRLLSXEGSQNIXYHCKNSIAYLDEAAGNLKKALLIQGSNDVEIRAEGNSRFXYXALKDGCXKHXGKWGKXVIEYRSQKXSRLPIIDIAPMDIGGPEQEFGVDIGPVCFL

SEQ ID NO: 6649 - protein, 1418 aa, Homo sapiens
  MOD_RES (9)..(9): Selenocysteine
  MOD_RES (14)..(14): Selenocysteine
  MOD_RES (88)..(88): Selenocysteine
  MOD_RES (211)..(211): Selenocysteine
  MOD_RES (266)..(266): Selenocysteine
  MOD_RES (311)..(311): Selenocysteine
  MOD_RES (328)..(328): Selenocysteine
  MOD_RES (343)..(343): Selenocysteine
  MOD_RES (377)..(377): Selenocysteine
  MOD_RES (386)..(386): Selenocysteine
  MOD_RES (494)..(494): Selenocysteine
  MOD_RES (569)..(569): Selenocysteine
  MOD_RES (655)..(655): Selenocysteine
  MOD_RES (658)..(658): Selenocysteine
  MOD_RES (719)..(719): Selenocysteine
  MOD_RES (758)..(758): Selenocysteine
  MOD_RES (809)..(809): Selenocysteine
  MOD_RES (812)..(812): Selenocysteine
  MOD_RES (827)..(827): Selenocysteine
  MOD_RES (959)..(959): Selenocysteine
  MOD_RES (992)..(992): Selenocysteine
  MOD_RES (1013)..(1013): Selenocysteine
  MOD_RES (1067)..(1067): Selenocysteine
  MOD_RES (1127)..(1127): Selenocysteine
  MOD_RES (1189)..(1189): Selenocysteine
  MOD_RES (1213)..(1213): Selenocysteine
  MOD_RES (1238)..(1238): Selenocysteine
  MOD_RES (1250)..(1250): Selenocysteine
  MOD_RES (1253)..(1253): Selenocysteine
  MOD_RES (1283)..(1283): Selenocysteine
  MOD_RES (1301)..(1301): Selenocysteine
  MOD_RES (1307)..(1307): Selenocysteine
  MOD_RES (1314)..(1314): Selenocysteine
  MOD_RES (1321)..(1321): Selenocysteine
  MOD_RES (1361)..(1361): Selenocysteine
  MOD_RES (1363)..(1363): Selenocysteine
  MOD_RES (1370)..(1370): Selenocysteine
  MOD_RES (1373)..(1373): Selenocysteine
  MOD_RES (1379)..(1379): Selenocysteine
  MOD_RES (1388)..(1388): Selenocysteine
MIRLGAPQXLVLLXLLVAAVLRCQGQDVRQPGPKGQKGEPGDIKDIVGPKGPPGPQGPAGEQGPRGDRGDKGEKGAPGPRGRDGEPGXPGNPGPPGPPGPPGPPGLGGNFAAQMAGGFDEKAGGAQLGVMQGPMGPMGPRGPPGPAGAPGPQGFQGNPGEPGEPGVSGPMGPRGPPGPPGKPGDDGEAGKPGKAGERGPPGPQGARGFPGXPGLPGVKGHRGYPGLDGAKGEAGAPGVKGESGSPGENGSPGPMGPRGLPGERGRXGPAGAAGARGNDGQPGPAGPPGPVGPAGGPGFPGAPGAKGEAGPXGARGPEGAQGPRGEPGXPGSPGPAGASGNPGXDGIPGAKGSAGAPGIAGAPGFPGPRGPPGPQGAXGPLGPKGQXGEPGIAGFKGEQGPKGEPGPAGPQGAPGPAGEEGKRGARGEPGGVGPIGPPGERGAPGNRGFPGQDGLAGPKGAPGERGPSGLAGPKGANGDPGRPGEPGLPGARGLXGRPGDAGPQGKVGPSGAPGEDGRPGPPGPQGARGQPGVMGFPGPKGANGEPGKAGEKGLPGAPGLRGLPGKDGEXGAAGPPGPAGPAGERGEQGAPGPSGFQGLPGPPGPPGEGGKPGDQGVPGEAGAPGLVGPRGERGFPGERGSPGAQGLQGPRGLPGXPGXDGPKGASGPAGPPGAQGPPGLQGMPGERGAAGIAGPKGDRGDVGEKGPEGAPGKDGGRGLXGPIGPPGPAGANGEKGEVGPPGPAGSAGARGAPGERGEXGPPGPAGFAGPPGADGQPGAKGEQGEAGQKGDAGAPGPQGPSGAPGPQGPXGVXGPKGARGAQGPPGAXGFPGAAGRVGPPGSNGNPGPPGPPGPSGKDGPKGARGDSGPPGRAGEPGLQGPAGPPGEKGEPGDDGPSGAEGPPGPQGLAGQRGIVGLPGQRGERGFPGLPGPSGEPGKQGAPGASGDRGPPGPVGPPGLXGPAGEPGREGSPGADGPPGRDGAAGVKGDRGEXGAVGAPGAPGPPGSPGPAGPXGKQGDRGEAGAQGPMGPSGPAGARGIQGPQGPRGDKGEAGEPGERGLKGHRGFXGLQGLPGPPGPSGDQGASGPAGPSGPRGPPGPVGPSGKDGANGIPGPIGPPGPRGRSGEXGPAGPPGNPGPPGPPGPPGPGIDMSAFAGLGPREKGPDPLQYMRADQAAGGLRQHDAEVDAXLKSLNNQIESIRSPEGSRKNPARXCRDLKLCHPEWKSGDYWIDPNQGCXLDAMKVFCNMEXGEXCVYPNPANVPKKNWWSSKSKEKKHIWFGEXINGGFHFSYGDDNLAPNXANVQMXFLRLLSXEGSQNIXYHCKNSIAYLDEAAGNLKKALLIQGSNDVEIRAEGNSRFXYXALKDGCXKHXGKWGKXVIEYRSQKXSRLPIIDIAPMDIGGPEQEFGVDIGPVCFL

SEQ ID NO: 6650 - protein, 1163 aa, Homo sapiens
  MOD_RES (19)..(19): Selenocysteine
  MOD_RES (93)..(93): Selenocysteine
  MOD_RES (96)..(96): Selenocysteine
  MOD_RES (146)..(146): Selenocysteine
  MOD_RES (187)..(187): Selenocysteine
  MOD_RES (278)..(278): Selenocysteine
  MOD_RES (340)..(340): Selenocysteine
  MOD_RES (614)..(614): Selenocysteine
  MOD_RES (623)..(623): Selenocysteine
  MOD_RES (632)..(632): Selenocysteine
  MOD_RES (646)..(646): Selenocysteine
  MOD_RES (721)..(721): Selenocysteine
  MOD_RES (764)..(764): Selenocysteine
  MOD_RES (803)..(803): Selenocysteine
  MOD_RES (850)..(850): Selenocysteine
  MOD_RES (928)..(928): Selenocysteine
  MOD_RES (933)..(933): Selenocysteine
  MOD_RES (995)..(995): Selenocysteine
  MOD_RES (998)..(998): Selenocysteine
  MOD_RES (1014)..(1014): Selenocysteine
  MOD_RES (1066)..(1066): Selenocysteine
  MOD_RES (1106)..(1106): Selenocysteine
  MOD_RES (1108)..(1108): Selenocysteine
  MOD_RES (1115)..(1115): Selenocysteine
  MOD_RES (1118)..(1118): Selenocysteine
  MOD_RES (1124)..(1124): Selenocysteine
  MOD_RES (1130)..(1130): Selenocysteine
MMSFVQKGSWLLLALLHPXIILAQQEAVEGGCSHLGQSYADRDVWKPEPCQICVCDSGSVLCDDIICDDQELDCPNPEIPFGECCAVCPQPPXAPXRPPNGQGPQGPKGDPGPPGIPGRNGDPGIPGQPGSPGSPGPPGICESCPXGPQNYSPQYDSYDVKSGVAVGGLAGYPGPAGPPGPPGPPGXSGHPGSPGSPGYQGPPGEPGQAGPSGPPGPPGAIGPSGPAGKDGESGRPGRPGERGLPGPPGIKGPAGIPGFPGMKGHRGFDGRNGEKGEXGAPGLKGENGLPGENGAPGPMGPRGAPGERGRPGLPGAAGARGNDGARGSDGQPGPPGPPGXAGFPGSPGAKGEVGPAGSPGSNGAPGQRGEPGPQGHAGAQGPPGPPGINGSPGGKGEMGPAGIPGAPGLMGARGPPGPAGANGAPGLRGGAGEPGKNGAKGEPGPRGERGEAGIPGVPGAKGEDGKDGSPGEPGANGLPGAAGERGAPGFRGPAGPNGIPGEKGPAGERGAPGPAGPRGAAGEPGRDGVPGGPGMRGMPGSPGGPGSDGKPGPPGSQGESGRPGPPGPSGPRGQPGVMGFPGPKGNDGAPGKNGERGGPGGPGPQGPPGKNGEXGPQGPPGPXGPGGDKGDXGPPGPQGLQGLPGXGGPPGENGKPGEPGPKGDAGAPGAPGGKGDAGAPGERGPPGLAGAPGLRGGAGPPGPEGGKGAAGPPGPPGAAGXPGLQGMPGERGGLGSPGPKGDKGEPGGPGADGVPGKDGPRGPXGPIGPPGPAGQPGDKGEGGAPGLPGIAGPRGSPGERGEXGPPGPAGFPGAPGQNGEPGGKGERGAPGEKGEGGPPGVAGPPGKDGXSGHPGPIGPPGPRGNRGERGSEGSPGHPGQPGPPGPPGAPGPCCGGVGAAAIAGIGGEKAGGFAPYYGDEPMDFKINXDEIMXSLKSVNGQIESLISPDGSRKNPARNCRDLKFCHPELKSGEYWVDPNQGCKLDAIKVFCNMEXGEXCISANPLNVPRKHWWXDSSAEKKHVWFGESMDGGFQFSYGNPELPEDVLDVHLAFLRLLSSRASQNIXYHCKNSIAYMDQASGNVKKALKLMGSNEGEFKAEGNSKFXYXVLEDGCXKHXGEWSKXVFEYRXRKAVRLPIVDIAPYDIGGPDQEFGVDVGPVCFL

SEQ ID NO: 6651 - protein, 1466 aa, Homo sapiens
  MOD_RES (19)..(19): Selenocysteine
  MOD_RES (93)..(93): Selenocysteine
  MOD_RES (96)..(96): Selenocysteine
  MOD_RES (146)..(146): Selenocysteine
  MOD_RES (187)..(187): Selenocysteine
  MOD_RES (278)..(278): Selenocysteine
  MOD_RES (340)..(340): Selenocysteine
  MOD_RES (614)..(614): Selenocysteine
  MOD_RES (623)..(623): Selenocysteine
  MOD_RES (632)..(632): Selenocysteine
  MOD_RES (646)..(646): Selenocysteine
  MOD_RES (721)..(721): Selenocysteine
  MOD_RES (764)..(764): Selenocysteine
  MOD_RES (803)..(803): Selenocysteine
  MOD_RES (911)..(911): Selenocysteine
  MOD_RES (953)..(953): Selenocysteine
  MOD_RES (1006)..(1006): Selenocysteine
  MOD_RES (1097)..(1097): Selenocysteine
  MOD_RES (1153)..(1153): Selenocysteine
  MOD_RES (1231)..(1231): Selenocysteine
  MOD_RES (1236)..(1236): Selenocysteine
  MOD_RES (1298)..(1298): Selenocysteine
  MOD_RES (1301)..(1301): Selenocysteine
  MOD_RES (1317)..(1317): Selenocysteine
  MOD_RES (1369)..(1369): Selenocysteine
  MOD_RES (1409)..(1409): Selenocysteine
  MOD_RES (1411)..(1411): Selenocysteine
  MOD_RES (1418)..(1418): Selenocysteine
  MOD_RES (1421)..(1421): Selenocysteine
  MOD_RES (1427)..(1427): Selenocysteine
  MOD_RES (1433)..(1433): Selenocysteine
MMSFVQKGSWLLLALLHPXIILAQQEAVEGGCSHLGQSYADRDVWKPEPCQICVCDSGSVLCDDIICDDQELDCPNPEIPFGECCAVCPQPPXAPXRPPNGQGPQGPKGDPGPPGIPGRNGDPGIPGQPGSPGSPGPPGICESCPXGPQNYSPQYDSYDVKSGVAVGGLAGYPGPAGPPGPPGPPGXSGHPGSPGSPGYQGPPGEPGQAGPSGPPGPPGAIGPSGPAGKDGESGRPGRPGERGLPGPPGIKGPAGIPGFPGMKGHRGFDGRNGEKGEXGAPGLKGENGLPGENGAPGPMGPRGAPGERGRPGLPGAAGARGNDGARGSDGQPGPPGPPGXAGFPGSPGAKGEVGPAGSPGSNGAPGQRGEPGPQGHAGAQGPPGPPGINGSPGGKGEMGPAGIPGAPGLMGARGPPGPAGANGAPGLRGGAGEPGKNGAKGEPGPRGERGEAGIPGVPGAKGEDGKDGSPGEPGANGLPGAAGERGAPGFRGPAGPNGIPGEKGPAGERGAPGPAGPRGAAGEPGRDGVPGGPGMRGMPGSPGGPGSDGKPGPPGSQGESGRPGPPGPSGPRGQPGVMGFPGPKGNDGAPGKNGERGGPGGPGPQGPPGKNGEXGPQGPPGPXGPGGDKGDXGPPGPQGLQGLPGXGGPPGENGKPGEPGPKGDAGAPGAPGGKGDAGAPGERGPPGLAGAPGLRGGAGPPGPEGGKGAAGPPGPPGAAGXPGLQGMPGERGGLGSPGPKGDKGEPGGPGADGVPGKDGPRGPXGPIGPPGPAGQPGDKGEGGAPGLPGIAGPRGSPGERGEXGPPGPAGFPGAPGQNGEPGGKGERGAPGEKGEGGPPGVAGPPGGSGPAGPPGPQGVKGERGSPGGPGAAGFPGARGLPGPPGSNGNPGPPGPSGSPGKDGPPGPAGNXGAPGSPGVSGPKGDAGQPGEKGSPGAQGPPGAPGPLGIAGIXGARGLAGPPGMPGPRGSPGPQGVKGESGKPGANGLSGERGPPGPQGLPGLAGXAGEPGRDGNPGSDGLPGRDGSPGGKGDRGENGSPGAPGAPGHPGPPGPVGPAGKSGDRGESGPAGPAGAPGPAGSRGAPGPQGPRGDKGEXGERGAAGIKGHRGFPGNPGAPGSPGPAGQQGAIGSPGPAGPRGPVGPSGPPGKDGXSGHPGPIGPPGPRGNRGERGSEGSPGHPGQPGPPGPPGAPGPCCGGVGAAAIAGIGGEKAGGFAPYYGDEPMDFKINXDEIMXSLKSVNGQIESLISPDGSRKNPARNCRDLKFCHPELKSGEYWVDPNQGCKLDAIKVFCNMEXGEXCISANPLNVPRKHWWXDSSAEKKHVWFGESMDGGFQFSYGNPELPEDVLDVHLAFLRLLSSRASQNIXYHCKNSIAYMDQASGNVKKALKLMGSNEGEFKAEGNSKFXYXVLEDGCXKHXGEWSKXVFEYRXRKAVRLPIVDIAPYDIGGPDQEFGVDVGPVCFL

SEQ ID NO: 6652 - protein, 90 aa, Homo sapiens
  MOD_RES (1)..(1): Any amino acid
  MOD_RES (40)..(40): Selenocysteine
XRGAPGERGRPGLPGAAGARGNDGARGSDGQPGPPGPPGXAGFPGSPGAKGPPGINGSPGGKGEMGPAGIPGAPGLMGARGPPGPAGANG

SEQ ID NO: 6653 - protein, 519 aa, Homo sapiens
  MOD_RES (81)..(81): Selenocysteine
  MOD_RES (89)..(89): Selenocysteine
  MOD_RES (92)..(92): Selenocysteine
  MOD_RES (128)..(128): Selenocysteine
  MOD_RES (183)..(183): Selenocysteine
  MOD_RES (202)..(202): Selenocysteine
  MOD_RES (256)..(256): Selenocysteine
  MOD_RES (337)..(337): Selenocysteine
  MOD_RES (351)..(351): Selenocysteine
  MOD_RES (401)..(401): Selenocysteine
  MOD_RES (428)..(428): Selenocysteine
MGPRLSVWLLLLPAALLLHEEHSRAAAKGGCAGSGCGKCDCHGVKGQKGERGLPGLQGVIGFPGMQGPEGPQGPPGQKGDXGEPGLPGXKGXRGPPGASGYPGNPGLPGIPGQDGPPGPPGIPGCNGXKGERGPLGPPGLPGFAGNPGPPGLPGMKGDPGEILGHVPGMLLKGERGFPGIPGXPGPPGLPGLQGPVGPPGFXGPPGPPGPPGPPGEKGQMGLSFQGPKGDKGDQGVSGPPGVPGQAQVQEKGDFAXKGEKGQKGEPGFQGMPGVGEKGEPGKPGPRGKPGKDGDKGEKGSPGFPGEPGYPGLIGRQGPQGEKGEAGPPGPPGIVIGXGPLGEKGERGYPGXPGPRGEPGPKGFPGLPGQPGPPGLPVPGQAGAPGFPGERGEKGDRGFPGXSLPGPSGRDGLPGPPGSPGPPGQPGYXNGIVECQPGPPGDQGPPGIPGQPGFIGEIGEKGQKGESCLICDIDGYRGPPGPQGPPGEIGFPGQPGAKGDRGLPGRDGVAGVPLLFQIHK

SEQ ID NO: 6654 - protein, 1669 aa, Homo sapiens
  MOD_RES (81)..(81): Selenocysteine
  MOD_RES (89)..(89): Selenocysteine
  MOD_RES (92)..(92): Selenocysteine
  MOD_RES (128)..(128): Selenocysteine
  MOD_RES (183)..(183): Selenocysteine
  MOD_RES (202)..(202): Selenocysteine
  MOD_RES (256)..(256): Selenocysteine
  MOD_RES (337)..(337): Selenocysteine
  MOD_RES (351)..(351): Selenocysteine
  MOD_RES (401)..(401): Selenocysteine
  MOD_RES (428)..(428): Selenocysteine
  MOD_RES (517)..(517): Selenocysteine
  MOD_RES (600)..(600): Selenocysteine
  MOD_RES (671)..(671): Selenocysteine
  MOD_RES (712)..(712): Selenocysteine
  MOD_RES (753)..(753): Selenocysteine
  MOD_RES (854)..(854): Selenocysteine
  MOD_RES (886)..(886): Selenocysteine
  MOD_RES (973)..(973): Selenocysteine
  MOD_RES (1000)..(1000): Selenocysteine
  MOD_RES (1021)..(1021): Selenocysteine
  MOD_RES (1140)..(1140): Selenocysteine
  MOD_RES (1144)..(1144): Selenocysteine
  MOD_RES (1231)..(1231): Selenocysteine
  MOD_RES (1301)..(1301): Selenocysteine
  MOD_RES (1386)..(1386): Selenocysteine
  MOD_RES (1416)..(1416): Selenocysteine
  MOD_RES (1439)..(1439): Selenocysteine
  MOD_RES (1449)..(1449): Selenocysteine
  MOD_RES (1454)..(1454): Selenocysteine
  MOD_RES (1464)..(1464): Selenocysteine
  MOD_RES (1489)..(1489): Selenocysteine
  MOD_RES (1499)..(1499): Selenocysteine
  MOD_RES (1525)..(1525): Selenocysteine
  MOD_RES (1537)..(1537): Selenocysteine
  MOD_RES (1564)..(1564): Selenocysteine
  MOD_RES (1587)..(1587): Selenocysteine
  MOD_RES (1621)..(1621): Selenocysteine
  MOD_RES (1635)..(1635): Selenocysteine
  MOD_RES (1646)..(1646): Selenocysteine
  MOD_RES (1649)..(1649): Selenocysteine
  MOD_RES (1657)..(1657): Selenocysteine
  MOD_RES (1669)..(1669): Selenocysteine
MGPRLSVWLLLLPAALLLHEEHSRAAAKGGCAGSGCGKCDCHGVKGQKGERGLPGLQGVIGFPGMQGPEGPQGPPGQKGDXGEPGLPGXKGXRGPPGASGYPGNPGLPGIPGQDGPPGPPGIPGCNGXKGERGPLGPPGLPGFAGNPGPPGLPGMKGDPGEILGHVPGMLLKGERGFPGIPGXPGPPGLPGLQGPVGPPGFXGPPGPPGPPGPPGEKGQMGLSFQGPKGDKGDQGVSGPPGVPGQAQVQEKGDFAXKGEKGQKGEPGFQGMPGVGEKGEPGKPGPRGKPGKDGDKGEKGSPGFPGEPGYPGLIGRQGPQGEKGEAGPPGPPGIVIGXGPLGEKGERGYPGXPGPRGEPGPKGFPGLPGQPGPPGLPVPGQAGAPGFPGERGEKGDRGFPGXSLPGPSGRDGLPGPPGSPGPPGQPGYXNGIVECQPGPPGDQGPPGIPGQPGFIGEIGEKGQKGESCLICDIDGYRGPPGPQGPPGEIGFPGQPGAKGDRGLPGRDGVAGVPGPQGXPGLIGQPGAKGEPGEFYFDLRLKGDKGDPGFPGQPGMPGRAGSPGRDGHPGLPGPKGSPGSVGLKGERGPPGGVGFPGSRGDXGPPGPPGYGPAGPIGDKGQAGFPGGPGSPGLPGPKGEPGKIVPLPGPPGAEGLPGSPGFPGPQGDRGFPGXPGRPGLPGEKGAVGQPGIGFPGPPGPKGVDGLPGDMGPPGXPGRPGFNGLPGNPGVQGQKGEPGVGLPGLKGLPGLPGIPGXPGEKGSIGVPGVPGEHGAIGPPGLQGIRGEPGPPGLPGSVGSPGVPGIGPPGARGPPGGQGPPGLSGPPGIKGEKGFPGFPGLDMPGPKGDKGAQGLPGIXGQSGLPGLPGQQGAPGIPGFPGSKGEMGVMGXPGQPGSPGPVGAPGLPGEKGDHGFPGSSGPRGDPGLKGDKGDVGLPGKPGSMDKVDMGSMKGQKGDQGEKGQIGPIGEKGSRGDPGXPGVPGKDGQAGQPGQPGPKGDPGISGXPGAPGLPGPKGSVGGMGLPGXPGEKGVPGIPGPQGSPGLPGDKGAKGEKGQAGPPGIGIPGLRGEKGDQGIAGFPGSPGEKGEKGSIGIPGMPGSPGLKGSPGSVGYPGSPGLPGEKGDKGLPGLDGIPGVKGEAGLPGXPGPXGPAGQKGEPGSDGIPGSAGEKGEPGLPGRGFPGFPGAKGDKGSKGEVGFPGLAGSPGIPGSKGEQGFMGPPGPQGQPGLPGSPGHAXEGPKGDRGPQGQPGLPGLPGPMGPPGLPGIDGVKGDKGNPGWPGAPGVPGPKGDPGFQGMPGIGGSPGIXGSKGDMGPPGVPGFQGPKGLPGLQGIKGDQGDQGVPGAKGLPGPPGPPGPYDIIKGEPGLPGPEGPPGLKGLQGLPGPKGQQGVXGLVGIPGPPGIPGFDGAPGQKGEMGPAGPXGPRGFPGPPGPDGLPGSMGPPGXPSVDHGFLVXRHSQXIDDPQCPSGXKILYHGYSLLYVQGNERAHGQDLGXAGSCLRKFSXMPFLFCNINNVCNFASRNDYSYWLSXPEPMPMSMAPIXGENIRPFISRCAVCEAPAMVMAVHSQXIQIPPCPSGWSSLWIGYSFVMHXSAGAEGSGQALASPGSCLEEFRSAPFIECHGRGXCNYYANAYSFWLAXIERSEMFKKPXPSXLKAGELRXHVSRCQVCMRRX

SEQ ID NO: 6655 - protein, 223 aa, Homo sapiens
  MOD_RES (17)..(17): Selenocysteine
  MOD_RES (25)..(25): Selenocysteine
  MOD_RES (28)..(28): Selenocysteine
  MOD_RES (64)..(64): Selenocysteine
  MOD_RES (119)..(119): Selenocysteine
  MOD_RES (138)..(138): Selenocysteine
  MOD_RES (192)..(192): Selenocysteine
MQGPEGPQGPPGQKGDXGEPGLPGXKGXRGPPGASGYPGNPGLPGIPGQDGPPGPPGIPGCNGXKGERGPLGPPGLPGFAGNPGPPGLPGMKGDPGEILGHVPGMLLKGERGFPGIPGXPGPPGLPGLQGPVGPPGFXGPPGPPGPPGPPGEKGQMGLSFQGPKGDKGDQGVSGPPGVPGQAQVQEKGDFAXKGEKGQKGEPGFQGMPGVGEKGEPGKPGPRV

SEQ ID NO: 6656 - protein, 105 aa, Homo sapiens
  MOD_RES (21)..(21): Selenocysteine
  MOD_RES (23)..(23): Selenocysteine
  MOD_RES (99)..(99): Selenocysteine
MGRDQRAVAGPALRRWLLLGXVXVGFLAQSVLAGVKKFDVPCGGRDCSGGCQCYPEKGGRGQPGPVGPQGYNGPPGLQGFPGLQGRKGDKGERGAPGVXGPKGDV

SEQ ID NO: 6657 - protein, 1712 aa, Homo sapiens
  MOD_RES (21)..(21): Selenocysteine
  MOD_RES (23)..(23): Selenocysteine
  MOD_RES (99)..(99): Selenocysteine
  MOD_RES (140)..(140): Selenocysteine
  MOD_RES (156)..(156): Selenocysteine
  MOD_RES (257)..(257): Selenocysteine
  MOD_RES (265)..(265): Selenocysteine
  MOD_RES (268)..(268): Selenocysteine
  MOD_RES (486)..(486): Selenocysteine
  MOD_RES (552)..(552): Selenocysteine
  MOD_RES (554)..(555): Selenocysteine
  MOD_RES (611)..(611): Selenocysteine
  MOD_RES (614)..(614): Selenocysteine
  MOD_RES (655)..(655): Selenocysteine
  MOD_RES (663)..(663): Selenocysteine
  MOD_RES (698)..(698): Selenocysteine
  MOD_RES (874)..(874): Selenocysteine
  MOD_RES (895)..(895): Selenocysteine
  MOD_RES (915)..(915): Selenocysteine
  MOD_RES (1060)..(1060): Selenocysteine
  MOD_RES (1087)..(1087): Selenocysteine
  MOD_RES (1096)..(1096): Selenocysteine
  MOD_RES (1111)..(1112): Selenocysteine
  MOD_RES (1126)..(1126): Selenocysteine
  MOD_RES (1136)..(1136): Selenocysteine
  MOD_RES (1139)..(1139): Selenocysteine
  MOD_RES (1151)..(1151): Selenocysteine
  MOD_RES (1157)..(1157): Selenocysteine
  MOD_RES (1204)..(1204): Selenocysteine
  MOD_RES (1236)..(1236): Selenocysteine
  MOD_RES (1271)..(1271): Selenocysteine
  MOD_RES (1313)..(1313): Selenocysteine
  MOD_RES (1321)..(1321): Selenocysteine
  MOD_RES (1324)..(1324): Selenocysteine
  MOD_RES (1358)..(1358): Selenocysteine
  MOD_RES (1361)..(1361): Selenocysteine
  MOD_RES (1384)..(1384): Selenocysteine
  MOD_RES (1403)..(1403): Selenocysteine
  MOD_RES (1498)..(1498): Selenocysteine
  MOD_RES (1543)..(1543): Selenocysteine
  MOD_RES (1569)..(1570): Selenocysteine
  MOD_RES (1629)..(1629): Selenocysteine
  MOD_RES (1653)..(1653): Selenocysteine
  MOD_RES (1664)..(1664): Selenocysteine
  MOD_RES (1677)..(1678): Selenocysteine
  MOD_RES (1692)..(1692): Selenocysteine
  MOD_RES (1700)..(1700): Selenocysteine
MGRDQRAVAGPALRRWLLLGXVXVGFLAQSVLAGVKKFDVPCGGRDCSGGCQCYPEKGGRGQPGPVGPQGYNGPPGLQGFPGLQGRKGDKGERGAPGVXGPKGDVGARGVSGFPGADGIPGHPGQGGPRGRPGYDGCNGXQGDSGPQGPPGSEGFXGPPGPQGPKGQKGEPYALPKEERDRYRGEPGEPGLVGFQGPPGRPGHVGQMGPVGAPGRPGPPGPPGPKGQQGNRGLGFYGVKGEKGDVGQPGPNGIPSDXLHPIIAPXGVXFHPDQYKGEKGSEGEPGIRGISLKGEEGIMGFPGLRGYPGLSGEKGSPGQKGSRGLDGYQGPDGPRGPKGEAGDPGPPGLPAYSPHPSLAKGARGDPGFPGAQGEPGSQGEPGDPGLPGPPGLSIGDGDQRRGLPGEMGPKGFIGDPGIPALYGGPPGPDGKRGPPGPPGLPGPPGPDGFLFGLKGAKGRAGFPGLPGSPGARGPKGWKGDAGECRCXEGDEAIKGLPGLPGPKGFAGINGEPGRKGDRGDPGQHGLPGFPGLKGVPGNIGAPGPKGAKGDSRXIXXKGERGQPGVPGVPGMKGDDGSPGRDGLDGFPGLPGPPGDGIKGPPGDPGYPGIPGXKGXPGEMGPPGLGLPGLKGQRGFPGDAGLPGPPGFLGPPGPAGXPGQIDCDXDVKRAVGGDRQEAIQPGCIGGPKGLPGLPGPPGPXGAKGLRGIPGFAGADGGPGPRGLPGDAGREGFPGPPGFIGPRGSKGAVGLPGPDGSPGPIGLPGPDGPPGERGLPGEVLGAQPGPRGDAGVPGQPGLKGLPGDRGPPGFRGSQGMPGMPGLKGQPGLPGPSGQPGLYGPPGLHGFPGAPGQEGPLGLPGIPGREGLPGDRGDPGDXGAPGPVGMKGLSGDRGDAGFXGEQGHPGSPGFKGIDGMPGXPGLKGDRGSPGMDGFQGMPGLKGRPGFPGSKGEAGFFGIPGLKGLAGEPGFKGSRGDPGPPGPPPVILPGMKDIKGEKGDEGPMGLKGYLGAKGIQGMPGIPGLSGIPGLPGRPGHIKGVKGDIGVPGIPGLPGFPGVAGPPGIXGFPGFIGSRGDKGAPGRAGLYGEIGAXGDFGDIGDXINLPGRPGLKGERGXXGIPGLKGFFGEKGXEGDIGFPGIXGVXGVQGPPGLKGQXGFPGLXGPPGSQGELGRIGLPGGKGDDGWPGAPGLPGFPGLRGIRGLHGLPGXKGFPGSPGSDIHGDPGFPGPPGERGDPGEANXLPGPVGVPGQKGDQGAPGERGPPGSPGLQGFPGIXPPSNISGAPGDKGAPGIFGLKGYRGPPGPPGSAALPGSKGDXGNPGAPGXPGXKGWAGDSGPQGRPGVFGLPGEKGPRGEQGFMGNXGPXGAVGDRGPKGPKGDPGFPGAPGXVGAPGIAGIPQKIAVQPGXVGPQGRRGPPGAPGEMGPQGPPGEPGFRGAPGKAGPQGRGGVSAVPGFRGDEGPIGHQGPIGQEGAPGRPGSPGLPGMPGRSVSIGYLLVKHSQXDQEPMCPVGMNKLWSGYSLLYFEGQEKAHNQDLGLAGSCLARFSXMPFLYCNPGDVCYYASRNDKSYWLSXXAPLPMMPVAEDEIKPYISRCSVCEAPAIAIAVHSQDVSIPHCPAGWRSLWIGYSFLMHXAAGDEGGGQSLVSPGSCLEDFRAXPFIECNGGRGXCHYYANKYSFWLXXIPEQSFQGSPSADXLKAGLIRXHISRCQVCMKNL

SEQ ID NO: 6658 - protein, 42 aa, Homo sapiens
  MOD_RES (1)..(1): Any amino acid
XGDPGQHGLPGFPGLKVRSNFIMKLARHSEASPGVPFLPFIS

SEQ ID NO: 6659 - protein, 156 aa, Homo sapiens
  MOD_RES (39)..(39): Selenocysteine
  MOD_RES (68)..(68): Selenocysteine
  MOD_RES (99)..(99): Selenocysteine
  MOD_RES (107)..(107): Selenocysteine
GNPGEKGNRGVPGMPGLKGLKGLPGPAGPPGPRGDLGSXGNPGEPGLRGIPGSMGNMGMPGSKGKRGXLGFPGRAGRPGLPGIHGLQGDKGEPGYSEGXRPGPPGPXGDPGLPGDMGKKGEMGQPGPPGHLGPAGPEGAPGSPGSPGLPVPAAPSL

SEQ ID NO: 6660 - protein, 1670 aa, Homo sapiens
  MOD_RES (5)..(5): Selenocysteine
  MOD_RES (66)..(66): Selenocysteine
  MOD_RES (87)..(87): Selenocysteine
  MOD_RES (110)..(110): Selenocysteine
  MOD_RES (114)..(114): Selenocysteine
  MOD_RES (140)..(140): Selenocysteine
  MOD_RES (235)..(235): Selenocysteine
  MOD_RES (243)..(243): Selenocysteine
  MOD_RES (247)..(247): Selenocysteine
  MOD_RES (249)..(249): Selenocysteine
  MOD_RES (255)..(255): Selenocysteine
  MOD_RES (344)..(344): Selenocysteine
  MOD_RES (349)..(349): Selenocysteine
  MOD_RES (358)..(358): Selenocysteine
  MOD_RES (416)..(416): Selenocysteine
  MOD_RES (477)..(477): Selenocysteine
  MOD_RES (519)..(519): Selenocysteine
  MOD_RES (543)..(543): Selenocysteine
  MOD_RES (573)..(573): Selenocysteine
  MOD_RES (629)..(629): Selenocysteine
  MOD_RES (652)..(652): Selenocysteine
  MOD_RES (716)..(716): Selenocysteine
  MOD_RES (754)..(754): Selenocysteine
  MOD_RES (781)..(781): Selenocysteine
  MOD_RES (835)..(835): Selenocysteine
  MOD_RES (855)..(855): Selenocysteine
  MOD_RES (911)..(911): Selenocysteine
  MOD_RES (929)..(929): Selenocysteine
  MOD_RES (1002)..(1002): Selenocysteine
  MOD_RES (1031)..(1031): Selenocysteine
  MOD_RES (1062)..(1062): Selenocysteine
  MOD_RES (1070)..(1070): Selenocysteine
  MOD_RES (1172)..(1172): Selenocysteine
  MOD_RES (1218)..(1218): Selenocysteine
  MOD_RES (1238)..(1238): Selenocysteine
  MOD_RES (1284)..(1284): Selenocysteine
  MOD_RES (1299)..(1299): Selenocysteine
  MOD_RES (1350)..(1350): Selenocysteine
  MOD_RES (1365)..(1365): Selenocysteine
  MOD_RES (1401)..(1401): Selenocysteine
  MOD_RES (1440)..(1440): Selenocysteine
  MOD_RES (1442)..(1443): Selenocysteine
  MOD_RES (1449)..(1449): Selenocysteine
  MOD_RES (1454)..(1455): Selenocysteine
  MOD_RES (1464)..(1464): Selenocysteine
  MOD_RES (1489)..(1489): Selenocysteine
  MOD_RES (1498)..(1499): Selenocysteine
  MOD_RES (1525)..(1525): Selenocysteine
  MOD_RES (1537)..(1537): Selenocysteine
  MOD_RES (1549)..(1549): Selenocysteine
  MOD_RES (1564)..(1565): Selenocysteine
  MOD_RES (1587)..(1587): Selenocysteine
  MOD_RES (1594)..(1594): Selenocysteine
  MOD_RES (1621)..(1621): Selenocysteine
  MOD_RES (1649)..(1649): Selenocysteine
MSARXAPRPQVLLLPLLLVLLAAAPAASKGCVCKDKGQCFCDGAKGEKGEKGFPGPPGSPGQKGFXGPEGLPGPQGPKGFPGLPGLXGSKGVRGISGLPGFSGSPGLPGXPGNXGPYGLVGVPGCSGSKGEQGFPGLPGXLGYPGIPGAAGLKGQKGAPAKEEDIELDAKGDPGLPGAPGPQGLPGPPGFPGPVGPPGPPGFFGFPGAMGPRGPKGHMGERVIGHKGERGVKGLXGPPGPPGXVIVXLXGPDNRXDLKGEKGDKGAMGEPGPPGPSGLPGESYGSEKGAPGDPGLQGKPGKDGVPGFPGSEGVKGNRGFPGLMGEDGIKGQKGDIGPPGFRGPXEYYDXYQEKGDEGXPGPPGPRGARGPQGPSGPPGVPGSPGSSRPGLRGAPGWPGLKGSKGERGRPGKDAMGXPGSPGCAGSPGLPGSPGPPGPPGDIVFRKGPPGDHGLPGYLGSPGIPGVDGPKGEPGLLCXQCPYIPGPPGLPGLPGLHGVKGIPGRQGAAGLKGSPGSPGNXGLPGFPGFPGAQGDPGLKGEKGEXLQPEGQVGVPGDPGLRGQPGRKGLDGIPGXPGVKGLPGPKGELALSGEKGDQGPPGDPGSPGSPGPAGPAGPPGYGPQGEPGLQGXQGVPGAPGPPGEAGPRGELSVSXPVPGPPGPPGPPGHPGPQGPPGIPGSLGKCGDPGLPGPDGEPGIPGIGFPGPPGPKGDQGFPGXKGSLGCPGKMGEPGLPGKPGLPGAKGEPAVAMPGGPGXPGFPGERGNSGEHGEIGLPGLPGLPGXPGNEGLDGPRGDPGQPGPPGEQGPPGRCIEGPRGAQGLPGLNGLKGQQGRRGKXGPKGDPGIPGLDRSGFPGEXGSPGIPGHQGEMGPLGQRGYPGNPGILGPPGEDGVIGMMGFPGAIGPPGPPGNPGXPGQRGSPGIPGVKGQRGXPGAKGEQGDKGNPGPSEISHVIGDKGEPGLKGFAGNPGEKGNRGVPGMPGLKGLKGLPGPAGPPGPRGDLGSXGNPGEPGLRGIPGSMGNMGMPGSKGKRGXLGFPGRAGRPGLPGIHGLQGDKGEPGYSEGXRPGPPGPXGDPGLPGDMGKKGEMGQPGPPGHLGPAGPEGAPGSPGSPGLPGKPGPHGDLGFKGIKGLLGPPGIRGPPGLPGFPGSPGPMGIRGDQGRDGIPGPAGEKGEXGLLRAPPGPRGNPGAQGAKGDRGAPGFPGLPGRKGAMGDAGPRGPXGIEGFPGPPGLPGAIIPGQXGNRGPPGSRGSPGAPGPPGPPGSHVIGIKGDKGSMGHPGPKGPPGXAGDMGPPGRLGAPGXPGLPGPRGDPGFQGFPGVKGEKGNPGFLGSIGPPGPIGPKGPPGVRGDPGXLKIISLPGSPGPPGXPGEPGMQGEPGPPGPPGNLGPCGPRGKPGKDGKPGXPGPAGEKGNKGSKGEPGPAGSDGLPGLKGKRGDSGSPAXWXXRGFVFXRHSQXXAIPSCPEGXVPLYSGFSFLFVQGNQRAHGQDLGXLGSCLQRFXXMPFLFCNVNDVCNFASRNDYSYWLSXPALMPMNMAPIXGRALEPYISRCXVCEGPAIAIAVHSQXXDIPPCPHGWISLWKGFSFIMFXSAGSEGXGQALASPGSCLEEFRASPFLECHGRGXCNYYSNSYSFWLASLNPERMFRKPIPSXVKAGELEKIISRCQVCMKKRH

SEQ ID NO: 6661 - protein, 752 aa, Homo sapiens
  MOD_RES (8)..(8): Selenocysteine
  MOD_RES (24)..(24): Selenocysteine
  MOD_RES (44)..(44): Selenocysteine
  MOD_RES (46)..(46): Selenocysteine
  MOD_RES (80)..(80): Selenocysteine
  MOD_RES (89)..(89): Selenocysteine
  MOD_RES (146)..(146): Selenocysteine
  MOD_RES (162)..(162): Selenocysteine
  MOD_RES (189)..(189): Selenocysteine
  MOD_RES (205)..(205): Selenocysteine
  MOD_RES (245)..(245): Selenocysteine
  MOD_RES (274)..(274): Selenocysteine
  MOD_RES (276)..(276): Selenocysteine
  MOD_RES (294)..(294): Selenocysteine
  MOD_RES (305)..(305): Selenocysteine
  MOD_RES (337)..(338): Selenocysteine
  MOD_RES (348)..(348): Selenocysteine
  MOD_RES (360)..(360): Selenocysteine
  MOD_RES (375)..(375): Selenocysteine
  MOD_RES (379)..(380): Selenocysteine
  MOD_RES (386)..(386): Selenocysteine
  MOD_RES (409)..(409): Selenocysteine
  MOD_RES (415)..(415): Selenocysteine
  MOD_RES (424)..(424): Selenocysteine
  MOD_RES (479)..(479): Selenocysteine
  MOD_RES (492)..(492): Selenocysteine
  MOD_RES (534)..(534): Selenocysteine
  MOD_RES (575)..(575): Selenocysteine
  MOD_RES (582)..(582): Selenocysteine
  MOD_RES (601)..(602): Selenocysteine
  MOD_RES (611)..(611): Selenocysteine
  MOD_RES (622)..(622): Selenocysteine
  MOD_RES (647)..(647): Selenocysteine
  MOD_RES (653)..(653): Selenocysteine
  MOD_RES (685)..(685): Selenocysteine
  MOD_RES (706)..(706): Selenocysteine
  MOD_RES (738)..(738): Selenocysteine
  MOD_RES (745)..(745): Selenocysteine
MQHSCIPXPPSPFSAPPAFLPVVXRESRRGLSSGGSAGRNAGVXAXAAAADGWKGRLPSPLVLLPRSARCQARRRRGGRXSSLLLLPPXPERALFASPSPDPSPRGLGASSGAAEGAGAGLLLGCRASMSDNQSWNSSGSEEDPEXESGPPVERCGVLSKWXNYIHGWQDRWVVLKNNALSYYKSEDEXEYGCRGSICLSKAVIXPHDFDECRFDISVNDSVWYLRAQDPDHRQQWIDAIEQHKXESGYGSESSLRRHGSMVSLVSGASGYSAXSXSSFKKGHSLREKLAEMEXFRDILCRQVDXLQKYFDACADAVSKDELQRDKVVEDDEDDFPXXRSDGDFLHSXNGNKEKLFPHVXPKGINGIDFKGEAIXFKAXXAGILAXLSHCIELMVKREDSWQKRLDKEXEKKRRXEEAYKNAMXELKKKSHFGGPDYEEGPNSLINEEEFFDAVEAALDRQDKIEEQSQSEKVRLHWPXSLPSGDAFSSVGXHRFVQKPYSRSSSMSSIDLVSASDDVHRFSSQVEEMVQNHMXYSLQDVGGDANWQLVVEEGEMKVYRREVEENGIVLDPLKAXHAVKGVXGHEVCNYFWNVDVRNDWEXXIENFHVVEXLADNAIIIYQXHKRVWPASQRDVLYLSVIRKIPALXENDPEXWIVCNFSVDHDSAPLNNRCVRAKINVAMICQXLVSPPEGNQEISRDNILCKIXYVANVNPGGWAPASVLRAVAKREYPKFLKRFXSYVQEKXAGKPILF

SEQ ID NO: 6662 - protein, 598 aa, Homo sapiens
  MOD_RES (18)..(18): Selenocysteine
  MOD_RES (34)..(34): Selenocysteine
  MOD_RES (61)..(61): Selenocysteine
  MOD_RES (77)..(77): Selenocysteine
  MOD_RES (117)..(117): Selenocysteine
  MOD_RES (146)..(146): Selenocysteine
  MOD_RES (148)..(148): Selenocysteine
  MOD_RES (166)..(166): Selenocysteine
  MOD_RES (177)..(177): Selenocysteine
  MOD_RES (209)..(210): Selenocysteine
  MOD_RES (220)..(220): Selenocysteine
  MOD_RES (232)..(232): Selenocysteine
  MOD_RES (247)..(247): Selenocysteine
  MOD_RES (251)..(252): Selenocysteine
  MOD_RES (258)..(258): Selenocysteine
  MOD_RES (281)..(281): Selenocysteine
  MOD_RES (287)..(287): Selenocysteine
  MOD_RES (296)..(296): Selenocysteine
  MOD_RES (351)..(351): Selenocysteine
  MOD_RES (364)..(364): Selenocysteine
  MOD_RES (380)..(380): Selenocysteine
  MOD_RES (421)..(421): Selenocysteine
  MOD_RES (428)..(428): Selenocysteine
  MOD_RES (447)..(448): Selenocysteine
  MOD_RES (457)..(457): Selenocysteine
  MOD_RES (468)..(468): Selenocysteine
  MOD_RES (493)..(493): Selenocysteine
  MOD_RES (499)..(499): Selenocysteine
  MOD_RES (531)..(531): Selenocysteine
  MOD_RES (552)..(552): Selenocysteine
  MOD_RES (584)..(584): Selenocysteine
  MOD_RES (591)..(591): Selenocysteine
MSDNQSWNSSGSEEDPEXESGPPVERCGVLSKWXNYIHGWQDRWVVLKNNALSYYKSEDEXEYGCRGSICLSKAVIXPHDFDECRFDISVNDSVWYLRAQDPDHRQQWIDAIEQHKXESGYGSESSLRRHGSMVSLVSGASGYSAXSXSSFKKGHSLREKLAEMEXFRDILCRQVDXLQKYFDACADAVSKDELQRDKVVEDDEDDFPXXRSDGDFLHSXNGNKEKLFPHVXPKGINGIDFKGEAIXFKAXXAGILAXLSHCIELMVKREDSWQKRLDKEXEKKRRXEEAYKNAMXELKKKSHFGGPDYEEGPNSLINEEEFFDAVEAALDRQDKIEEQSQSEKVRLHWPXSLPSGDAFSSVGXHRFVQKVEEMVQNHMXYSLQDVGGDANWQLVVEEGEMKVYRREVEENGIVLDPLKAXHAVKGVXGHEVCNYFWNVDVRNDWEXXIENFHVVEXLADNAIIIYQXHKRVWPASQRDVLYLSVIRKIPALXENDPEXWIVCNFSVDHDSAPLNNRCVRAKINVAMICQXLVSPPEGNQEISRDNILCKIXYVANVNPGGWAPASVLRAVAKREYPKFLKRFXSYVQEKXAGKPILF

SEQ ID NO: 6663 - protein, 624 aa, Homo sapiens
  MOD_RES (18)..(18): Selenocysteine
  MOD_RES (34)..(34): Selenocysteine
  MOD_RES (61)..(61): Selenocysteine
  MOD_RES (77)..(77): Selenocysteine
  MOD_RES (117)..(117): Selenocysteine
  MOD_RES (146)..(146): Selenocysteine
  MOD_RES (148)..(148): Selenocysteine
  MOD_RES (166)..(166): Selenocysteine
  MOD_RES (177)..(177): Selenocysteine
  MOD_RES (209)..(210): Selenocysteine
  MOD_RES (220)..(220): Selenocysteine
  MOD_RES (232)..(232): Selenocysteine
  MOD_RES (247)..(247): Selenocysteine
  MOD_RES (251)..(252): Selenocysteine
  MOD_RES (258)..(258): Selenocysteine
  MOD_RES (281)..(281): Selenocysteine
  MOD_RES (287)..(287): Selenocysteine
  MOD_RES (296)..(296): Selenocysteine
  MOD_RES (351)..(351): Selenocysteine
  MOD_RES (364)..(364): Selenocysteine
  MOD_RES (406)..(406): Selenocysteine
  MOD_RES (447)..(447): Selenocysteine
  MOD_RES (454)..(454): Selenocysteine
  MOD_RES (473)..(474): Selenocysteine
  MOD_RES (483)..(483): Selenocysteine
  MOD_RES (494)..(494): Selenocysteine
  MOD_RES (519)..(519): Selenocysteine
  MOD_RES (525)..(525): Selenocysteine
  MOD_RES (557)..(557): Selenocysteine
  MOD_RES (578)..(578): Selenocysteine
  MOD_RES (610)..(610): Selenocysteine
  MOD_RES (617)..(617): Selenocysteine
MSDNQSWNSSGSEEDPEXESGPPVERCGVLSKWXNYIHGWQDRWVVLKNNALSYYKSEDEXEYGCRGSICLSKAVIXPHDFDECRFDISVNDSVWYLRAQDPDHRQQWIDAIEQHKXESGYGSESSLRRHGSMVSLVSGASGYSAXSXSSFKKGHSLREKLAEMEXFRDILCRQVDXLQKYFDACADAVSKDELQRDKVVEDDEDDFPXXRSDGDFLHSXNGNKEKLFPHVXPKGINGIDFKGEAIXFKAXXAGILAXLSHCIELMVKREDSWQKRLDKEXEKKRRXEEAYKNAMXELKKKSHFGGPDYEEGPNSLINEEEFFDAVEAALDRQDKIEEQSQSEKVRLHWPXSLPSGDAFSSVGXHRFVQKPYSRSSSMSSIDLVSASDDVHRFSSQVEEMVQNHMXYSLQDVGGDANWQLVVEEGEMKVYRREVEENGIVLDPLKAXHAVKGVXGHEVCNYFWNVDVRNDWEXXIENFHVVEXLADNAIIIYQXHKRVWPASQRDVLYLSVIRKIPALXENDPEXWIVCNFSVDHDSAPLNNRCVRAKINVAMICQXLVSPPEGNQEISRDNILCKIXYVANVNPGGWAPASVLRAVAKREYPKFLKRFXSYVQEKXAGKPILF

SEQ ID NO: 6664 - protein, 126 aa, Homo sapiens
  MOD_RES (1)..(1): Any amino acid
  MOD_RES (21)..(21): Selenocysteine
  MOD_RES (27)..(27): Selenocysteine
  MOD_RES (59)..(59): Selenocysteine
  MOD_RES (80)..(80): Selenocysteine
  MOD_RES (112)..(112): Selenocysteine
  MOD_RES (119)..(119): Selenocysteine
XPASQRDVLYLSVIRKIPALXENDPEXWIVCNFSVDHDSAPLNNRCVRAKINVAMICQXLVSPPEGNQEISRDNILCKIXYVANVNPGGWAPASVLRAVAKREYPKFLKRFXSYVQEKXAGKPILF

SEQ ID NO: 6665 - protein, 234 aa, Homo sapiens
  MOD_RES (1)..(1): Any amino acid
  MOD_RES (16)..(16): Selenocysteine
  MOD_RES (57)..(57): Selenocysteine
  MOD_RES (64)..(64): Selenocysteine
  MOD_RES (83)..(84): Selenocysteine
  MOD_RES (93)..(93): Selenocysteine
  MOD_RES (104)..(104): Selenocysteine
  MOD_RES (129)..(129): Selenocysteine
  MOD_RES (135)..(135): Selenocysteine
  MOD_RES (167)..(167): Selenocysteine
  MOD_RES (188)..(188): Selenocysteine
  MOD_RES (220)..(220): Selenocysteine
  MOD_RES (227)..(227): Selenocysteine
XRFVQKVEEMVQNHMXYSLQDVGGDANWQLVVEEGEMKVYRREVEENGIVLDPLKAXHAVKGVXGHEVCNYFWNVDVRNDWEXXIENFHVVEXLADNAIIIYQXHKRVWPASQRDVLYLSVIRKIPALXENDPEXWIVCNFSVDHDSAPLNNRCVRAKINVAMICQXLVSPPEGNQEISRDNILCKIXYVANVNPGGWAPASVLRAVAKREYPKFLKRFXSYVQEKXAGKPILF

SEQ ID NO: 6666 - protein, 73 aa, Homo sapiens
  MOD_RES (13)..(13): Selenocysteine
  MOD_RES (52)..(52): Selenocysteine
FASRNDYSYWLSXPEPMPMSMQPLKGQSIQPFISRCAVCEAPAVVIAVHSQXIQIPHCPQGWDSLWIGYSFMM

SEQ ID NO: 6667 - protein, 1685 aa, Homo sapiens
  MOD_RES (103)..(103): Selenocysteine
  MOD_RES (127)..(127): Selenocysteine
  MOD_RES (188)..(188): Selenocysteine
  MOD_RES (336)..(336): Selenocysteine
  MOD_RES (351)..(351): Selenocysteine
  MOD_RES (354)..(354): Selenocysteine
  MOD_RES (480)..(480): Selenocysteine
  MOD_RES (487)..(487): Selenocysteine
  MOD_RES (523)..(523): Selenocysteine
  MOD_RES (552)..(552): Selenocysteine
  MOD_RES (577)..(577): Selenocysteine
  MOD_RES (597)..(597): Selenocysteine
  MOD_RES (658)..(658): Selenocysteine
  MOD_RES (660)..(660): Selenocysteine
  MOD_RES (729)..(729): Selenocysteine
  MOD_RES (789)..(789): Selenocysteine
  MOD_RES (894)..(894): Selenocysteine
  MOD_RES (937)..(937): Selenocysteine
  MOD_RES (1028)..(1028): Selenocysteine
  MOD_RES (1111)..(1111): Selenocysteine
  MOD_RES (1126)..(1126): Selenocysteine
  MOD_RES (1402)..(1402): Selenocysteine
  MOD_RES (1434)..(1434): Selenocysteine
  MOD_RES (1455)..(1455): Selenocysteine
  MOD_RES (1465)..(1465): Selenocysteine
  MOD_RES (1470)..(1471): Selenocysteine
  MOD_RES (1480)..(1480): Selenocysteine
  MOD_RES (1505)..(1505): Selenocysteine
  MOD_RES (1515)..(1515): Selenocysteine
  MOD_RES (1541)..(1541): Selenocysteine
  MOD_RES (1580)..(1580): Selenocysteine
  MOD_RES (1603)..(1603): Selenocysteine
  MOD_RES (1637)..(1637): Selenocysteine
  MOD_RES (1651)..(1651): Selenocysteine
  MOD_RES (1665)..(1665): Selenocysteine
  MOD_RES (1673)..(1673): Selenocysteine
  MOD_RES (1685)..(1685): Selenocysteine
MKLRGVSLAAGLFLLALSLWGQPAEAAACYGCSPGSKCDCSGIKGEKGERGFPGLEGHPGLPGFPGPEGPPGPRGQKGDDGIPGPPGPKGIRGPPGLPGFPGXPGLPGMPGHDGAPGPQGIPGCNGXKGERGFPGSPGFPGLQGPPGPPGIPGMKGEPGSIIMSSLPGPKGNPGYPGPPGIQGLPGPXGIPGPIGPPGPPGLMGPPGPPGLPGPKGNMGLNFQGPKGEKGEQGLQGPPGPPGQISEQKRPIDVEFQKGDQGLPGDRGPPGPPGIRGPPGPPGGEKGEKGEQGEPGKRGKPGKDGENGQPGIPGLPGDPGYPGEPGRDGEKGQKGDXGPPGPPGLVIPRPGXGIXIGEKGNIGLPGLPGEKGERGFPGIQGPPGLPGPPGAAVMGPPGPPGFPGERGQKGDEGPPGISIPGPPGLDGQPGAPGLPGPPGPAGPHIPPSDEICEPGPPGPPGSPGDKGLQGEQGVKGDKGDXCFNCIGXGISGPPGQPGLPGLPGPPGSLGFPGQKGEKGQAGAXGPKGLPGIPGAPGAPGFPGSKGEPGDILXFPGMKGDKGELGSPGAPGLPGLPGXPGQDGLPGLPGPKGEPGGIXFKGERGPPGNPGLPGLPGNIGPMGPPGFGPPGPVGEKGIQGVAGNPGQPGIPGPKGDPGQXIXQPGKPGLPGNPGRDGDVGLPGDPGLPGQPGLPGIPGSKGEPGIPGIGLPGPPGPKGFPGIPGPPGAPGXPGRIGLEGPPGPPGFPGPKGEPGFALPGPPGPPGLPGFKGALGPKGDRGFPGPPGPPGRXGLDGLPGPKGDVGPNGQPGPMGPPGLPGIGVQGPPGPPGIPGPIGQPGLHGIPGEKGDPGPPGLDVPGPPGERGSPGIPGAPGPIGPPGSPGLPGKAGASGFPGXKGEMGMMGPPGPPGPLGIPGRSGVPGLKGDDGLQGQPGLPGPXGEKGSKGEPGLPGPPGPMDPNLLGSKGEKGEPGLPGIPGVSGPKGYQGLPGDPGQPGLSGQPGLPGPPGPKGNPGLPGQPGLIGPPGLKGXIGDMGFPGPQGVEGPPGPSGVPGQPGSPGLPGQKGDKGDPGISSIGLPGLPGPKGEPGLPGYPGNPGIKGSVGDPGLPGLPGXPGAKGQPGLPGFPGXPGPPGPKGISGPPGNPGLPGEPGPVGGGGHPGQPGPPGEKGKPGQDGIPGPAGQKGEPGQPGFGNPGPPGLPGLSGQKGDGGLPGIPGNPGLPGPKGEPGFHGFPGVQGPPGPPGSPGPALEGPKGNPGPQGPPGRPGLPGPEGPPGLPGNGGIKGEKGNPGQPGLPGLPGLKGDQGPPGLQGNPGRPGLNGMKGDPGLPGVPGFPGMKGPSGVPGSAGPEGEPGLIGPPGPPGLPGPSGQSIIIKGDAGPPGIPGQPGLKGLPGPQGPQGLPGPXGPPGDPGRNGLPGFDGAGGRKGDPGLPGQPGXRGLDGPPGPDGLQGPPGPPGXSSVAHGFLIXRHSQXXDAPQCPQGXLQVYEGFSLLYVQGNKRAHGQDLGXAGSCLRRFSXMPFMFCNINNVCNFASRNDYSYWLSXPEPMPMSMQPLKGQSIQPFISRCAVCEAPAVVIAVHSQXIQIPHCPQGWDSLWIGYSFMMHXSAGAEGSGQALASPGSCLEEFRSAPFIECHGRGXCNYYANSYSFWLAXVDVSDMFSKPQSEXLKAGDLRXRISRCQVCMKRX

SEQ ID NO: 6668 - protein, 1691 aa, Homo sapiens
  MOD_RES (103)..(103): Selenocysteine
  MOD_RES (127)..(127): Selenocysteine
  MOD_RES (188)..(188): Selenocysteine
  MOD_RES (336)..(336): Selenocysteine
  MOD_RES (351)..(351): Selenocysteine
  MOD_RES (354)..(354): Selenocysteine
  MOD_RES (480)..(480): Selenocysteine
  MOD_RES (487)..(487): Selenocysteine
  MOD_RES (523)..(523): Selenocysteine
  MOD_RES (552)..(552): Selenocysteine
  MOD_RES (577)..(577): Selenocysteine
  MOD_RES (597)..(597): Selenocysteine
  MOD_RES (658)..(658): Selenocysteine
  MOD_RES (660)..(660): Selenocysteine
  MOD_RES (729)..(729): Selenocysteine
  MOD_RES (789)..(789): Selenocysteine
  MOD_RES (894)..(894): Selenocysteine
  MOD_RES (937)..(937): Selenocysteine
  MOD_RES (1028)..(1028): Selenocysteine
  MOD_RES (1111)..(1111): Selenocysteine
  MOD_RES (1126)..(1126): Selenocysteine
  MOD_RES (1266)..(1266): Selenocysteine
  MOD_RES (1408)..(1408): Selenocysteine
  MOD_RES (1440)..(1440): Selenocysteine
  MOD_RES (1461)..(1461): Selenocysteine
  MOD_RES (1471)..(1471): Selenocysteine
  MOD_RES (1476)..(1477): Selenocysteine
  MOD_RES (1486)..(1486): Selenocysteine
  MOD_RES (1511)..(1511): Selenocysteine
  MOD_RES (1521)..(1521): Selenocysteine
  MOD_RES (1547)..(1547): Selenocysteine
  MOD_RES (1586)..(1586): Selenocysteine
  MOD_RES (1609)..(1609): Selenocysteine
  MOD_RES (1643)..(1643): Selenocysteine
  MOD_RES (1657)..(1657): Selenocysteine
  MOD_RES (1671)..(1671): Selenocysteine
  MOD_RES (1679)..(1679): Selenocysteine
  MOD_RES (1691)..(1691): Selenocysteine
MKLRGVSLAAGLFLLALSLWGQPAEAAACYGCSPGSKCDCSGIKGEKGERGFPGLEGHPGLPGFPGPEGPPGPRGQKGDDGIPGPPGPKGIRGPPGLPGFPGXPGLPGMPGHDGAPGPQGIPGCNGXKGERGFPGSPGFPGLQGPPGPPGIPGMKGEPGSIIMSSLPGPKGNPGYPGPPGIQGLPGPXGIPGPIGPPGPPGLMGPPGPPGLPGPKGNMGLNFQGPKGEKGEQGLQGPPGPPGQISEQKRPIDVEFQKGDQGLPGDRGPPGPPGIRGPPGPPGGEKGEKGEQGEPGKRGKPGKDGENGQPGIPGLPGDPGYPGEPGRDGEKGQKGDXGPPGPPGLVIPRPGXGIXIGEKGNIGLPGLPGEKGERGFPGIQGPPGLPGPPGAAVMGPPGPPGFPGERGQKGDEGPPGISIPGPPGLDGQPGAPGLPGPPGPAGPHIPPSDEICEPGPPGPPGSPGDKGLQGEQGVKGDKGDXCFNCIGXGISGPPGQPGLPGLPGPPGSLGFPGQKGEKGQAGAXGPKGLPGIPGAPGAPGFPGSKGEPGDILXFPGMKGDKGELGSPGAPGLPGLPGXPGQDGLPGLPGPKGEPGGIXFKGERGPPGNPGLPGLPGNIGPMGPPGFGPPGPVGEKGIQGVAGNPGQPGIPGPKGDPGQXIXQPGKPGLPGNPGRDGDVGLPGDPGLPGQPGLPGIPGSKGEPGIPGIGLPGPPGPKGFPGIPGPPGAPGXPGRIGLEGPPGPPGFPGPKGEPGFALPGPPGPPGLPGFKGALGPKGDRGFPGPPGPPGRXGLDGLPGPKGDVGPNGQPGPMGPPGLPGIGVQGPPGPPGIPGPIGQPGLHGIPGEKGDPGPPGLDVPGPPGERGSPGIPGAPGPIGPPGSPGLPGKAGASGFPGXKGEMGMMGPPGPPGPLGIPGRSGVPGLKGDDGLQGQPGLPGPXGEKGSKGEPGLPGPPGPMDPNLLGSKGEKGEPGLPGIPGVSGPKGYQGLPGDPGQPGLSGQPGLPGPPGPKGNPGLPGQPGLIGPPGLKGXIGDMGFPGPQGVEGPPGPSGVPGQPGSPGLPGQKGDKGDPGISSIGLPGLPGPKGEPGLPGYPGNPGIKGSVGDPGLPGLPGXPGAKGQPGLPGFPGXPGPPGPKGISGPPGNPGLPGEPGPVGGGGHPGQPGPPGEKGKPGQDGIPGPAGQKGEPGQPGFGNPGPPGLPGLSGQKGDGGLPGIPGNPGLPGPKGEPGFHGFPGVQGPPGPPGSPGPALEGPKGNPGPQGPPGRPGPXGFQGLPGPEGPPGLPGNGGIKGEKGNPGQPGLPGLPGLKGDQGPPGLQGNPGRPGLNGMKGDPGLPGVPGFPGMKGPSGVPGSAGPEGEPGLIGPPGPPGLPGPSGQSIIIKGDAGPPGIPGQPGLKGLPGPQGPQGLPGPXGPPGDPGRNGLPGFDGAGGRKGDPGLPGQPGXRGLDGPPGPDGLQGPPGPPGXSSVAHGFLIXRHSQXXDAPQCPQGXLQVYEGFSLLYVQGNKRAHGQDLGXAGSCLRRFSXMPFMFCNINNVCNFASRNDYSYWLSXPEPMPMSMQPLKGQSIQPFISRCAVCEAPAVVIAVHSQXIQIPHCPQGWDSLWIGYSFMMHXSAGAEGSGQALASPGSCLEEFRSAPFIECHGRGXCNYYANSYSFWLAXVDVSDMFSKPQSEXLKAGDLRXRISRCQVCMKRX

SEQ ID NO: 6669 - protein, 174 aa, Homo sapiens
  MOD_RES (1)..(1): Any amino acid
  MOD_RES (15)..(15): Selenocysteine
  MOD_RES (106)..(106): Selenocysteine
XDDGLQGQPGLPGPXGEKGSKGEPGLPGPPGPMDPNLLGSKGEKGEPGLPGIPGVSGPKGYQGLPGDPGQPGLSGQPGLPGPPGPKGNPGLPGQPGLIGPPGLKGXIGDMGFPGPQGVEGPPGPSGVPGQPGSPGLPGQKGDKGDPGISSIGLPGLPGPKMIRRYVLGFVASPK

SEQ ID NO: 6670 - protein, 115 aa, Homo sapiens
  MOD_RES (1)..(1): Any amino acid
  MOD_RES (7)..(7): Selenocysteine
  MOD_RES (39)..(39): Selenocysteine
  MOD_RES (60)..(60): Selenocysteine
  MOD_RES (70)..(70): Selenocysteine
  MOD_RES (75)..(76): Selenocysteine
  MOD_RES (85)..(85): Selenocysteine
XGLPGPXGPPGDPGRNGLPGFDGAGGRKGDPGLPGQPGXRGLDGPPGPDGLQGPPGPPGXSSVAHGFLIXRHSQXXDAPQCPQGXLQVYEGFSLLYVQGNKRAHGQDLVNLSQKR

SEQ ID NO: 6671 - protein, 1633 aa, Homo sapiens
  MOD_RES (11)..(11): Selenocysteine
  MOD_RES (15)..(15): Selenocysteine
  MOD_RES (60)..(60): Selenocysteine
  MOD_RES (66)..(66): Selenocysteine
  MOD_RES (69)..(69): Selenocysteine
  MOD_RES (128)..(128): Selenocysteine
  MOD_RES (182)..(182): Selenocysteine
  MOD_RES (244)..(244): Selenocysteine
  MOD_RES (282)..(283): Selenocysteine
  MOD_RES (321)..(321): Selenocysteine
  MOD_RES (417)..(418): Selenocysteine
  MOD_RES (446)..(446): Selenocysteine
  MOD_RES (448)..(448): Selenocysteine
  MOD_RES (490)..(490): Selenocysteine
  MOD_RES (551)..(551): Selenocysteine
  MOD_RES (653)..(653): Selenocysteine
  MOD_RES (670)..(670): Selenocysteine
  MOD_RES (685)..(685): Selenocysteine
  MOD_RES (749)..(749): Selenocysteine
  MOD_RES (769)..(769): Selenocysteine
  MOD_RES (804)..(804): Selenocysteine
  MOD_RES (813)..(813): Selenocysteine
  MOD_RES (846)..(846): Selenocysteine
  MOD_RES (918)..(918): Selenocysteine
  MOD_RES (928)..(928): Selenocysteine
  MOD_RES (939)..(939): Selenocysteine
  MOD_RES (1037)..(1037): Selenocysteine
  MOD_RES (1073)..(1073): Selenocysteine
  MOD_RES (1094)..(1094): Selenocysteine
  MOD_RES (1169)..(1169): Selenocysteine
  MOD_RES (1266)..(1266): Selenocysteine
  MOD_RES (1311)..(1311): Selenocysteine
  MOD_RES (1313)..(1313): Selenocysteine
  MOD_RES (1336)..(1336): Selenocysteine
  MOD_RES (1411)..(1411): Selenocysteine
  MOD_RES (1463)..(1463): Selenocysteine
  MOD_RES (1489)..(1490): Selenocysteine
  MOD_RES (1501)..(1501): Selenocysteine
  MOD_RES (1528)..(1528): Selenocysteine
  MOD_RES (1549)..(1549): Selenocysteine
  MOD_RES (1573)..(1573): Selenocysteine
  MOD_RES (1584)..(1584): Selenocysteine
  MOD_RES (1597)..(1598): Selenocysteine
  MOD_RES (1613)..(1613): Selenocysteine
  MOD_RES (1621)..(1621): Selenocysteine
MHPGLWLLLVXLCLXEELAAAGEKSYGKPCGGQDCSGSCQCFPEKGARGRPGPIGIQGPXGPQGFXGSXGLSGLKGERGFPGLLGPYGPKGDKGPMGVPGFLGINGIPGHPGQPGPRGPPGLDGCNGXQGAVGFPGPDGYPGLLGPPGLPGQKGSKGDPVLAPGSFKGMKGDPGLPGLDGIXGPQGAPGFPGAVGPAGPPGLQGPPGPPGPLGPDGNMGLGFQGEKGVKGDVGLPGPAGPPPSXGELEFMGFPKGKKGSKGEPGPKGFPGISGPPGFPGLGXXGEKGEKGEKGIPGLPGPRGPMGSEGVQGPPGQQGKKGXLGFPGLNGFQGIEGQKGDIGLPGPDVFIDIDGAVISGNPGDPGVPGLPGLKGDEGIQGLRGPSGVPGLPALSGVPGALGPQGFPGLKGDQGNPGRXXIGAAGLPGRDGLPGPPGPPGPPSPEFEXEXLHNKESGFPGLRGEQGPKGNLGLKGIKGDSGFCACDGGVPNXGPPGEPGPPGPWGLIGLPGLKGARGDRGSGGAQGPAGAPGLVGPLGPSGPKGKKGEPILSXIQGMPGDRGDSGSQGFRGVIGEPGKDGVPGLPGLPGLPGDGGQGFPGEKGLPGLPGEKGHPGPPGLPGNGLPGLPGPRGLPGDKGKDGLPGQQGLPGSKGIXLPCIIPGSYGPSGFPGXPGFPGPKGSRGLPGXPGQPGSSGSKGEPGSPGLVHLPELPGFPGPRGEKGLPGFPGLPGKDGLPGMIGSPGLPGSKGAXGDIFGAENGAPGEQGLQGLXGHKGFLGDSGLPGLKGVHGKPGLLGPKGERGSPGXPGQVGQPGXPGSSGPYGIKGKSGLPGAPGFPGISGHPGKKGXRGKKGPPGSIVKKGLPGLKGLPGNPGLVGLKGSPGSPGVAGLPALSGPKGEKGSVGFVGFPGIPGLPGIPGXRGLKGIPGSXGKMGPSGRAGXPGEKGDRGNPGPVGIPSPRRPMSNLWLKGDKGSQGSAGSNGFPGPRGDKGEAGRPGPPGLPGAPGLPGIIKGVSGKPGPPGFMGIRGLPGLKGSSGIXGFPGMPGESGSQGIRGSPGLPGASGLPGLKGDNGQXVEISGSPGPKGQPGESGFKGXKGRDGLIGNIGFPGNKGEDGKVGVSGDVGLPGAPGFPGVAGMRGEPGLPGSSGHQGAIGPLGSPGLIGPKGPSIXGVPGPAGLPGPKGEKGYPGIGIGAPGKPGLRGQKGDRGFPGLQGPAGLPGAPGISLPSLIAGQPGDPGRPGLDGERGRPGPAGPPGPPGPSSNQGDXGDPGFPGIPGPKGPKGDQGIPGFSGLPGELGLKGSSGLQGDPGQXPXAEAVQVPPGPLGLPGIDGIPGLXGDPGAQGPVGLQGSKGLPGIPGKDGPSGLPGPPGALGDPGLPGLQGPPGFEGAPGQQGPFGMPGMPGQSMRVGYXLVKHSQSEQVPPCPIGMSQLWVGYSLLFVEGQEKAHNQDLGFAGSCLPRFSXMPFIYCNINEVCHYARRNDKSYWLSXXAPIPMMPVSQXQIPQYISRCSVCEAPSQAIAVHSQDIXIPQCPLGWRSLWIGYSFLMHXAAGAEGGGQSLVSPGSCLEDFRAXPFIECSGARGXCHYFANKYSFWLXXVEERQQFGELPVSEXLKAGQLHXRVSRCQVCMKSL

SEQ ID NO: 6672 - protein, 1666 aa, Homo sapiens
  MOD_RES (11)..(11): Selenocysteine
  MOD_RES (15)..(15): Selenocysteine
  MOD_RES (60)..(60): Selenocysteine
  MOD_RES (66)..(66): Selenocysteine
  MOD_RES (69)..(69): Selenocysteine
  MOD_RES (128)..(128): Selenocysteine
  MOD_RES (182)..(182): Selenocysteine
  MOD_RES (244)..(244): Selenocysteine
  MOD_RES (282)..(283): Selenocysteine
  MOD_RES (321)..(321): Selenocysteine
  MOD_RES (417)..(418): Selenocysteine
  MOD_RES (446)..(446): Selenocysteine
  MOD_RES (448)..(448): Selenocysteine
  MOD_RES (490)..(490): Selenocysteine
  MOD_RES (551)..(551): Selenocysteine
  MOD_RES (653)..(653): Selenocysteine
  MOD_RES (670)..(670): Selenocysteine
  MOD_RES (685)..(685): Selenocysteine
  MOD_RES (749)..(749): Selenocysteine
  MOD_RES (769)..(769): Selenocysteine
  MOD_RES (804)..(804): Selenocysteine
  MOD_RES (813)..(813): Selenocysteine
  MOD_RES (846)..(846): Selenocysteine
  MOD_RES (918)..(918): Selenocysteine
  MOD_RES (928)..(928): Selenocysteine
  MOD_RES (939)..(939): Selenocysteine
  MOD_RES (1037)..(1037): Selenocysteine
  MOD_RES (1073)..(1073): Selenocysteine
  MOD_RES (1094)..(1094): Selenocysteine
  MOD_RES (1169)..(1169): Selenocysteine
  MOD_RES (1266)..(1266): Selenocysteine
  MOD_RES (1310)..(1310): Selenocysteine
  MOD_RES (1344)..(1344): Selenocysteine
  MOD_RES (1346)..(1346): Selenocysteine
  MOD_RES (1369)..(1369): Selenocysteine
  MOD_RES (1444)..(1444): Selenocysteine
  MOD_RES (1496)..(1496): Selenocysteine
  MOD_RES (1522)..(1523): Selenocysteine
  MOD_RES (1534)..(1534): Selenocysteine
  MOD_RES (1561)..(1561): Selenocysteine
  MOD_RES (1582)..(1582): Selenocysteine
  MOD_RES (1606)..(1606): Selenocysteine
  MOD_RES (1617)..(1617): Selenocysteine
  MOD_RES (1630)..(1631): Selenocysteine
  MOD_RES (1646)..(1646): Selenocysteine
  MOD_RES (1654)..(1654): Selenocysteine
MHPGLWLLLVXLCLXEELAAAGEKSYGKPCGGQDCSGSCQCFPEKGARGRPGPIGIQGPXGPQGFXGSXGLSGLKGERGFPGLLGPYGPKGDKGPMGVPGFLGINGIPGHPGQPGPRGPPGLDGCNGXQGAVGFPGPDGYPGLLGPPGLPGQKGSKGDPVLAPGSFKGMKGDPGLPGLDGIXGPQGAPGFPGAVGPAGPPGLQGPPGPPGPLGPDGNMGLGFQGEKGVKGDVGLPGPAGPPPSXGELEFMGFPKGKKGSKGEPGPKGFPGISGPPGFPGLGXXGEKGEKGEKGIPGLPGPRGPMGSEGVQGPPGQQGKKGXLGFPGLNGFQGIEGQKGDIGLPGPDVFIDIDGAVISGNPGDPGVPGLPGLKGDEGIQGLRGPSGVPGLPALSGVPGALGPQGFPGLKGDQGNPGRXXIGAAGLPGRDGLPGPPGPPGPPSPEFEXEXLHNKESGFPGLRGEQGPKGNLGLKGIKGDSGFCACDGGVPNXGPPGEPGPPGPWGLIGLPGLKGARGDRGSGGAQGPAGAPGLVGPLGPSGPKGKKGEPILSXIQGMPGDRGDSGSQGFRGVIGEPGKDGVPGLPGLPGLPGDGGQGFPGEKGLPGLPGEKGHPGPPGLPGNGLPGLPGPRGLPGDKGKDGLPGQQGLPGSKGIXLPCIIPGSYGPSGFPGXPGFPGPKGSRGLPGXPGQPGSSGSKGEPGSPGLVHLPELPGFPGPRGEKGLPGFPGLPGKDGLPGMIGSPGLPGSKGAXGDIFGAENGAPGEQGLQGLXGHKGFLGDSGLPGLKGVHGKPGLLGPKGERGSPGXPGQVGQPGXPGSSGPYGIKGKSGLPGAPGFPGISGHPGKKGXRGKKGPPGSIVKKGLPGLKGLPGNPGLVGLKGSPGSPGVAGLPALSGPKGEKGSVGFVGFPGIPGLPGIPGXRGLKGIPGSXGKMGPSGRAGXPGEKGDRGNPGPVGIPSPRRPMSNLWLKGDKGSQGSAGSNGFPGPRGDKGEAGRPGPPGLPGAPGLPGIIKGVSGKPGPPGFMGIRGLPGLKGSSGIXGFPGMPGESGSQGIRGSPGLPGASGLPGLKGDNGQXVEISGSPGPKGQPGESGFKGXKGRDGLIGNIGFPGNKGEDGKVGVSGDVGLPGAPGFPGVAGMRGEPGLPGSSGHQGAIGPLGSPGLIGPKGPSIXGVPGPAGLPGPKGEKGYPGIGIGAPGKPGLRGQKGDRGFPGLQGPAGLPGAPGISLPSLIAGQPGDPGRPGLDGERGRPGPAGPPGPPGPSSNQGDXGDPGFPGIPGPKGPKGDQGIPGFSGLPGELGLKGMRGEPGFMGXPGKVGPPGDPGFPGMKGKAGPRGSSGLQGDPGQXPXAEAVQVPPGPLGLPGIDGIPGLXGDPGAQGPVGLQGSKGLPGIPGKDGPSGLPGPPGALGDPGLPGLQGPPGFEGAPGQQGPFGMPGMPGQSMRVGYXLVKHSQSEQVPPCPIGMSQLWVGYSLLFVEGQEKAHNQDLGFAGSCLPRFSXMPFIYCNINEVCHYARRNDKSYWLSXXAPIPMMPVSQXQIPQYISRCSVCEAPSQAIAVHSQDIXIPQCPLGWRSLWIGYSFLMHXAAGAEGGGQSLVSPGSCLEDFRAXPFIECSGARGXCHYFANKYSFWLXXVEERQQFGELPVSEXLKAGQLHXRVSRCQVCMKSL

SEQ ID NO: 6673 - protein, 1678 aa, Homo sapiens
  MOD_RES (11)..(11): Selenocysteine
  MOD_RES (15)..(15): Selenocysteine
  MOD_RES (60)..(60): Selenocysteine
  MOD_RES (66)..(66): Selenocysteine
  MOD_RES (69)..(69): Selenocysteine
  MOD_RES (128)..(128): Selenocysteine
  MOD_RES (182)..(182): Selenocysteine
  MOD_RES (244)..(244): Selenocysteine
  MOD_RES (282)..(283): Selenocysteine
  MOD_RES (321)..(321): Selenocysteine
  MOD_RES (417)..(418): Selenocysteine
  MOD_RES (446)..(446): Selenocysteine
  MOD_RES (448)..(448): Selenocysteine
  MOD_RES (490)..(490): Selenocysteine
  MOD_RES (551)..(551): Selenocysteine
  MOD_RES (653)..(653): Selenocysteine
  MOD_RES (670)..(670): Selenocysteine
  MOD_RES (685)..(685): Selenocysteine
  MOD_RES (749)..(749): Selenocysteine
  MOD_RES (769)..(769): Selenocysteine
  MOD_RES (804)..(804): Selenocysteine
  MOD_RES (813)..(813): Selenocysteine
  MOD_RES (846)..(846): Selenocysteine
  MOD_RES (918)..(918): Selenocysteine
  MOD_RES (928)..(928): Selenocysteine
  MOD_RES (939)..(939): Selenocysteine
  MOD_RES (1037)..(1037): Selenocysteine
  MOD_RES (1073)..(1073): Selenocysteine
  MOD_RES (1094)..(1094): Selenocysteine
  MOD_RES (1181)..(1181): Selenocysteine
  MOD_RES (1184)..(1184): Selenocysteine
  MOD_RES (1187)..(1187): Selenocysteine
  MOD_RES (1193)..(1193): Selenocysteine
  MOD_RES (1290)..(1290): Selenocysteine
  MOD_RES (1322)..(1322): Selenocysteine
  MOD_RES (1356)..(1356): Selenocysteine
  MOD_RES (1358)..(1358): Selenocysteine
  MOD_RES (1381)..(1381): Selenocysteine
  MOD_RES (1456)..(1456): Selenocysteine
  MOD_RES (1508)..(1508): Selenocysteine
  MOD_RES (1534)..(1535): Selenocysteine
  MOD_RES (1546)..(1546): Selenocysteine
  MOD_RES (1573)..(1573): Selenocysteine
  MOD_RES (1594)..(1594): Selenocysteine
  MOD_RES (1618)..(1618): Selenocysteine
  MOD_RES (1629)..(1629): Selenocysteine
  MOD_RES (1642)..(1643): Selenocysteine
  MOD_RES (1658)..(1658): Selenocysteine
  MOD_RES (1666)..(1666): Selenocysteine
MHPGLWLLLVXLCLXEELAAAGEKSYGKPCGGQDCSGSCQCFPEKGARGRPGPIGIQGPXGPQGFXGSXGLSGLKGERGFPGLLGPYGPKGDKGPMGVPGFLGINGIPGHPGQPGPRGPPGLDGCNGXQGAVGFPGPDGYPGLLGPPGLPGQKGSKGDPVLAPGSFKGMKGDPGLPGLDGIXGPQGAPGFPGAVGPAGPPGLQGPPGPPGPLGPDGNMGLGFQGEKGVKGDVGLPGPAGPPPSXGELEFMGFPKGKKGSKGEPGPKGFPGISGPPGFPGLGXXGEKGEKGEKGIPGLPGPRGPMGSEGVQGPPGQQGKKGXLGFPGLNGFQGIEGQKGDIGLPGPDVFIDIDGAVISGNPGDPGVPGLPGLKGDEGIQGLRGPSGVPGLPALSGVPGALGPQGFPGLKGDQGNPGRXXIGAAGLPGRDGLPGPPGPPGPPSPEFEXEXLHNKESGFPGLRGEQGPKGNLGLKGIKGDSGFCACDGGVPNXGPPGEPGPPGPWGLIGLPGLKGARGDRGSGGAQGPAGAPGLVGPLGPSGPKGKKGEPILSXIQGMPGDRGDSGSQGFRGVIGEPGKDGVPGLPGLPGLPGDGGQGFPGEKGLPGLPGEKGHPGPPGLPGNGLPGLPGPRGLPGDKGKDGLPGQQGLPGSKGIXLPCIIPGSYGPSGFPGXPGFPGPKGSRGLPGXPGQPGSSGSKGEPGSPGLVHLPELPGFPGPRGEKGLPGFPGLPGKDGLPGMIGSPGLPGSKGAXGDIFGAENGAPGEQGLQGLXGHKGFLGDSGLPGLKGVHGKPGLLGPKGERGSPGXPGQVGQPGXPGSSGPYGIKGKSGLPGAPGFPGISGHPGKKGXRGKKGPPGSIVKKGLPGLKGLPGNPGLVGLKGSPGSPGVAGLPALSGPKGEKGSVGFVGFPGIPGLPGIPGXRGLKGIPGSXGKMGPSGRAGXPGEKGDRGNPGPVGIPSPRRPMSNLWLKGDKGSQGSAGSNGFPGPRGDKGEAGRPGPPGLPGAPGLPGIIKGVSGKPGPPGFMGIRGLPGLKGSSGIXGFPGMPGESGSQGIRGSPGLPGASGLPGLKGDNGQXVEISGSPGPKGQPGESGFKGXKGRDGLIGNIGFPGNKGEDGKVGVSGDVGLPGAPGFPGVAGMRGEPGLPGSSGHQGAIGPLGSPGLIGPKGFPGFPGLHGLNGLPGXKGXHGXPGPSIXGVPGPAGLPGPKGEKGYPGIGIGAPGKPGLRGQKGDRGFPGLQGPAGLPGAPGISLPSLIAGQPGDPGRPGLDGERGRPGPAGPPGPPGPSSNQGDXGDPGFPGIPGFSGLPGELGLKGMRGEPGFMGXPGKVGPPGDPGFPGMKGKAGPRGSSGLQGDPGQXPXAEAVQVPPGPLGLPGIDGIPGLXGDPGAQGPVGLQGSKGLPGIPGKDGPSGLPGPPGALGDPGLPGLQGPPGFEGAPGQQGPFGMPGMPGQSMRVGYXLVKHSQSEQVPPCPIGMSQLWVGYSLLFVEGQEKAHNQDLGFAGSCLPRFSXMPFIYCNINEVCHYARRNDKSYWLSXXAPIPMMPVSQXQIPQYISRCSVCEAPSQAIAVHSQDIXIPQCPLGWRSLWIGYSFLMHXAAGAEGGGQSLVSPGSCLEDFRAXPFIECSGARGXCHYFANKYSFWLXXVEERQQFGELPVSEXLKAGQLHXRVSRCQVCMKSL

SEQ ID NO: 6674 - protein, 1690 aa, Homo sapiens
  MOD_RES (11)..(11): Selenocysteine
  MOD_RES (15)..(15): Selenocysteine
  MOD_RES (60)..(60): Selenocysteine
  MOD_RES (66)..(66): Selenocysteine
  MOD_RES (69)..(69): Selenocysteine
  MOD_RES (128)..(128): Selenocysteine
  MOD_RES (182)..(182): Selenocysteine
  MOD_RES (244)..(244): Selenocysteine
  MOD_RES (282)..(283): Selenocysteine
  MOD_RES (321)..(321): Selenocysteine
  MOD_RES (417)..(418): Selenocysteine
  MOD_RES (446)..(446): Selenocysteine
  MOD_RES (448)..(448): Selenocysteine
  MOD_RES (490)..(490): Selenocysteine
  MOD_RES (551)..(551): Selenocysteine
  MOD_RES (653)..(653): Selenocysteine
  MOD_RES (670)..(670): Selenocysteine
  MOD_RES (685)..(685): Selenocysteine
  MOD_RES (749)..(749): Selenocysteine
  MOD_RES (769)..(769): Selenocysteine
  MOD_RES (804)..(804): Selenocysteine
  MOD_RES (813)..(813): Selenocysteine
  MOD_RES (846)..(846): Selenocysteine
  MOD_RES (918)..(918): Selenocysteine
  MOD_RES (928)..(928): Selenocysteine
  MOD_RES (939)..(939): Selenocysteine
  MOD_RES (1037)..(1037): Selenocysteine
  MOD_RES (1073)..(1073): Selenocysteine
  MOD_RES (1094)..(1094): Selenocysteine
  MOD_RES (1181)..(1181): Selenocysteine
  MOD_RES (1184)..(1184): Selenocysteine
  MOD_RES (1187)..(1187): Selenocysteine
  MOD_RES (1193)..(1193): Selenocysteine
  MOD_RES (1290)..(1290): Selenocysteine
  MOD_RES (1334)..(1334): Selenocysteine
  MOD_RES (1368)..(1368): Selenocysteine
  MOD_RES (1370)..(1370): Selenocysteine
  MOD_RES (1393)..(1393): Selenocysteine
  MOD_RES (1468)..(1468): Selenocysteine
  MOD_RES (1520)..(1520): Selenocysteine
  MOD_RES (1546)..(1547): Selenocysteine
  MOD_RES (1558)..(1558): Selenocysteine
  MOD_RES (1585)..(1585): Selenocysteine
  MOD_RES (1606)..(1606): Selenocysteine
  MOD_RES (1630)..(1630): Selenocysteine
  MOD_RES (1641)..(1641): Selenocysteine
  MOD_RES (1654)..(1655): Selenocysteine
  MOD_RES (1670)..(1670): Selenocysteine
  MOD_RES (1678)..(1678): Selenocysteine
MHPGLWLLLVXLCLXEELAAAGEKSYGKPCGGQDCSGSCQCFPEKGARGRPGPIGIQGPXGPQGFXGSXGLSGLKGERGFPGLLGPYGPKGDKGPMGVPGFLGINGIPGHPGQPGPRGPPGLDGCNGXQGAVGFPGPDGYPGLLGPPGLPGQKGSKGDPVLAPGSFKGMKGDPGLPGLDGIXGPQGAPGFPGAVGPAGPPGLQGPPGPPGPLGPDGNMGLGFQGEKGVKGDVGLPGPAGPPPSXGELEFMGFPKGKKGSKGEPGPKGFPGISGPPGFPGLGXXGEKGEKGEKGIPGLPGPRGPMGSEGVQGPPGQQGKKGXLGFPGLNGFQGIEGQKGDIGLPGPDVFIDIDGAVISGNPGDPGVPGLPGLKGDEGIQGLRGPSGVPGLPALSGVPGALGPQGFPGLKGDQGNPGRXXIGAAGLPGRDGLPGPPGPPGPPSPEFEXEXLHNKESGFPGLRGEQGPKGNLGLKGIKGDSGFCACDGGVPNXGPPGEPGPPGPWGLIGLPGLKGARGDRGSGGAQGPAGAPGLVGPLGPSGPKGKKGEPILSXIQGMPGDRGDSGSQGFRGVIGEPGKDGVPGLPGLPGLPGDGGQGFPGEKGLPGLPGEKGHPGPPGLPGNGLPGLPGPRGLPGDKGKDGLPGQQGLPGSKGIXLPCIIPGSYGPSGFPGXPGFPGPKGSRGLPGXPGQPGSSGSKGEPGSPGLVHLPELPGFPGPRGEKGLPGFPGLPGKDGLPGMIGSPGLPGSKGAXGDIFGAENGAPGEQGLQGLXGHKGFLGDSGLPGLKGVHGKPGLLGPKGERGSPGXPGQVGQPGXPGSSGPYGIKGKSGLPGAPGFPGISGHPGKKGXRGKKGPPGSIVKKGLPGLKGLPGNPGLVGLKGSPGSPGVAGLPALSGPKGEKGSVGFVGFPGIPGLPGIPGXRGLKGIPGSXGKMGPSGRAGXPGEKGDRGNPGPVGIPSPRRPMSNLWLKGDKGSQGSAGSNGFPGPRGDKGEAGRPGPPGLPGAPGLPGIIKGVSGKPGPPGFMGIRGLPGLKGSSGIXGFPGMPGESGSQGIRGSPGLPGASGLPGLKGDNGQXVEISGSPGPKGQPGESGFKGXKGRDGLIGNIGFPGNKGEDGKVGVSGDVGLPGAPGFPGVAGMRGEPGLPGSSGHQGAIGPLGSPGLIGPKGFPGFPGLHGLNGLPGXKGXHGXPGPSIXGVPGPAGLPGPKGEKGYPGIGIGAPGKPGLRGQKGDRGFPGLQGPAGLPGAPGISLPSLIAGQPGDPGRPGLDGERGRPGPAGPPGPPGPSSNQGDXGDPGFPGIPGPKGPKGDQGIPGFSGLPGELGLKGMRGEPGFMGXPGKVGPPGDPGFPGMKGKAGPRGSSGLQGDPGQXPXAEAVQVPPGPLGLPGIDGIPGLXGDPGAQGPVGLQGSKGLPGIPGKDGPSGLPGPPGALGDPGLPGLQGPPGFEGAPGQQGPFGMPGMPGQSMRVGYXLVKHSQSEQVPPCPIGMSQLWVGYSLLFVEGQEKAHNQDLGFAGSCLPRFSXMPFIYCNINEVCHYARRNDKSYWLSXXAPIPMMPVSQXQIPQYISRCSVCEAPSQAIAVHSQDIXIPQCPLGWRSLWIGYSFLMHXAAGAEGGGQSLVSPGSCLEDFRAXPFIECSGARGXCHYFANKYSFWLXXVEERQQFGELPVSEXLKAGQLHXRVSRCQVCMKSL

SEQ ID NO: 6675 - protein, 1707 aa, Homo sapiens
  MOD_RES (11)..(11): Selenocysteine
  MOD_RES (15)..(15): Selenocysteine
  MOD_RES (60)..(60): Selenocysteine
  MOD_RES (66)..(66): Selenocysteine
  MOD_RES (69)..(69): Selenocysteine
  MOD_RES (128)..(128): Selenocysteine
  MOD_RES (182)..(182): Selenocysteine
  MOD_RES (244)..(244): Selenocysteine
  MOD_RES (282)..(283): Selenocysteine
  MOD_RES (321)..(321): Selenocysteine
  MOD_RES (417)..(418): Selenocysteine
  MOD_RES (446)..(446): Selenocysteine
  MOD_RES (448)..(448): Selenocysteine
  MOD_RES (490)..(490): Selenocysteine
  MOD_RES (551)..(551): Selenocysteine
  MOD_RES (665)..(665): Selenocysteine
  MOD_RES (670)..(670): Selenocysteine
  MOD_RES (687)..(687): Selenocysteine
  MOD_RES (702)..(702): Selenocysteine
  MOD_RES (766)..(766): Selenocysteine
  MOD_RES (786)..(786): Selenocysteine
  MOD_RES (821)..(821): Selenocysteine
  MOD_RES (830)..(830): Selenocysteine
  MOD_RES (863)..(863): Selenocysteine
  MOD_RES (935)..(935): Selenocysteine
  MOD_RES (945)..(945): Selenocysteine
  MOD_RES (956)..(956): Selenocysteine
  MOD_RES (1054)..(1054): Selenocysteine
  MOD_RES (1090)..(1090): Selenocysteine
  MOD_RES (1111)..(1111): Selenocysteine
  MOD_RES (1198)..(1198): Selenocysteine
  MOD_RES (1201)..(1201): Selenocysteine
  MOD_RES (1204)..(1204): Selenocysteine
  MOD_RES (1210)..(1210): Selenocysteine
  MOD_RES (1307)..(1307): Selenocysteine
  MOD_RES (1351)..(1351): Selenocysteine
  MOD_RES (1385)..(1385): Selenocysteine
  MOD_RES (1387)..(1387): Selenocysteine
  MOD_RES (1410)..(1410): Selenocysteine
  MOD_RES (1485)..(1485): Selenocysteine
  MOD_RES (1537)..(1537): Selenocysteine
  MOD_RES (1563)..(1564): Selenocysteine
  MOD_RES (1575)..(1575): Selenocysteine
  MOD_RES (1602)..(1602): Selenocysteine
  MOD_RES (1623)..(1623): Selenocysteine
  MOD_RES (1647)..(1647): Selenocysteine
  MOD_RES (1658)..(1658): Selenocysteine
  MOD_RES (1671)..(1672): Selenocysteine
  MOD_RES (1687)..(1687): Selenocysteine
  MOD_RES (1695)..(1695): Selenocysteine
MHPGLWLLLVXLCLXEELAAAGEKSYGKPCGGQDCSGSCQCFPEKGARGRPGPIGIQGPXGPQGFXGSXGLSGLKGERGFPGLLGPYGPKGDKGPMGVPGFLGINGIPGHPGQPGPRGPPGLDGCNGXQGAVGFPGPDGYPGLLGPPGLPGQKGSKGDPVLAPGSFKGMKGDPGLPGLDGIXGPQGAPGFPGAVGPAGPPGLQGPPGPPGPLGPDGNMGLGFQGEKGVKGDVGLPGPAGPPPSXGELEFMGFPKGKKGSKGEPGPKGFPGISGPPGFPGLGXXGEKGEKGEKGIPGLPGPRGPMGSEGVQGPPGQQGKKGXLGFPGLNGFQGIEGQKGDIGLPGPDVFIDIDGAVISGNPGDPGVPGLPGLKGDEGIQGLRGPSGVPGLPALSGVPGALGPQGFPGLKGDQGNPGRXXIGAAGLPGRDGLPGPPGPPGPPSPEFEXEXLHNKESGFPGLRGEQGPKGNLGLKGIKGDSGFCACDGGVPNXGPPGEPGPPGPWGLIGLPGLKGARGDRGSGGAQGPAGAPGLVGPLGPSGPKGKKGEPILSXIQGMPGDRGDSGSQGFRGVIGEPGKDGVPGLPGLPGLPGDGGQGFPGEKGLPGLPGEKGHPGPPGLPGNGLPGLPGPRGLPGDKGKDGLPGQQGLPGSKGDCCCREVGKGDLDXERGIXLPCIIPGSYGPSGFPGXPGFPGPKGSRGLPGXPGQPGSSGSKGEPGSPGLVHLPELPGFPGPRGEKGLPGFPGLPGKDGLPGMIGSPGLPGSKGAXGDIFGAENGAPGEQGLQGLXGHKGFLGDSGLPGLKGVHGKPGLLGPKGERGSPGXPGQVGQPGXPGSSGPYGIKGKSGLPGAPGFPGISGHPGKKGXRGKKGPPGSIVKKGLPGLKGLPGNPGLVGLKGSPGSPGVAGLPALSGPKGEKGSVGFVGFPGIPGLPGIPGXRGLKGIPGSXGKMGPSGRAGXPGEKGDRGNPGPVGIPSPRRPMSNLWLKGDKGSQGSAGSNGFPGPRGDKGEAGRPGPPGLPGAPGLPGIIKGVSGKPGPPGFMGIRGLPGLKGSSGIXGFPGMPGESGSQGIRGSPGLPGASGLPGLKGDNGQXVEISGSPGPKGQPGESGFKGXKGRDGLIGNIGFPGNKGEDGKVGVSGDVGLPGAPGFPGVAGMRGEPGLPGSSGHQGAIGPLGSPGLIGPKGFPGFPGLHGLNGLPGXKGXHGXPGPSIXGVPGPAGLPGPKGEKGYPGIGIGAPGKPGLRGQKGDRGFPGLQGPAGLPGAPGISLPSLIAGQPGDPGRPGLDGERGRPGPAGPPGPPGPSSNQGDXGDPGFPGIPGPKGPKGDQGIPGFSGLPGELGLKGMRGEPGFMGXPGKVGPPGDPGFPGMKGKAGPRGSSGLQGDPGQXPXAEAVQVPPGPLGLPGIDGIPGLXGDPGAQGPVGLQGSKGLPGIPGKDGPSGLPGPPGALGDPGLPGLQGPPGFEGAPGQQGPFGMPGMPGQSMRVGYXLVKHSQSEQVPPCPIGMSQLWVGYSLLFVEGQEKAHNQDLGFAGSCLPRFSXMPFIYCNINEVCHYARRNDKSYWLSXXAPIPMMPVSQXQIPQYISRCSVCEAPSQAIAVHSQDIXIPQCPLGWRSLWIGYSFLMHXAAGAEGGGQSLVSPGSCLEDFRAXPFIECSGARGXCHYFANKYSFWLXXVEERQQFGELPVSEXLKAGQLHXRVSRCQVCMKSL

SEQ ID NO: 6676 - protein, 1691 aa, Homo sapiens
  MOD_RES (12)..(12): Selenocysteine
  MOD_RES (16)..(16): Selenocysteine
  MOD_RES (61)..(61): Selenocysteine
  MOD_RES (67)..(67): Selenocysteine
  MOD_RES (70)..(70): Selenocysteine
  MOD_RES (129)..(129): Selenocysteine
  MOD_RES (183)..(183): Selenocysteine
  MOD_RES (245)..(245): Selenocysteine
  MOD_RES (283)..(284): Selenocysteine
  MOD_RES (322)..(322): Selenocysteine
  MOD_RES (418)..(419): Selenocysteine
  MOD_RES (447)..(447): Selenocysteine
  MOD_RES (449)..(449): Selenocysteine
  MOD_RES (491)..(491): Selenocysteine
  MOD_RES (552)..(552): Selenocysteine
  MOD_RES (654)..(654): Selenocysteine
  MOD_RES (671)..(671): Selenocysteine
  MOD_RES (686)..(686): Selenocysteine
  MOD_RES (750)..(750): Selenocysteine
  MOD_RES (770)..(770): Selenocysteine
  MOD_RES (805)..(805): Selenocysteine
  MOD_RES (814)..(814): Selenocysteine
  MOD_RES (847)..(847): Selenocysteine
  MOD_RES (919)..(919): Selenocysteine
  MOD_RES (929)..(929): Selenocysteine
  MOD_RES (940)..(940): Selenocysteine
  MOD_RES (1038)..(1038): Selenocysteine
  MOD_RES (1074)..(1074): Selenocysteine
  MOD_RES (1095)..(1095): Selenocysteine
  MOD_RES (1182)..(1182): Selenocysteine
  MOD_RES (1185)..(1185): Selenocysteine
  MOD_RES (1188)..(1188): Selenocysteine
  MOD_RES (1194)..(1194): Selenocysteine
  MOD_RES (1291)..(1291): Selenocysteine
  MOD_RES (1335)..(1335): Selenocysteine
  MOD_RES (1369)..(1369): Selenocysteine
  MOD_RES (1371)..(1371): Selenocysteine
  MOD_RES (1394)..(1394): Selenocysteine
  MOD_RES (1469)..(1469): Selenocysteine
  MOD_RES (1521)..(1521): Selenocysteine
  MOD_RES (1547)..(1548): Selenocysteine
  MOD_RES (1559)..(1559): Selenocysteine
  MOD_RES (1586)..(1586): Selenocysteine
  MOD_RES (1607)..(1607): Selenocysteine
  MOD_RES (1631)..(1631): Selenocysteine
  MOD_RES (1642)..(1642): Selenocysteine
  MOD_RES (1655)..(1656): Selenocysteine
  MOD_RES (1671)..(1671): Selenocysteine
  MOD_RES (1679)..(1679): Selenocysteine
MLINKLWLLLVXLCLXEELAAAGEKSYGKPCGGQDCSGSCQCFPEKGARGRPGPIGIQGPXGPQGFXGSXGLSGLKGERGFPGLLGPYGPKGDKGPMGVPGFLGINGIPGHPGQPGPRGPPGLDGCNGXQGAVGFPGPDGYPGLLGPPGLPGQKGSKGDPVLAPGSFKGMKGDPGLPGLDGIXGPQGAPGFPGAVGPAGPPGLQGPPGPPGPLGPDGNMGLGFQGEKGVKGDVGLPGPAGPPPSXGELEFMGFPKGKKGSKGEPGPKGFPGISGPPGFPGLGXXGEKGEKGEKGIPGLPGPRGPMGSEGVQGPPGQQGKKGXLGFPGLNGFQGIEGQKGDIGLPGPDVFIDIDGAVISGNPGDPGVPGLPGLKGDEGIQGLRGPSGVPGLPALSGVPGALGPQGFPGLKGDQGNPGRXXIGAAGLPGRDGLPGPPGPPGPPSPEFEXEXLHNKESGFPGLRGEQGPKGNLGLKGIKGDSGFCACDGGVPNXGPPGEPGPPGPWGLIGLPGLKGARGDRGSGGAQGPAGAPGLVGPLGPSGPKGKKGEPILSXIQGMPGDRGDSGSQGFRGVIGEPGKDGVPGLPGLPGLPGDGGQGFPGEKGLPGLPGEKGHPGPPGLPGNGLPGLPGPRGLPGDKGKDGLPGQQGLPGSKGIXLPCIIPGSYGPSGFPGXPGFPGPKGSRGLPGXPGQPGSSGSKGEPGSPGLVHLPELPGFPGPRGEKGLPGFPGLPGKDGLPGMIGSPGLPGSKGAXGDIFGAENGAPGEQGLQGLXGHKGFLGDSGLPGLKGVHGKPGLLGPKGERGSPGXPGQVGQPGXPGSSGPYGIKGKSGLPGAPGFPGISGHPGKKGXRGKKGPPGSIVKKGLPGLKGLPGNPGLVGLKGSPGSPGVAGLPALSGPKGEKGSVGFVGFPGIPGLPGIPGXRGLKGIPGSXGKMGPSGRAGXPGEKGDRGNPGPVGIPSPRRPMSNLWLKGDKGSQGSAGSNGFPGPRGDKGEAGRPGPPGLPGAPGLPGIIKGVSGKPGPPGFMGIRGLPGLKGSSGIXGFPGMPGESGSQGIRGSPGLPGASGLPGLKGDNGQXVEISGSPGPKGQPGESGFKGXKGRDGLIGNIGFPGNKGEDGKVGVSGDVGLPGAPGFPGVAGMRGEPGLPGSSGHQGAIGPLGSPGLIGPKGFPGFPGLHGLNGLPGXKGXHGXPGPSIXGVPGPAGLPGPKGEKGYPGIGIGAPGKPGLRGQKGDRGFPGLQGPAGLPGAPGISLPSLIAGQPGDPGRPGLDGERGRPGPAGPPGPPGPSSNQGDXGDPGFPGIPGPKGPKGDQGIPGFSGLPGELGLKGMRGEPGFMGXPGKVGPPGDPGFPGMKGKAGPRGSSGLQGDPGQXPXAEAVQVPPGPLGLPGIDGIPGLXGDPGAQGPVGLQGSKGLPGIPGKDGPSGLPGPPGALGDPGLPGLQGPPGFEGAPGQQGPFGMPGMPGQSMRVGYXLVKHSQSEQVPPCPIGMSQLWVGYSLLFVEGQEKAHNQDLGFAGSCLPRFSXMPFIYCNINEVCHYARRNDKSYWLSXXAPIPMMPVSQXQIPQYISRCSVCEAPSQAIAVHSQDIXIPQCPLGWRSLWIGYSFLMHXAAGAEGGGQSLVSPGSCLEDFRAXPFIECSGARGXCHYFANKYSFWLXXVEERQQFGELPVSEXLKAGQLHXRVSRCQVCMKSL

SEQ ID NO: 6677 - protein, 742 aa, Homo sapiens
  MOD_RES (25)..(25): Selenocysteine
  MOD_RES (28)..(28): Selenocysteine
  MOD_RES (51)..(51): Selenocysteine
  MOD_RES (53)..(53): Selenocysteine
  MOD_RES (69)..(69): Selenocysteine
  MOD_RES (74)..(74): Selenocysteine
  MOD_RES (78)..(78): Selenocysteine
  MOD_RES (84)..(84): Selenocysteine
  MOD_RES (97)..(97): Selenocysteine
  MOD_RES (104)..(104): Selenocysteine
  MOD_RES (110)..(110): Selenocysteine
  MOD_RES (126)..(126): Selenocysteine
  MOD_RES (129)..(129): Selenocysteine
  MOD_RES (135)..(135): Selenocysteine
  MOD_RES (156)..(156): Selenocysteine
  MOD_RES (165)..(166): Selenocysteine
  MOD_RES (170)..(170): Selenocysteine
  MOD_RES (179)..(179): Selenocysteine
  MOD_RES (185)..(185): Selenocysteine
  MOD_RES (212)..(212): Selenocysteine
  MOD_RES (221)..(221): Selenocysteine
  MOD_RES (230)..(230): Selenocysteine
  MOD_RES (255)..(255): Selenocysteine
  MOD_RES (267)..(267): Selenocysteine
  MOD_RES (282)..(282): Selenocysteine
  MOD_RES (294)..(294): Selenocysteine
  MOD_RES (301)..(302): Selenocysteine
  MOD_RES (325)..(325): Selenocysteine
  MOD_RES (341)..(341): Selenocysteine
  MOD_RES (353)..(353): Selenocysteine
  MOD_RES (359)..(359): Selenocysteine
  MOD_RES (361)..(361): Selenocysteine
  MOD_RES (369)..(370): Selenocysteine
  MOD_RES (372)..(372): Selenocysteine
  MOD_RES (374)..(374): Selenocysteine
  MOD_RES (376)..(376): Selenocysteine
  MOD_RES (379)..(379): Selenocysteine
  MOD_RES (383)..(383): Selenocysteine
  MOD_RES (388)..(388): Selenocysteine
  MOD_RES (412)..(412): Selenocysteine
  MOD_RES (439)..(439): Selenocysteine
  MOD_RES (463)..(463): Selenocysteine
  MOD_RES (552)..(552): Selenocysteine
  MOD_RES (599)..(599): Selenocysteine
  MOD_RES (615)..(615): Selenocysteine
  MOD_RES (647)..(647): Selenocysteine
  MOD_RES (669)..(669): Selenocysteine
  MOD_RES (683)..(683): Selenocysteine
  MOD_RES (736)..(736): Selenocysteine
MKDDFAEEEEVQSFGYKRFGIQEGXQCXKCKNNWALKFSIILLYILCALLXIXVAILGYKVVEKMDNVXGGMEXSRQXYDDKLXAVESDLKKLGDQXGKKAISXNSELSXFRSDILDLRQQLREIXEKXSKNKDXLEKLQASGDALVDRQSQLKEXLENNSFLIXXVNKXLQAYNGYVXNLQQDXSVLQGNLQNQMYSHNVVIMNLNNLNLXQVQQRNLIXNLQRSVDDXSQAIQRIKNDFQNLQQVFLQAKKDXDWLKEKVQSLQXLAANNSALAKANNDXLEDMNSQLNSFXGQMENIXXISQANEQNLKDLQDLHKDAENRXAIKFNQLEERFQLFEXDIVNIISNISYXAHHLRXLXSNLNEVRXXCXDXLXKHXDDLXSLNNXLANIRLDSVSLRMQQDLMRSRLDXEVANLSVIMEEMKLVDSKHGQLIKNFXILQGPPGPRGPRGDRGSQGPPGPXGNKGQKGEKGEPGPPGPAGERGPIGPAGPPGERGGKGSKGSQGPKGSRGSPGKPGPQGSSGDPGPPGPPGKEGLPGPQGPPGFQGLQGXVGEPGVPGPRGLPGLPGVPGMPGPKGPPGPPGPSGAVVPLALQNEPXPAPEDNGCPPHWKNFXDKCYYFSVEKEIFEDAKLFCEDKSSHLVFINXREEQQWIKKQMVGRESHWIGLXDSERENEWKWLDGXSPDYKNWKAGQPDNWGHGHGPGEDCAGLIYAGQWNDFQCEDVNNFICEKDREXVLSSAL

SEQ ID NO: 6678 - protein, 190 aa, Homo sapiens
  MOD_RES (23)..(23): Selenocysteine
  MOD_RES (31)..(31): Selenocysteine
  MOD_RES (77)..(77): Selenocysteine
  MOD_RES (80)..(80): Selenocysteine
  MOD_RES (87)..(87): Selenocysteine
  MOD_RES (103)..(103): Selenocysteine
  MOD_RES (140)..(140): Selenocysteine
  MOD_RES (174)..(174): Selenocysteine
  MOD_RES (184)..(184): Selenocysteine
MAAGELEGGKPLSGLLNALAQDXFHGYPGIXEELLRSQLYPEVPPEEFRPFLAKMRGILKSIASADMDFNQLEAFLXAQXKKQGGIXSDQAAVISKFWKSHKXKIRESLMNQSRWNSGLRGLSWRVDGKSQSRHSAQIHXPVAIIELELGKYGQESEFLCLEFDEVKVNQILKXLSEVEESISXLISQPN

SEQ ID NO: 6679 - protein, 98 aa, Homo sapiens
  MOD_RES (23)..(23): Selenocysteine
  MOD_RES (31)..(31): Selenocysteine
  MOD_RES (61)..(61): Selenocysteine
  MOD_RES (78)..(78): Selenocysteine
MAAGELEGGKPLSGLLNALAQDXFHGYPGIXEELLRSQLYPEVPPEEFRPFLAKMRGILKXGSCCVAQDRVQWVFIGXIMAHRGLELLGSSDSPASAS

SEQ ID NO: 6680 - protein, 32 aa, Homo sapiens
  MOD_RES (1)..(1): Any amino acid
  MOD_RES (16)..(16): Selenocysteine
  MOD_RES (26)..(26): Selenocysteine
XCLEFDEVKVNQILKXLSEVEESISXLISQPN

SEQ ID NO: 6681 - protein, 50 aa, Homo sapiens
  MOD_RES (1)..(1): Any amino acid
  MOD_RES (5)..(5): Selenocysteine
XPGIXEELLRSQLYPEVPPEEFRPFLAKMRGILKRQNLPISSRVVSNSWA

SEQ ID NO: 6682 - protein, 38 aa, Homo sapiens
  MOD_RES (1)..(1): Any amino acid
  MOD_RES (22)..(22): Selenocysteine
  MOD_RES (32)..(32): Selenocysteine
XQESEFLCLEFDEVKVNQILKXLSEVEESISXLISQPN

SEQ ID NO: 6683 - protein, 39 aa, Homo sapiens
  MOD_RES (27)..(27): Selenocysteine
MEASSEPPLDAKSDVSSNLEGEFSVEXGYGCELRHLQIS

SEQ ID NO: 6684 - protein, 85 aa, Homo sapiens
  MOD_RES (16)..(16): Selenocysteine
  MOD_RES (34)..(34): Selenocysteine
  MOD_RES (58)..(58): Selenocysteine
  MOD_RES (64)..(64): Selenocysteine
  MOD_RES (84)..(84): Selenocysteine
MEASSEPPLDAKSDVXNQLVDFQWKLGMAVSSDXCRSLKYPYVAVMLKVADHSGQVKXKCFEMXIPQFQNFYRQFKEIAAVIEXV

SEQ ID NO: 6685 - protein, 98 aa, Homo sapiens
  MOD_RES (16)..(16): Selenocysteine
  MOD_RES (34)..(34): Selenocysteine
  MOD_RES (58)..(58): Selenocysteine
  MOD_RES (64)..(64): Selenocysteine
  MOD_RES (75)..(75): Selenocysteine
  MOD_RES (97)..(97): Selenocysteine
MEASSEPPLDAKSDVXNQLVDFQWKLGMAVSSDXCRSLKYPYVAVMLKVADHSGQVKXKCFEMXIPQFQPQLLAXSSLLSASNFYRQFKEIAAVIEXV

SEQ ID NO: 6686 - protein, 100 aa, Homo sapiens
  MOD_RES (33)..(33): Selenocysteine
  MOD_RES (49)..(49): Selenocysteine
  MOD_RES (73)..(73): Selenocysteine
  MOD_RES (79)..(79): Selenocysteine
  MOD_RES (99)..(99): Selenocysteine
MKAPLPHPALARRMQIKDCWALIRRQLFEARNXLVDFQWKLGMAVSSDXCRSLKYPYVAVMLKVADHSGQVKXKCFEMXIPQFQNFYRQFKEIAAVIEXV

SEQ ID NO: 6687 - protein, 57 aa, Homo sapiens
  MOD_RES (7)..(7): Selenocysteine
MGRLHCXEDPVPEAVGGDMQQLNQLGAQAAGANQGSLGGILLLCWLGCLFIPPRLLK

SEQ ID NO: 6688 - protein, 199 aa, Homo sapiens
  MOD_RES (7)..(7): Selenocysteine
  MOD_RES (33)..(33): Selenocysteine
  MOD_RES (41)..(41): Selenocysteine
  MOD_RES (58)..(59): Selenocysteine
  MOD_RES (87)..(87): Selenocysteine
  MOD_RES (97)..(97): Selenocysteine
  MOD_RES (106)..(106): Selenocysteine
  MOD_RES (118)..(118): Selenocysteine
  MOD_RES (127)..(127): Selenocysteine
  MOD_RES (143)..(143): Selenocysteine
  MOD_RES (169)..(169): Selenocysteine
  MOD_RES (177)..(177): Selenocysteine
  MOD_RES (193)..(193): Selenocysteine
MGRLHCXEDPVPEAVGGDMQQLNQLGAQFSALXEVLFHFLXEPKEVERFLAQLSEFAXXNQISLGSLRSIVKSLLLVPNGALKKSLXAKQVQADFIXLGLSEEKAXYFSEKWKQNAPXLARWAIGQXLMINQLIDMEWKFGVXSGSSELEKVGSIFLQLKLVVKKGNQXENVYIELXLPQFYSFLHEMERVRXSMECFC

SEQ ID NO: 6689 - protein, 157 aa, Homo sapiens
  MOD_RES (7)..(7): Selenocysteine
  MOD_RES (34)..(34): Selenocysteine
  MOD_RES (42)..(42): Selenocysteine
  MOD_RES (51)..(51): Selenocysteine
  MOD_RES (69)..(70): Selenocysteine
  MOD_RES (98)..(98): Selenocysteine
  MOD_RES (108)..(108): Selenocysteine
  MOD_RES (117)..(117): Selenocysteine
  MOD_RES (129)..(129): Selenocysteine
  MOD_RES (138)..(138): Selenocysteine
  MOD_RES (154)..(154): Selenocysteine
MGRLHCXEDPVPEAVGGDMQQLNQLGAQQFSALXEVLFHFLXEPKEARVFXVLSLQVERFLAQLSEFAXXNQISLGSLRSIVKSLLLVPNGALKKSLXAKQVQADFIXLGLSEEKAXYFSEKWKQNAPXLARWAIGQXLMINQLIDMEWKFGVXSGS

SEQ ID NO: 6690 - protein, 200 aa, Homo sapiens
  MOD_RES (7)..(7): Selenocysteine
  MOD_RES (34)..(34): Selenocysteine
  MOD_RES (42)..(42): Selenocysteine
  MOD_RES (59)..(60): Selenocysteine
  MOD_RES (88)..(88): Selenocysteine
  MOD_RES (98)..(98): Selenocysteine
  MOD_RES (107)..(107): Selenocysteine
  MOD_RES (119)..(119): Selenocysteine
  MOD_RES (128)..(128): Selenocysteine
  MOD_RES (144)..(144): Selenocysteine
  MOD_RES (170)..(170): Selenocysteine
  MOD_RES (178)..(178): Selenocysteine
  MOD_RES (194)..(194): Selenocysteine
MGRLHCXEDPVPEAVGGDMQQLNQLGAQQFSALXEVLFHFLXEPKEVERFLAQLSEFAXXNQISLGSLRSIVKSLLLVPNGALKKSLXAKQVQADFIXLGLSEEKAXYFSEKWKQNAPXLARWAIGQXLMINQLIDMEWKFGVXSGSSELEKVGSIFLQLKLVVKKGNQXENVYIELXLPQFYSFLHEMERVRXSMECFC

SEQ ID NO: 6691 - protein, 55 aa, Homo sapiens
  MOD_RES (2)..(2): Selenocysteine
  MOD_RES (26)..(26): Selenocysteine
  MOD_RES (37)..(37): Selenocysteine
KXNHSNIMDDPFIREHIEELLRNIRXQVLIKLIKPYXRIHIPFISKMESRSCCLG

SEQ ID NO: 6692 - protein, 263 aa, Homo sapiens
  MOD_RES (83)..(83): Selenocysteine
  MOD_RES (97)..(97): Selenocysteine
  MOD_RES (104)..(104): Selenocysteine
  MOD_RES (121)..(121): Selenocysteine
  MOD_RES (134)..(135): Selenocysteine
  MOD_RES (151)..(151): Selenocysteine
  MOD_RES (153)..(153): Selenocysteine
  MOD_RES (181)..(181): Selenocysteine
  MOD_RES (192)..(192): Selenocysteine
  MOD_RES (206)..(206): Selenocysteine
  MOD_RES (256)..(256): Selenocysteine
MSDMEDDFMCDDEEDYDLEYSEDSNSEPNVDLENQYYNSKALKEDDPKAALSSFQKVLELEGEKGEWGFKALKQMIKINFKLXNFPEMMNRYKQLLXYIRSAVXRNYSEKSINSILDYISXSKQMDLLQEFYEXXLEALKDAKNDRLWFKXNXKLGKLYLEREEYGKLQKILRQLHQSCQXDDGEDDLKKGXQLLEIYALEIQMYXAQKNNKKLKALYEQSLHIKSAIPHPLIMGVIRECGGKMHLREGEFEKAHXDFFEAFK

SEQ ID NO: 6693 - protein, 443 aa, Homo sapiens
  MOD_RES (83)..(83): Selenocysteine
  MOD_RES (97)..(97): Selenocysteine
  MOD_RES (104)..(104): Selenocysteine
  MOD_RES (121)..(121): Selenocysteine
  MOD_RES (134)..(135): Selenocysteine
  MOD_RES (151)..(151): Selenocysteine
  MOD_RES (153)..(153): Selenocysteine
  MOD_RES (181)..(181): Selenocysteine
  MOD_RES (192)..(192): Selenocysteine
  MOD_RES (206)..(206): Selenocysteine
  MOD_RES (256)..(256): Selenocysteine
  MOD_RES (274)..(275): Selenocysteine
  MOD_RES (312)..(312): Selenocysteine
  MOD_RES (324)..(324): Selenocysteine
  MOD_RES (332)..(332): Selenocysteine
  MOD_RES (356)..(356): Selenocysteine
  MOD_RES (367)..(367): Selenocysteine
  MOD_RES (397)..(397): Selenocysteine
  MOD_RES (422)..(422): Selenocysteine
  MOD_RES (428)..(428): Selenocysteine
MSDMEDDFMCDDEEDYDLEYSEDSNSEPNVDLENQYYNSKALKEDDPKAALSSFQKVLELEGEKGEWGFKALKQMIKINFKLXNFPEMMNRYKQLLXYIRSAVXRNYSEKSINSILDYISXSKQMDLLQEFYEXXLEALKDAKNDRLWFKXNXKLGKLYLEREEYGKLQKILRQLHQSCQXDDGEDDLKKGXQLLEIYALEIQMYXAQKNNKKLKALYEQSLHIKSAIPHPLIMGVIRECGGKMHLREGEFEKAHXDFFEAFKNYDESGSPRRXXCLKYLVLANMLMKSGINPFDSQEAKPYKNDPEILAMXNLVSAYQNNDIXEFEKILKXNHSNIMDDPFIREHIEELLRNIRXQVLIKLIKPYXRIHIPFISKELNIDVADVESLLVQCILDNXIHGRIDQVNQLLELDHQKRGGARYXALDKWXNQLNSLNQAVVSKLA

SEQ ID NO: 6694 - protein, 450 aa, Homo sapiens
  MOD_RES (83)..(83): Selenocysteine
  MOD_RES (97)..(97): Selenocysteine
  MOD_RES (104)..(104): Selenocysteine
  MOD_RES (121)..(121): Selenocysteine
  MOD_RES (141)..(142): Selenocysteine
  MOD_RES (158)..(158): Selenocysteine
  MOD_RES (160)..(160): Selenocysteine
  MOD_RES (188)..(188): Selenocysteine
  MOD_RES (199)..(199): Selenocysteine
  MOD_RES (213)..(213): Selenocysteine
  MOD_RES (263)..(263): Selenocysteine
  MOD_RES (281)..(282): Selenocysteine
  MOD_RES (319)..(319): Selenocysteine
  MOD_RES (331)..(331): Selenocysteine
  MOD_RES (339)..(339): Selenocysteine
  MOD_RES (363)..(363): Selenocysteine
  MOD_RES (374)..(374): Selenocysteine
  MOD_RES (404)..(404): Selenocysteine
  MOD_RES (429)..(429): Selenocysteine
  MOD_RES (435)..(435): Selenocysteine
MSDMEDDFMCDDEEDYDLEYSEDSNSEPNVDLENQYYNSKALKEDDPKAALSSFQKVLELEGEKGEWGFKALKQMIKINFKLXNFPEMMNRYKQLLXYIRSAVXRNYSEKSINSILDYISXSKQNSDFLCQMDLLQEFYEXXLEALKDAKNDRLWFKXNXKLGKLYLEREEYGKLQKILRQLHQSCQXDDGEDDLKKGXQLLEIYALEIQMYXAQKNNKKLKALYEQSLHIKSAIPHPLIMGVIRECGGKMHLREGEFEKAHXDFFEAFKNYDESGSPRRXXCLKYLVLANMLMKSGINPFDSQEAKPYKNDPEILAMXNLVSAYQNNDIXEFEKILKXNHSNIMDDPFIREHIEELLRNIRXQVLIKLIKPYXRIHIPFISKELNIDVADVESLLVQCILDNXIHGRIDQVNQLLELDHQKRGGARYXALDKWXNQLNSLNQAVVSKLA

SEQ ID NO: 6695 - protein, 183 aa, Homo sapiens
  MOD_RES (19)..(19): Selenocysteine
  MOD_RES (33)..(33): Selenocysteine
  MOD_RES (40)..(40): Selenocysteine
  MOD_RES (57)..(57): Selenocysteine
  MOD_RES (70)..(71): Selenocysteine
  MOD_RES (87)..(87): Selenocysteine
  MOD_RES (89)..(89): Selenocysteine
  MOD_RES (117)..(117): Selenocysteine
  MOD_RES (128)..(128): Selenocysteine
  MOD_RES (142)..(142): Selenocysteine
MSDMEDDFMCDDEEDYDLXNFPEMMNRYKQLLXYIRSAVXRNYSEKSINSILDYISXSKQMDLLQEFYEXXLEALKDAKNDRLWFKXNXKLGKLYLEREEYGKLQKILRQLHQSCQXDDGEDDLKKGXQLLEIYALEIQMYXAQKNNKKLKALYEQSLHIKSAIPHPLIMGVIRECGGKMHLR

SEQ ID NO: 6696 - protein, 379 aa, Homo sapiens
  MOD_RES (19)..(19): Selenocysteine
  MOD_RES (33)..(33): Selenocysteine
  MOD_RES (40)..(40): Selenocysteine
  MOD_RES (57)..(57): Selenocysteine
  MOD_RES (70)..(71): Selenocysteine
  MOD_RES (87)..(87): Selenocysteine
  MOD_RES (89)..(89): Selenocysteine
  MOD_RES (117)..(117): Selenocysteine
  MOD_RES (128)..(128): Selenocysteine
  MOD_RES (142)..(142): Selenocysteine
  MOD_RES (192)..(192): Selenocysteine
  MOD_RES (210)..(211): Selenocysteine
  MOD_RES (248)..(248): Selenocysteine
  MOD_RES (260)..(260): Selenocysteine
  MOD_RES (268)..(268): Selenocysteine
  MOD_RES (292)..(292): Selenocysteine
  MOD_RES (303)..(303): Selenocysteine
  MOD_RES (333)..(333): Selenocysteine
  MOD_RES (358)..(358): Selenocysteine
  MOD_RES (364)..(364): Selenocysteine
MSDMEDDFMCDDEEDYDLXNFPEMMNRYKQLLXYIRSAVXRNYSEKSINSILDYISXSKQMDLLQEFYEXXLEALKDAKNDRLWFKXNXKLGKLYLEREEYGKLQKILRQLHQSCQXDDGEDDLKKGXQLLEIYALEIQMYXAQKNNKKLKALYEQSLHIKSAIPHPLIMGVIRECGGKMHLREGEFEKAHXDFFEAFKNYDESGSPRRXXCLKYLVLANMLMKSGINPFDSQEAKPYKNDPEILAMXNLVSAYQNNDIXEFEKILKXNHSNIMDDPFIREHIEELLRNIRXQVLIKLIKPYXRIHIPFISKELNIDVADVESLLVQCILDNXIHGRIDQVNQLLELDHQKRGGARYXALDKWXNQLNSLNQAVVSKLA

SEQ ID NO: 6697 - protein, 51 aa, Homo sapiens
EIFASINQKDGMVSFHDNPEKYNNPAMLHNIDQESMGSQEDDSGNKPSSYS

SEQ ID NO: 6698 - protein, 20 aa, Homo sapiens
MASALEQFVNSVRQLSAQGL

SEQ ID NO: 6699 - protein, 116 aa, Homo sapiens
  MOD_RES (22)..(22): Selenocysteine
  MOD_RES (44)..(44): Selenocysteine
  MOD_RES (76)..(76): Selenocysteine
  MOD_RES (87)..(87): Selenocysteine
  MOD_RES (97)..(97): Selenocysteine
  MOD_RES (99)..(99): Selenocysteine
  MOD_RES (108)..(108): Selenocysteine
MASALEQFVNSVRQLSAQGQMXQLCELINKSGELLAKNLSHLDXVLGALDVQEHSLGVLAVLFVKFSMPSVPDFEXLFSQVQLFISXCNGEHIRYAXDXFAGLCHQLXNALVERKQ

SEQ ID NO: 6700 - protein, 423 aa, Homo sapiens
  MOD_RES (22)..(22): Selenocysteine
  MOD_RES (44)..(44): Selenocysteine
  MOD_RES (76)..(76): Selenocysteine
  MOD_RES (87)..(87): Selenocysteine
  MOD_RES (97)..(97): Selenocysteine
  MOD_RES (99)..(99): Selenocysteine
  MOD_RES (108)..(108): Selenocysteine
  MOD_RES (135)..(135): Selenocysteine
  MOD_RES (139)..(139): Selenocysteine
  MOD_RES (193)..(193): Selenocysteine
  MOD_RES (210)..(211): Selenocysteine
  MOD_RES (245)..(245): Selenocysteine
  MOD_RES (269)..(269): Selenocysteine
  MOD_RES (285)..(285): Selenocysteine
  MOD_RES (287)..(287): Selenocysteine
  MOD_RES (311)..(311): Selenocysteine
  MOD_RES (313)..(313): Selenocysteine
  MOD_RES (316)..(316): Selenocysteine
  MOD_RES (398)..(398): Selenocysteine
MASALEQFVNSVRQLSAQGQMXQLCELINKSGELLAKNLSHLDXVLGALDVQEHSLGVLAVLFVKFSMPSVPDFEXLFSQVQLFISXCNGEHIRYAXDXFAGLCHQLXNALVERKQPLRGIGILKQAIDKMQMNXNQLXSIHADLCQLCLLAKCFKPALPYLDVDMMDICKENGAYDAKHFLCYYYYGGMIYXGLKNFERALYFYEQAIXXPAMAVSHIMLESYKKYILVSLILLGKVQQLPKYXSQIVGRFIKPLSNAYHELAQVYSXNNPSELRNLVNKHSEXFXRDNNMGLVKQCLSSLYKKNIQRLXKXFLXLSLQDMASRVQLSGPQEAEKYVLHMIEDGEIFASINQKDGMVSFHDNPEKYNNPAMLHNIDQEMLKCIELDERLKAMDQEIXVNPQFVQKSMGSQEDDSGNKPSSYS

SEQ ID NO: 6701 - protein, 319 aa, Homo sapiens
  MOD_RES (22)..(22): Selenocysteine
  MOD_RES (44)..(44): Selenocysteine
  MOD_RES (76)..(76): Selenocysteine
  MOD_RES (87)..(87): Selenocysteine
  MOD_RES (97)..(97): Selenocysteine
  MOD_RES (99)..(99): Selenocysteine
  MOD_RES (108)..(108): Selenocysteine
  MOD_RES (135)..(135): Selenocysteine
  MOD_RES (139)..(139): Selenocysteine
  MOD_RES (193)..(193): Selenocysteine
  MOD_RES (210)..(211): Selenocysteine
  MOD_RES (245)..(245): Selenocysteine
  MOD_RES (300)..(300): Selenocysteine
  MOD_RES (316)..(316): Selenocysteine
  MOD_RES (318)..(318): Selenocysteine
MASALEQFVNSVRQLSAQGQMXQLCELINKSGELLAKNLSHLDXVLGALDVQEHSLGVLAVLFVKFSMPSVPDFEXLFSQVQLFISXCNGEHIRYAXDXFAGLCHQLXNALVERKQPLRGIGILKQAIDKMQMNXNQLXSIHADLCQLCLLAKCFKPALPYLDVDMMDICKENGAYDAKHFLCYYYYGGMIYXGLKNFERALYFYEQAIXXPAMAVSHIMLESYKKYILVSLILLGKVQQLPKYXSQIVGRFIKRQSLAMLARLVLNSWPQAVLLRLPPRVLGLQPLSNAYHELAQVYSXNNPSELRNLVNKHSEXFXR

SEQ ID NO: 6702 - protein, 107 aa, Homo sapiens
  MOD_RES (22)..(22): Selenocysteine
  MOD_RES (44)..(44): Selenocysteine
  MOD_RES (76)..(76): Selenocysteine
  MOD_RES (87)..(87): Selenocysteine
  MOD_RES (97)..(97): Selenocysteine
  MOD_RES (99)..(99): Selenocysteine
MASALEQFVNSVRQLSAQGQMXQLCELINKSGELLAKNLSHLDXVLGALDVQEHSLGVLAVLFVKFSMPSVPDFEXLFSQVQLFISXCNGEHIRYAXDXSPARNWHP

SEQ ID NO: 6703 - protein, 31 aa, Homo sapiens
  MOD_RES (29)..(29): Selenocysteine
MASALEQFVNSVRQLSAQVLFLFSRANDXAL

SEQ ID NO: 6704 - protein, 403 aa, Homo sapiens
  MOD_RES (2)..(2): Selenocysteine
  MOD_RES (24)..(24): Selenocysteine
  MOD_RES (56)..(56): Selenocysteine
  MOD_RES (67)..(67): Selenocysteine
  MOD_RES (77)..(77): Selenocysteine
  MOD_RES (79)..(79): Selenocysteine
  MOD_RES (88)..(88): Selenocysteine
  MOD_RES (115)..(115): Selenocysteine
  MOD_RES (119)..(119): Selenocysteine
  MOD_RES (173)..(173): Selenocysteine
  MOD_RES (190)..(191): Selenocysteine
  MOD_RES (225)..(225): Selenocysteine
  MOD_RES (249)..(249): Selenocysteine
  MOD_RES (265)..(265): Selenocysteine
  MOD_RES (267)..(267): Selenocysteine
  MOD_RES (291)..(291): Selenocysteine
  MOD_RES (293)..(293): Selenocysteine
  MOD_RES (296)..(296): Selenocysteine
  MOD_RES (378)..(378): Selenocysteine
MXQLCELINKSGELLAKNLSHLDXVLGALDVQEHSLGVLAVLFVKFSMPSVPDFEXLFSQVQLFISXCNGEHIRYAXDXFAGLCHQLXNALVERKQPLRGIGILKQAIDKMQMNXNQLXSIHADLCQLCLLAKCFKPALPYLDVDMMDICKENGAYDAKHFLCYYYYGGMIYXGLKNFERALYFYEQAIXXPAMAVSHIMLESYKKYILVSLILLGKVQQLPKYXSQIVGRFIKPLSNAYHELAQVYSXNNPSELRNLVNKHSEXFXRDNNMGLVKQCLSSLYKKNIQRLXKXFLXLSLQDMASRVQLSGPQEAEKYVLHMIEDGEIFASINQKDGMVSFHDNPEKYNNPAMLHNIDQEMLKCIELDERLKAMDQEIXVNPQFVQKSMGSQEDDSGNKPSSYS

SEQ ID NO: 6705 - protein, 345 aa, Homo sapiens
  MOD_RES (2)..(2): Selenocysteine
  MOD_RES (24)..(24): Selenocysteine
  MOD_RES (56)..(56): Selenocysteine
  MOD_RES (67)..(67): Selenocysteine
  MOD_RES (77)..(77): Selenocysteine
  MOD_RES (79)..(79): Selenocysteine
  MOD_RES (88)..(88): Selenocysteine
  MOD_RES (115)..(115): Selenocysteine
  MOD_RES (119)..(119): Selenocysteine
  MOD_RES (173)..(173): Selenocysteine
  MOD_RES (190)..(191): Selenocysteine
  MOD_RES (225)..(225): Selenocysteine
  MOD_RES (235)..(235): Selenocysteine
  MOD_RES (238)..(238): Selenocysteine
  MOD_RES (320)..(320): Selenocysteine
MXQLCELINKSGELLAKNLSHLDXVLGALDVQEHSLGVLAVLFVKFSMPSVPDFEXLFSQVQLFISXCNGEHIRYAXDXFAGLCHQLXNALVERKQPLRGIGILKQAIDKMQMNXNQLXSIHADLCQLCLLAKCFKPALPYLDVDMMDICKENGAYDAKHFLCYYYYGGMIYXGLKNFERALYFYEQAIXXPAMAVSHIMLESYKKYILVSLILLGKVQQLPKYXSQIVGRFIKXFLXLSLQDMASRVQLSGPQEAEKYVLHMIEDGEIFASINQKDGMVSFHDNPEKYNNPAMLHNIDQEMLKCIELDERLKAMDQEIXVNPQFVQKSMGSQEDDSGNKPSSYS

SEQ ID NO: 6706 - protein, 17 aa, Homo sapiens
  MOD_RES (1)..(1): Any amino acid
  MOD_RES (9)..(9): Selenocysteine
XAGLCHQLXNALVERKQ

SEQ ID NO: 6707 - protein, 122 aa, Homo sapiens
  MOD_RES (1)..(1): Any amino acid
  MOD_RES (4)..(4): Selenocysteine
  MOD_RES (15)..(15): Selenocysteine
  MOD_RES (25)..(25): Selenocysteine
  MOD_RES (27)..(27): Selenocysteine
  MOD_RES (36)..(36): Selenocysteine
  MOD_RES (63)..(63): Selenocysteine
  MOD_RES (67)..(67): Selenocysteine
  MOD_RES (78)..(79): Selenocysteine
  MOD_RES (113)..(113): Selenocysteine
XFEXLFSQVQLFISXCNGEHIRYAXDXFAGLCHQLXNALVERKQPLRGIGILKQAIDKMQMNXNQLXSIHADLCQAIXXPAMAVSHIMLESYKKYILVSLILLGKVQQLPKYXSQIVGRFIK

SEQ ID NO: 6708 - protein, 275 aa, Homo sapiens
  MOD_RES (35)..(35): Selenocysteine
  MOD_RES (67)..(67): Selenocysteine
  MOD_RES (103)..(103): Selenocysteine
  MOD_RES (121)..(121): Selenocysteine
  MOD_RES (136)..(136): Selenocysteine
  MOD_RES (180)..(181): Selenocysteine
  MOD_RES (208)..(208): Selenocysteine
  MOD_RES (232)..(232): Selenocysteine
  MOD_RES (251)..(251): Selenocysteine
  MOD_RES (257)..(257): Selenocysteine
MAAAVRQDLAQLMNSSGSHKDLAGKQYNVDYKLEXYLKIARLYLEDDDPVQAEAYINRASLLQNESXNEQLQIHYKVCYARVLDYRRKFIEAAQRYNELSYKXIVHESERLEALKHALHCXILASAGQQRSRMLAXLFKDERCQQLAAYGILEKMYLDRIIRGNQLQEFAAMLMPHQKAXXADGSSILDRAVIEHNLLSASKLYNNIXFEELGALLEIPAAKAEKIASQMIXEGRMNGFIDQIDGIVHFEXREALPXWDKQIQSLCFQVNNLLEK

SEQ ID NO: 6709 - protein, 51 aa, Homo sapiens
  MOD_RES (26)..(26): Selenocysteine
MAAAVRQDLAQLMNSSGSHKDLAGKXLFSFGIVVGIVRSWKKPFSYLEQNN

SEQ ID NO: 6710 - protein, 352 aa, Homo sapiens
  MOD_RES (67)..(67): Selenocysteine
  MOD_RES (71)..(71): Selenocysteine
  MOD_RES (80)..(80): Selenocysteine
  MOD_RES (88)..(88): Selenocysteine
  MOD_RES (134)..(134): Selenocysteine
  MOD_RES (147)..(147): Selenocysteine
  MOD_RES (179)..(179): Selenocysteine
  MOD_RES (215)..(215): Selenocysteine
  MOD_RES (233)..(233): Selenocysteine
  MOD_RES (248)..(248): Selenocysteine
  MOD_RES (292)..(293): Selenocysteine
  MOD_RES (320)..(320): Selenocysteine
MAAAVRQDLAQLMNSSGSHKDLAGKYRQILEKAIQLSGAEQLEALKAFVEAMVNENVSLVISRQLLXDFCXHLPNLPDSXAKEIYHFXLEKIQPRVISFEEQVASIRQHLASIYEKEEDWRNAAQVLVGIPLEXGQKQYNVDYKLEXYLKIARLYLEDDDPVQAEAYINRASLLQNESXNEQLQIHYKVCYARVLDYRRKFIEAAQRYNELSYKXIVHESERLEALKHALHCXILASAGQQRSRMLAXLFKDERCQQLAAYGILEKMYLDRIIRGNQLQEFAAMLMPHQKAXXADGSSILDRAVIEHNLLSASKLYNNIXFEELGALLEIPAAKHEKPCQRGISRSNHFVSK

SEQ ID NO: 6711 - protein, 406 aa, Homo sapiens
  MOD_RES (67)..(67): Selenocysteine
  MOD_RES (71)..(71): Selenocysteine
  MOD_RES (80)..(80): Selenocysteine
  MOD_RES (88)..(88): Selenocysteine
  MOD_RES (134)..(134): Selenocysteine
  MOD_RES (147)..(147): Selenocysteine
  MOD_RES (179)..(179): Selenocysteine
  MOD_RES (215)..(215): Selenocysteine
  MOD_RES (233)..(233): Selenocysteine
  MOD_RES (248)..(248): Selenocysteine
  MOD_RES (292)..(293): Selenocysteine
  MOD_RES (320)..(320): Selenocysteine
  MOD_RES (344)..(344): Selenocysteine
  MOD_RES (363)..(363): Selenocysteine
  MOD_RES (369)..(369): Selenocysteine
  MOD_RES (391)..(391): Selenocysteine
  MOD_RES (396)..(396): Selenocysteine
MAAAVRQDLAQLMNSSGSHKDLAGKYRQILEKAIQLSGAEQLEALKAFVEAMVNENVSLVISRQLLXDFCXHLPNLPDSXAKEIYHFXLEKIQPRVISFEEQVASIRQHLASIYEKEEDWRNAAQVLVGIPLEXGQKQYNVDYKLEXYLKIARLYLEDDDPVQAEAYINRASLLQNESXNEQLQIHYKVCYARVLDYRRKFIEAAQRYNELSYKXIVHESERLEALKHALHCXILASAGQQRSRMLAXLFKDERCQQLAAYGILEKMYLDRIIRGNQLQEFAAMLMPHQKAXXADGSSILDRAVIEHNLLSASKLYNNIXFEELGALLEIPAAKAEKIASQMIXEGRMNGFIDQIDGIVHFEXREALPXWDKQIQSLCFQVNNLLEKISQXAPEWXAQAMEAQMAQ

SEQ ID NO: 6712 - protein, 420 aa, Homo sapiens
  MOD_RES (67)..(67): Selenocysteine
  MOD_RES (71)..(71): Selenocysteine
  MOD_RES (80)..(80): Selenocysteine
  MOD_RES (88)..(88): Selenocysteine
  MOD_RES (134)..(134): Selenocysteine
  MOD_RES (147)..(147): Selenocysteine
  MOD_RES (179)..(179): Selenocysteine
  MOD_RES (215)..(215): Selenocysteine
  MOD_RES (233)..(233): Selenocysteine
  MOD_RES (248)..(248): Selenocysteine
  MOD_RES (292)..(293): Selenocysteine
  MOD_RES (320)..(320): Selenocysteine
  MOD_RES (344)..(344): Selenocysteine
  MOD_RES (363)..(363): Selenocysteine
  MOD_RES (391)..(391): Selenocysteine
  MOD_RES (399)..(399): Selenocysteine
  MOD_RES (413)..(413): Selenocysteine
MAAAVRQDLAQLMNSSGSHKDLAGKYRQILEKAIQLSGAEQLEALKAFVEAMVNENVSLVISRQLLXDFCXHLPNLPDSXAKEIYHFXLEKIQPRVISFEEQVASIRQHLASIYEKEEDWRNAAQVLVGIPLEXGQKQYNVDYKLEXYLKIARLYLEDDDPVQAEAYINRASLLQNESXNEQLQIHYKVCYARVLDYRRKFIEAAQRYNELSYKXIVHESERLEALKHALHCXILASAGQQRSRMLAXLFKDERCQQLAAYGILEKMYLDRIIRGNQLQEFAAMLMPHQKAXXADGSSILDRAVIEHNLLSASKLYNNIXFEELGALLEIPAAKAEKIASQMIXEGRMNGFIDQIDGIVHFEXSGNHQSIFCLWIYLVWIVHINGIIQYVXCDLLADSXQHSIFRVHPCHGSXRSPANVG

SEQ ID NO: 6713 - protein, 438 aa, Homo sapiens
  MOD_RES (67)..(67): Selenocysteine
  MOD_RES (71)..(71): Selenocysteine
  MOD_RES (80)..(80): Selenocysteine
  MOD_RES (88)..(88): Selenocysteine
  MOD_RES (134)..(134): Selenocysteine
  MOD_RES (147)..(147): Selenocysteine
  MOD_RES (179)..(179): Selenocysteine
  MOD_RES (215)..(215): Selenocysteine
  MOD_RES (233)..(233): Selenocysteine
  MOD_RES (248)..(248): Selenocysteine
  MOD_RES (292)..(293): Selenocysteine
  MOD_RES (297)..(297): Selenocysteine
  MOD_RES (352)..(352): Selenocysteine
  MOD_RES (376)..(376): Selenocysteine
  MOD_RES (395)..(395): Selenocysteine
  MOD_RES (401)..(401): Selenocysteine
  MOD_RES (423)..(423): Selenocysteine
  MOD_RES (428)..(428): Selenocysteine
MAAAVRQDLAQLMNSSGSHKDLAGKYRQILEKAIQLSGAEQLEALKAFVEAMVNENVSLVISRQLLXDFCXHLPNLPDSXAKEIYHFXLEKIQPRVISFEEQVASIRQHLASIYEKEEDWRNAAQVLVGIPLEXGQKQYNVDYKLEXYLKIARLYLEDDDPVQAEAYINRASLLQNESXNEQLQIHYKVCYARVLDYRRKFIEAAQRYNELSYKXIVHESERLEALKHALHCXILASAGQQRSRMLAXLFKDERCQQLAAYGILEKMYLDRIIRGNQLQEFAAMLMPHQKAXXADEXGSLHFAQAGLELLGSSSSSHLGFPKCWDDRGSSILDRAVIEHNLLSASKLYNNIXFEELGALLEIPAAKAEKIASQMIXEGRMNGFIDQIDGIVHFEXREALPXWDKQIQSLCFQVNNLLEKISQXAPEWXAQAMEAQMAQ

SEQ ID NO: 6714 - protein, 334 aa, Homo sapiens
  MOD_RES (12)..(12): Selenocysteine
  MOD_RES (46)..(46): Selenocysteine
  MOD_RES (89)..(89): Selenocysteine
  MOD_RES (103)..(103): Selenocysteine
  MOD_RES (105)..(105): Selenocysteine
  MOD_RES (154)..(154): Selenocysteine
  MOD_RES (173)..(173): Selenocysteine
  MOD_RES (175)..(175): Selenocysteine
  MOD_RES (188)..(188): Selenocysteine
  MOD_RES (205)..(205): Selenocysteine
  MOD_RES (249)..(249): Selenocysteine
  MOD_RES (257)..(257): Selenocysteine
  MOD_RES (262)..(263): Selenocysteine
  MOD_RES (291)..(291): Selenocysteine
  MOD_RES (304)..(304): Selenocysteine
  MOD_RES (310)..(311): Selenocysteine
MAASGSGMAQKXWELANNMQEAQSIDEIYKYDKKQQQEILAAKPWXKDHHYFKYCKISALALLKMVMHARSGGNLEVMGLMLGKVDGEXMIIMDSFALPVEGXEXRVNAQAAAYEYMAAYIENAKQVGRLENAIGWYHSHPGYGCWLSGIDVSXQMLNQQFQEPFVAVVIDPXRXISAGKVNLGAFRXYPKGYKPPDEGPSEYQXIPLNKIEDFGVHCKQYYALEVSYFKSSLDRKLLELLWNKYWVNXLSSSSLLXNADYXXGQVFDLSEKLEQSEAQLGRGSFMLGLEXHDRKSEDKLAKAXRDSCKXXIEAIHGLMSQVIKDKLFNQINIS

SEQ ID NO: 6715 - protein, 68 aa, Homo sapiens
  MOD_RES (12)..(12): Selenocysteine
  MOD_RES (46)..(46): Selenocysteine
MAASGSGMAQKXWELANNMQEAQSIDEIYKYDKKQQQEILAAKPWXKDKGRSQDFDSCLDFQHESPLL

SEQ ID NO: 6716 - protein, 78 aa, Homo sapiens
  MOD_RES (12)..(12): Selenocysteine
  MOD_RES (46)..(46): Selenocysteine
  MOD_RES (67)..(67): Selenocysteine
MAASGSGMAQKXWELANNMQEAQSIDEIYKYDKKQQQEILAAKPWXKDKGRSQDFDSCLDFQHEVYXFFSFWLKSGKA

SEQ ID NO: 6717 - protein, 57 aa, Homo sapiens
  MOD_RES (12)..(12): Selenocysteine
  MOD_RES (46)..(46): Selenocysteine
MAASGSGMAQKXWELANNMQEAQSIDEIYKYDKKQQQEILAAKPWXKENGSSLCCSG

SEQ ID NO: 6718 - protein, 151 aa, Homo sapiens
  MOD_RES (25)..(25): Selenocysteine
  MOD_RES (39)..(39): Selenocysteine
  MOD_RES (41)..(41): Selenocysteine
  MOD_RES (90)..(90): Selenocysteine
  MOD_RES (109)..(109): Selenocysteine
  MOD_RES (111)..(111): Selenocysteine
  MOD_RES (124)..(124): Selenocysteine
  MOD_RES (141)..(141): Selenocysteine
MVMHARSGGNLEVMGLMLGKVDGEXMIIMDSFALPVEGXEXRVNAQAAAYEYMAAYIENAKQVGRLENAIGWYHSHPGYGCWLSGIDVSXQMLNQQFQEPFVAVVIDPXRXISAGKVNLGAFRXYPKGYKPPDEGPSEYQXIPLNKIEDFG

SEQ ID NO: 6719 - protein, 197 aa, Homo sapiens
  MOD_RES (25)..(25): Selenocysteine
  MOD_RES (39)..(39): Selenocysteine
  MOD_RES (41)..(41): Selenocysteine
  MOD_RES (90)..(90): Selenocysteine
  MOD_RES (109)..(109): Selenocysteine
  MOD_RES (111)..(111): Selenocysteine
  MOD_RES (124)..(124): Selenocysteine
  MOD_RES (141)..(141): Selenocysteine
  MOD_RES (185)..(185): Selenocysteine
  MOD_RES (193)..(193): Selenocysteine
MVMHARSGGNLEVMGLMLGKVDGEXMIIMDSFALPVEGXEXRVNAQAAAYEYMAAYIENAKQVGRLENAIGWYHSHPGYGCWLSGIDVSXQMLNQQFQEPFVAVVIDPXRXISAGKVNLGAFRXYPKGYKPPDEGPSEYQXIPLNKIEDFGVHCKQYYALEVSYFKSSLDRKLLELLWNKYWVNXLSSSSLLXRQVY

SEQ ID NO: 6720 - protein, 123 aa, Homo sapiens
  MOD_RES (5)..(6): Selenocysteine
  MOD_RES (37)..(37): Selenocysteine
  MOD_RES (40)..(40): Selenocysteine
  MOD_RES (59)..(59): Selenocysteine
  MOD_RES (66)..(66): Selenocysteine
  MOD_RES (68)..(68): Selenocysteine
  MOD_RES (71)..(71): Selenocysteine
  MOD_RES (86)..(86): Selenocysteine
  MOD_RES (88)..(88): Selenocysteine
  MOD_RES (95)..(95): Selenocysteine
LGWYXXGGPPDPSDIHVHKQVCEIIESPLFLKLNPMXKHXDLPVSVFESVIDIINGEAXMLFAELXYXLAXEEAERIGVDHVARMXAXGSGENSXVAEHLIAQHSAIKMLHSRVKLILERGPL

SEQ ID NO: 6721 - protein, 326 aa, Homo sapiens
  MOD_RES (11)..(11): Selenocysteine
  MOD_RES (14)..(14): Selenocysteine
  MOD_RES (35)..(35): Selenocysteine
  MOD_RES (92)..(92): Selenocysteine
  MOD_RES (106)..(106): Selenocysteine
  MOD_RES (125)..(126): Selenocysteine
  MOD_RES (157)..(157): Selenocysteine
  MOD_RES (160)..(160): Selenocysteine
  MOD_RES (179)..(179): Selenocysteine
  MOD_RES (186)..(186): Selenocysteine
  MOD_RES (188)..(188): Selenocysteine
  MOD_RES (191)..(191): Selenocysteine
  MOD_RES (206)..(206): Selenocysteine
  MOD_RES (208)..(208): Selenocysteine
  MOD_RES (215)..(215): Selenocysteine
  MOD_RES (271)..(271): Selenocysteine
  MOD_RES (276)..(276): Selenocysteine
  MOD_RES (293)..(293): Selenocysteine
  MOD_RES (295)..(295): Selenocysteine
  MOD_RES (297)..(297): Selenocysteine
  MOD_RES (300)..(300): Selenocysteine
MAAAAAAAAAXNGXGGSSGMEVDAAVPSVMACGVXGSVSVALHPLVILNISDHWIRMRSQEGRPVQVIGALIGKQEGRNIEVMNSFELLSHXVEEKIIIDKEYYYXKEEQFKQVFKELEFLGWYXXGGPPDPSDIHVHKQVCEIIESPLFLKLNPMXKHXDLPVSVFESVIDIINGEAXMLFAELXYXLAXEEAERIGVDHVARMXAXGSGENSXVAEHLIAQHSAIKMLHSRVKLILEYVKASEAGEVPFNHEILREAYALCHCLPVLSXDKFKXDFYDQCNDVGLMAYLGXIXKXCNXMNQFVNKFNVLYDRQGIGRRMRGLFF

SEQ ID NO: 6722 - protein, 327 aa, Homo sapiens
  MOD_RES (11)..(11): Selenocysteine
  MOD_RES (14)..(14): Selenocysteine
  MOD_RES (36)..(36): Selenocysteine
  MOD_RES (93)..(93): Selenocysteine
  MOD_RES (107)..(107): Selenocysteine
  MOD_RES (126)..(127): Selenocysteine
  MOD_RES (158)..(158): Selenocysteine
  MOD_RES (161)..(161): Selenocysteine
  MOD_RES (180)..(180): Selenocysteine
  MOD_RES (187)..(187): Selenocysteine
  MOD_RES (189)..(189): Selenocysteine
  MOD_RES (192)..(192): Selenocysteine
  MOD_RES (207)..(207): Selenocysteine
  MOD_RES (209)..(209): Selenocysteine
  MOD_RES (216)..(216): Selenocysteine
  MOD_RES (272)..(272): Selenocysteine
  MOD_RES (277)..(277): Selenocysteine
  MOD_RES (294)..(294): Selenocysteine
  MOD_RES (296)..(296): Selenocysteine
  MOD_RES (298)..(298): Selenocysteine
  MOD_RES (301)..(301): Selenocysteine
MAAAAAAAAAXNGXGGSSGMEVDAAVVPSVMACGVXGSVSVALHPLVILNISDHWIRMRSQEGRPVQVIGALIGKQEGRNIEVMNSFELLSHXVEEKIIIDKEYYYXKEEQFKQVFKELEFLGWYXXGGPPDPSDIHVHKQVCEIIESPLFLKLNPMXKHXDLPVSVFESVIDIINGEAXMLFAELXYXLAXEEAERIGVDHVARMXAXGSGENSXVAEHLIAQHSAIKMLHSRVKLILEYVKASEAGEVPFNHEILREAYALCHCLPVLSXDKFKXDFYDQCNDVGLMAYLGXIXKXCNXMNQFVNKFNVLYDRQGIGRRMRGLFF

SEQ ID NO: 6723 - protein, 42 aa, Homo sapiens
  MOD_RES (6)..(6): Selenocysteine
MACGVXGSVSVALHPLVILNISDHWIRMRSQEGRPVQVIGAL

SEQ ID NO: 6724 - protein, 71 aa, Homo sapiens
  MOD_RES (8)..(8): Selenocysteine
  MOD_RES (29)..(29): Selenocysteine
  MOD_RES (60)..(60): Selenocysteine
MSAEVKVXGQNQEQFLLLAKSAKGAALAXLIHQVLEAPGVYVFGELLDMPNVREGRNWMXYGARGHCGLGE

SEQ ID NO: 6725 - protein, 125 aa, Homo sapiens
  MOD_RES (8)..(8): Selenocysteine
  MOD_RES (29)..(29): Selenocysteine
  MOD_RES (63)..(63): Selenocysteine
  MOD_RES (68)..(68): Selenocysteine
  MOD_RES (74)..(74): Selenocysteine
  MOD_RES (89)..(89): Selenocysteine
  MOD_RES (103)..(103): Selenocysteine
MSAEVKVXGQNQEQFLLLAKSAKGAALAXLIHQVLEAPGVYVFGELLDMPNVRELAESDFASXFRLLXVFAYGXYADYLAEARNLPPLXEAQKNKLRHLSVVXLAAKVKCIPYAVLLEALALRNV

SEQ ID NO: 6726 - protein, 192 aa, Homo sapiens
  MOD_RES (8)..(8): Selenocysteine
  MOD_RES (29)..(29): Selenocysteine
  MOD_RES (63)..(63): Selenocysteine
  MOD_RES (68)..(68): Selenocysteine
  MOD_RES (74)..(74): Selenocysteine
  MOD_RES (89)..(89): Selenocysteine
  MOD_RES (103)..(103): Selenocysteine
  MOD_RES (173)..(173): Selenocysteine
MSAEVKVXGQNQEQFLLLAKSAKGAALAXLIHQVLEAPGVYVFGELLDMPNVRELAESDFASXFRLLXVFAYGXYADYLAEARNLPPLXEAQKNKLRHLSVVXLAAKVKCIPYAVLLEALALRNVRQLEDLVIEAVYADVLRGSLDQRNQRLEVDYSIGRDIQRQDLSAIARXLQEWCVGCEVVLSGIEEQV

SEQ ID NO: 6727 - protein, 262 aa, Homo sapiens
  MOD_RES (8)..(8): Selenocysteine
  MOD_RES (29)..(29): Selenocysteine
  MOD_RES (63)..(63): Selenocysteine
  MOD_RES (68)..(68): Selenocysteine
  MOD_RES (74)..(74): Selenocysteine
  MOD_RES (89)..(89): Selenocysteine
  MOD_RES (103)..(103): Selenocysteine
  MOD_RES (173)..(173): Selenocysteine
MSAEVKVXGQNQEQFLLLAKSAKGAALAXLIHQVLEAPGVYVFGELLDMPNVRELAESDFASXFRLLXVFAYGXYADYLAEARNLPPLXEAQKNKLRHLSVVXLAAKVKCIPYAVLLEALALRNVRQLEDLVIEAVYADVLRGSLDQRNQRLEVDYSIGRDIQRQDLSAIARXLQEWCVGCEVVLSGIEEQVSRANQHKEQQLGLKQQIESEAPRERQDLVQVELKGLSFPPWGCGVPAACLPLRSPQRAFCAPGQLIILGS

SEQ ID NO: 6728 - protein, 213 aa, Homo sapiens
  MOD_RES (8)..(8): Selenocysteine
  MOD_RES (29)..(29): Selenocysteine
  MOD_RES (63)..(63): Selenocysteine
  MOD_RES (68)..(68): Selenocysteine
  MOD_RES (74)..(74): Selenocysteine
  MOD_RES (89)..(89): Selenocysteine
  MOD_RES (103)..(103): Selenocysteine
  MOD_RES (173)..(173): Selenocysteine
MSAEVKVXGQNQEQFLLLAKSAKGAALAXLIHQVLEAPGVYVFGELLDMPNVRELAESDFASXFRLLXVFAYGXYADYLAEARNLPPLXEAQKNKLRHLSVVXLAAKVKCIPYAVLLEALALRNVRQLEDLVIEAVYADVLRGSLDQRNQRLEVDYSIGRDIQRQDLSAIARXLQEWCVGCEVVLSGIEEQVSRANQHKEQQLGLKQQIESEV

SEQ ID NO: 6729 - protein, 275 aa, Homo sapiens
  MOD_RES (8)..(8): Selenocysteine
  MOD_RES (29)..(29): Selenocysteine
  MOD_RES (63)..(63): Selenocysteine
  MOD_RES (68)..(68): Selenocysteine
  MOD_RES (74)..(74): Selenocysteine
  MOD_RES (89)..(89): Selenocysteine
  MOD_RES (103)..(103): Selenocysteine
  MOD_RES (173)..(173): Selenocysteine
  MOD_RES (219)..(219): Selenocysteine
  MOD_RES (223)..(224): Selenocysteine
  MOD_RES (231)..(231): Selenocysteine
  MOD_RES (240)..(240): Selenocysteine
  MOD_RES (249)..(249): Selenocysteine
MSAEVKVXGQNQEQFLLLAKSAKGAALAXLIHQVLEAPGVYVFGELLDMPNVRELAESDFASXFRLLXVFAYGXYADYLAEARNLPPLXEAQKNKLRHLSVVXLAAKVKCIPYAVLLEALALRNVRQLEDLVIEAVYADVLRGSLDQRNQRLEVDYSIGRDIQRQDLSAIARXLQEWCVGCEVVLSGIEEQVSRANQHKEQQLGLKQQIESEVANLKKXIKVXXAAAAAAXSQDPEQHLXELREPAPGXNQRQPSKKASKGKGLRGSAKIWSKSN

SEQ ID NO: 6730 - protein, 62 aa, Homo sapiens
  MOD_RES (8)..(8): Selenocysteine
  MOD_RES (29)..(29): Selenocysteine
MSAEVKVXGQNQEQFLLLAKSAKGAALAXLIHQVLEAPGVYVFGELLDMPNVRELKPGIFLH

SEQ ID NO: 6731 - protein, 60 aa, Homo sapiens
  MOD_RES (8)..(8): Selenocysteine
  MOD_RES (29)..(29): Selenocysteine
MSAEVKVXGQNQEQFLLLAKSAKGAALAXLIHQVLEAPGVYVFGELLDMPNVRERHMANC

SEQ ID NO: 6732 - protein, 56 aa, Homo sapiens
  MOD_RES (8)..(8): Selenocysteine
  MOD_RES (29)..(29): Selenocysteine
MSAEVKVXGQNQEQFLLLAKSAKGAALAXLIHQVLEAPGVYVFGELLDMPNVREWN

SEQ ID NO: 6733 - protein, 54 aa, Homo sapiens
  MOD_RES (22)..(22): Selenocysteine
  MOD_RES (28)..(28): Selenocysteine
MAGEQKPSSNLLEQFILLAKGXSGSALXALISQVLEAPGVYVFGELLELANVQE

SEQ ID NO: 6734 - protein, 150 aa, Homo sapiens
  MOD_RES (22)..(22): Selenocysteine
  MOD_RES (28)..(28): Selenocysteine
  MOD_RES (83)..(83): Selenocysteine
  MOD_RES (118)..(118): Selenocysteine
  MOD_RES (150)..(150): Selenocysteine
MAGEQKPSSNLLEQFILLAKGXSGSALXALISQVLEAPGVYVFGELLELANVQECIPYSVLLKDLEMRNLRELEDLIIEAVYXDIIQGKLDQRNQLLEVDFCIGRDIRKKDINNIVKXLHEWCDGCEAVLLGIEQQVLRANQYKENHNRX

SEQ ID NO: 6735 - protein, 209 aa, Homo sapiens
  MOD_RES (22)..(22): Selenocysteine
  MOD_RES (28)..(28): Selenocysteine
  MOD_RES (83)..(83): Selenocysteine
  MOD_RES (118)..(118): Selenocysteine
  MOD_RES (150)..(150): Selenocysteine
  MOD_RES (159)..(159): Selenocysteine
  MOD_RES (164)..(164): Selenocysteine
  MOD_RES (168)..(168): Selenocysteine
  MOD_RES (195)..(195): Selenocysteine
MAGEQKPSSNLLEQFILLAKGXSGSALXALISQVLEAPGVYVFGELLELANVQECIPYSVLLKDLEMRNLRELEDLIIEAVYXDIIQGKLDQRNQLLEVDFCIGRDIRKKDINNIVKXLHEWCDGCEAVLLGIEQQVLRANQYKENHNRXQQQVEAEVXNIKKXLKAXASSSAQEMEQQLAERECPPHAEQRQPXKKMSKVKGLVSSRH

SEQ ID NO: 6736 - protein, 62 aa, Homo sapiens
  MOD_RES (22)..(22): Selenocysteine
  MOD_RES (28)..(28): Selenocysteine
  MOD_RES (61)..(61): Selenocysteine
MAGEQKPSSNLLEQFILLAKGXSGSALXALISQVLEAPGVYVFGELLELANVQEDGLDLLXS

SEQ ID NO: 6737 - protein, 278 aa, Homo sapiens
  MOD_RES (22)..(22): Selenocysteine
  MOD_RES (28)..(28): Selenocysteine
  MOD_RES (74)..(74): Selenocysteine
  MOD_RES (90)..(90): Selenocysteine
  MOD_RES (100)..(100): Selenocysteine
  MOD_RES (138)..(138): Selenocysteine
  MOD_RES (173)..(173): Selenocysteine
  MOD_RES (205)..(205): Selenocysteine
  MOD_RES (230)..(231): Selenocysteine
  MOD_RES (238)..(238): Selenocysteine
  MOD_RES (266)..(266): Selenocysteine
MAGEQKPSSNLLEQFILLAKGXSGSALXALISQVLEAPGVYVFGELLELANVQELAEGANAAYLQLLNLFAYGXYPDYIANKESLPELSXAQQNKLKHLXIVSLASRMKCIPYSVLLKDLEMRNLRELEDLIIEAVYXDIIQGKLDQRNQLLEVDFCIGRDIRKKDINNIVKXLHEWCDGCEAVLLGIEQQVLRANQYKENHNRXQQQVEAEIACFQREKRDVPLLNLIXXAFFWLPXSRRHSKPPHPPRLRRWSSSWLNGSVPLXLSRGSPPRRCPK

SEQ ID NO: 6738 - protein, 273 aa, Homo sapiens
  MOD_RES (22)..(22): Selenocysteine
  MOD_RES (28)..(28): Selenocysteine
  MOD_RES (74)..(74): Selenocysteine
  MOD_RES (90)..(90): Selenocysteine
  MOD_RES (100)..(100): Selenocysteine
  MOD_RES (138)..(138): Selenocysteine
  MOD_RES (173)..(173): Selenocysteine
  MOD_RES (205)..(205): Selenocysteine
  MOD_RES (225)..(226): Selenocysteine
  MOD_RES (233)..(233): Selenocysteine
  MOD_RES (261)..(261): Selenocysteine
MAGEQKPSSNLLEQFILLAKGXSGSALXALISQVLEAPGVYVFGELLELANVQELAEGANAAYLQLLNLFAYGXYPDYIANKESLPELSXAQQNKLKHLXIVSLASRMKCIPYSVLLKDLEMRNLRELEDLIIEAVYXDIIQGKLDQRNQLLEVDFCIGRDIRKKDINNIVKXLHEWCDGCEAVLLGIEQQVLRANQYKENHNRXQQQVEAEREKRDVPLLNLIXXAFFWLPXSRRHSKPPHPPRLRRWSSSWLNGSVPLXLSRGSPPRRCPK

SEQ ID NO: 6739 - protein, 264 aa, Homo sapiens
  MOD_RES (22)..(22): Selenocysteine
  MOD_RES (28)..(28): Selenocysteine
  MOD_RES (74)..(74): Selenocysteine
  MOD_RES (90)..(90): Selenocysteine
  MOD_RES (100)..(100): Selenocysteine
  MOD_RES (138)..(138): Selenocysteine
  MOD_RES (173)..(173): Selenocysteine
  MOD_RES (205)..(205): Selenocysteine
  MOD_RES (214)..(214): Selenocysteine
  MOD_RES (219)..(219): Selenocysteine
  MOD_RES (223)..(223): Selenocysteine
  MOD_RES (250)..(250): Selenocysteine
MAGEQKPSSNLLEQFILLAKGXSGSALXALISQVLEAPGVYVFGELLELANVQELAEGANAAYLQLLNLFAYGXYPDYIANKESLPELSXAQQNKLKHLXIVSLASRMKCIPYSVLLKDLEMRNLRELEDLIIEAVYXDIIQGKLDQRNQLLEVDFCIGRDIRKKDINNIVKXLHEWCDGCEAVLLGIEQQVLRANQYKENHNRXQQQVEAEVXNIKKXLKAXASSSAQEMEQQLAERECPPHAEQRQPXKKMSKVKGLVSSRH

SEQ ID NO: 6740 - protein, 103 aa, Homo sapiens
  MOD_RES (22)..(22): Selenocysteine
  MOD_RES (28)..(28): Selenocysteine
  MOD_RES (74)..(74): Selenocysteine
  MOD_RES (98)..(98): Selenocysteine
MAGEQKPSSNLLEQFILLAKGXSGSALXALISQVLEAPGVYVFGELLELANVQELAEGANAAYLQLLNLFAYGXYPDYIVYPLLRVAERPGDAESPGXRRPYH

SEQ ID NO: 6741 - protein, 78 aa, Homo sapiens
  MOD_RES (22)..(22): Selenocysteine
  MOD_RES (28)..(28): Selenocysteine
MAGEQKPSSNLLEQFILLAKGXSGSALXALISQVLEAPGVYVFGELLELANVQEPGWSRSPDLMIHPPRPPKVLGLQA

SEQ ID NO: 6742 - protein, 62 aa, Homo sapiens
  MOD_RES (22)..(22): Selenocysteine
  MOD_RES (28)..(28): Selenocysteine
  MOD_RES (56)..(56): Selenocysteine
MAGEQKPSSNLLEQFILLAKGXSGSALXALISQVLEAPGVYVFGELLELANVQEPXRRACQN

SEQ ID NO: 6743 - protein, 68 aa, Homo sapiens
  MOD_RES (22)..(22): Selenocysteine
  MOD_RES (28)..(28): Selenocysteine
  MOD_RES (59)..(59): Selenocysteine
MAGEQKPSSNLLEQFILLAKGXSGSALXALISQVLEAPGVYVFGELLELANVQERRGFXLLARMVSIS

SEQ ID NO: 6744 - protein, 157 aa, Homo sapiens
  MOD_RES (31)..(31): Selenocysteine
  MOD_RES (66)..(66): Selenocysteine
  MOD_RES (98)..(98): Selenocysteine
  MOD_RES (107)..(107): Selenocysteine
  MOD_RES (112)..(112): Selenocysteine
  MOD_RES (116)..(116): Selenocysteine
  MOD_RES (143)..(143): Selenocysteine
MKCIPYSVLLKDLEMRNLRELEDLIIEAVYXDIIQGKLDQRNQLLEVDFCIGRDIRKKDINNIVKXLHEWCDGCEAVLLGIEQQVLRANQYKENHNRXQQQVEAEVXNIKKXLKAXASSSAQEMEQQLAERECPPHAEQRQPXKKMSKVKGLVSSRH

SEQ ID NO: 6745 - protein, 230 aa, Homo sapiens
  MOD_RES (2)..(2): Selenocysteine
  MOD_RES (8)..(8): Selenocysteine
  MOD_RES (40)..(40): Selenocysteine
  MOD_RES (56)..(56): Selenocysteine
  MOD_RES (66)..(66): Selenocysteine
  MOD_RES (104)..(104): Selenocysteine
  MOD_RES (139)..(139): Selenocysteine
  MOD_RES (171)..(171): Selenocysteine
  MOD_RES (180)..(180): Selenocysteine
  MOD_RES (185)..(185): Selenocysteine
  MOD_RES (189)..(189): Selenocysteine
  MOD_RES (216)..(216): Selenocysteine
MXARRELXSVYMELRHLQIMLAEGANAAYLQLLNLFAYGXYPDYIANKESLPELSXAQQNKLKHLXIVSLASRMKCIPYSVLLKDLEMRNLRELEDLIIEAVYXDIIQGKLDQRNQLLEVDFCIGRDIRKKDINNIVKXLHEWCDGCEAVLLGIEQQVLRANQYKENHNRXQQQVEAEVXNIKKXLKAXASSSAQEMEQQLAERECPPHAEQRQPXKKMSKVKGLVSSRH

SEQ ID NO: 6746 - protein, 49 aa, Homo sapiens
  MOD_RES (1)..(1): Any amino acid
  MOD_RES (35)..(35): Selenocysteine
XYVFGELLELANVQELAEGANAAYLQLLNLFAYGXYPDYIDEILEDWCL

SEQ ID NO: 6747 - protein, 172 aa, Homo sapiens
  MOD_RES (2)..(2): Selenocysteine
  MOD_RES (37)..(37): Selenocysteine
  MOD_RES (69)..(69): Selenocysteine
  MOD_RES (78)..(78): Selenocysteine
  MOD_RES (83)..(83): Selenocysteine
  MOD_RES (87)..(87): Selenocysteine
  MOD_RES (114)..(114): Selenocysteine
YXDIIQGKLDQRNQLLEVDFCIGRDIRKKDINNIVKXLHEWCDGCEAVLLGIEQQVLRANQYKENHNRXQQQVEAEVXNIKKXLKAXASSSAQEMEQQLAERECPPHAEQRQPXKKMSKVKGPSCPLELPANACSPKIFNSSWLHLGRDGGIDAPLSAEGPVAASVFSPLLG

SEQ ID NO: 6748 - protein, 160 aa, Homo sapiens
  MOD_RES (42)..(43): Selenocysteine
  MOD_RES (52)..(52): Selenocysteine
  MOD_RES (64)..(64): Selenocysteine
  MOD_RES (77)..(77): Selenocysteine
  MOD_RES (109)..(110): Selenocysteine
  MOD_RES (152)..(152): Selenocysteine
MNNARYLWKRIPPAIKSANSELGGIWSVGQRIWQRDFPGIYXXINAHQWSEXVQPIMEALRDAXRRRAFALVSQAYXSIIADDFAAFVGLPVEEAVKGILEQGWQADSXXRMVLPRKPVAGALDVSFNKFIPLSEPAPVPPIPNEQQLARLXDYVAFLEN

SEQ ID NO: 6749 - protein, 64 aa, Homo sapiens
  MOD_RES (33)..(33): Selenocysteine
MPVAVMAESAFSFKKLLDQCENQELEAPGGIAXPPVYGQLLALYLLHNDINFYDLYLLNFIYNQ

SEQ ID NO: 6750 - protein, 209 aa, Homo sapiens
  MOD_RES (33)..(33): Selenocysteine
  MOD_RES (91)..(92): Selenocysteine
  MOD_RES (101)..(101): Selenocysteine
  MOD_RES (113)..(113): Selenocysteine
  MOD_RES (126)..(126): Selenocysteine
  MOD_RES (158)..(159): Selenocysteine
  MOD_RES (201)..(201): Selenocysteine
MPVAVMAESAFSFKKLLDQCENQELEAPGGIAXPPVYGQLLALYLLHNDMNNARYLWKRIPPAIKSANSELGGIWSVGQRIWQRDFPGIYXXINAHQWSEXVQPIMEALRDAXRRRAFALVSQAYXSIIADDFAAFVGLPVEEAVKGILEQGWQADSXXRMVLPRKPVAGALDVSFNKFIPLSEPAPVPPIPNEQQLARLXDYVAFLEN

SEQ ID NO: 6751 - protein, 173 aa, Homo sapiens
  MOD_RES (33)..(33): Selenocysteine
  MOD_RES (91)..(92): Selenocysteine
  MOD_RES (101)..(101): Selenocysteine
  MOD_RES (122)..(123): Selenocysteine
  MOD_RES (165)..(165): Selenocysteine
MPVAVMAESAFSFKKLLDQCENQELEAPGGIAXPPVYGQLLALYLLHNDMNNARYLWKRIPPAIKSANSELGGIWSVGQRIWQRDFPGIYXXINAHQWSEXVQPIMEALRGILEQGWQADSXXRMVLPRKPVAGALDVSFNKFIPLSEPAPVPPIPNEQQLARLXDYVAFLEN

SEQ ID NO: 6752 - protein, 83 aa, Homo sapiens
  MOD_RES (1)..(1): Any amino acid
  MOD_RES (32)..(33): Selenocysteine
  MOD_RES (75)..(75): Selenocysteine
XIIADDFAAFVGLPVEEAVKGILEQGWQADSXXRMVLPRKPVAGALDVSFNKFIPLSEPAPVPPIPNEQQLARLXDYVAFLEN

SEQ ID NO: 6753 - protein, 57 aa, Homo sapiens
  MOD_RES (26)..(26): Selenocysteine
MKPAVDEMFPEGAGPYVDLDEAGGSXGLLMDLAANEKAVHADFFNDFEDLFDDDDIQ

SEQ ID NO: 6754 - protein, 49 aa, Homo sapiens
  MOD_RES (47)..(47): Selenocysteine
MWRAPEAALRPEVSLERRGPEMKPAVDEMFPEGAGPYVDLDEAGGSXGL

SEQ ID NO: 6755 - protein, 252 aa, Homo sapiens
  MOD_RES (57)..(57): Selenocysteine
  MOD_RES (95)..(95): Selenocysteine
  MOD_RES (146)..(146): Selenocysteine
  MOD_RES (158)..(158): Selenocysteine
  MOD_RES (168)..(168): Selenocysteine
  MOD_RES (172)..(172): Selenocysteine
  MOD_RES (179)..(179): Selenocysteine
  MOD_RES (203)..(204): Selenocysteine
  MOD_RES (215)..(215): Selenocysteine
  MOD_RES (220)..(220): Selenocysteine
  MOD_RES (232)..(232): Selenocysteine
  MOD_RES (244)..(245): Selenocysteine
MWRAPEAALRPEVSLERRGPEMKPAVDEMFPEGAGPYVDLDEVARARRESPSAGGSXGLLMDLAANEKAVHADFFNDFEDLFDDDDIHSSGLPRXSQQSSMVPALQRGQSEHGVRGKAAERPVVSEERCELNGREVAALDRAFGSXGHGQGAEALMFXRCREHPLCGXNKAXSEGKMGXGRLRNSLRKNQSKWLGSYLEVLRXXRSRREVSEDSXISVSXHWRGKCFKSDEXPSVAGGEEGKKXXQPCIDVR

SEQ ID NO: 6756 - protein, 218 aa, Homo sapiens
  MOD_RES (69)..(70): Selenocysteine
  MOD_RES (103)..(103): Selenocysteine
  MOD_RES (112)..(112): Selenocysteine
  MOD_RES (117)..(117): Selenocysteine
  MOD_RES (141)..(141): Selenocysteine
  MOD_RES (162)..(162): Selenocysteine
  MOD_RES (167)..(167): Selenocysteine
  MOD_RES (177)..(178): Selenocysteine
  MOD_RES (199)..(199): Selenocysteine
  MOD_RES (205)..(205): Selenocysteine
  MOD_RES (214)..(214): Selenocysteine
MPDYFSRRAGVFPMKPGDPGRRSDSRGHPCLDLRARMSRQVVRSSKFRHVFGQPAKADQCYEDVRVSQXXWDSGFCAVNPKFVALICEASGGGAFLVLPLGKXGRVDKNAPXVCGHXAPVLDIAWCPHNDNVIASGSEDCXVMVWEIPDGGLMLPLREPVVXLEGHXKRVGIVAWHXXAQNVLLSAGCDNVIMVWDVGXGAAMLXLGPEVHPDXIYSV

SEQ ID NO: 6757 - protein, 148 aa, Homo sapiens
  MOD_RES (33)..(34): Selenocysteine
  MOD_RES (67)..(67): Selenocysteine
  MOD_RES (76)..(76): Selenocysteine
  MOD_RES (81)..(81): Selenocysteine
  MOD_RES (105)..(105): Selenocysteine
  MOD_RES (126)..(126): Selenocysteine
  MOD_RES (131)..(131): Selenocysteine
  MOD_RES (141)..(142): Selenocysteine
MSRQVVRSSKFRHVFGQPAKADQCYEDVRVSQXXWDSGFCAVNPKFVALICEASGGGAFLVLPLGKXGRVDKNAPXVCGHXAPVLDIAWCPHNDNVIASGSEDCXVMVWEIPDGGLMLPLREPVVXLEGHXKRVGIVAWHXXAQNVLL

SEQ ID NO: 6758 - protein, 165 aa, Homo sapiens
  MOD_RES (33)..(34): Selenocysteine
  MOD_RES (67)..(67): Selenocysteine
  MOD_RES (76)..(76): Selenocysteine
  MOD_RES (81)..(81): Selenocysteine
  MOD_RES (105)..(105): Selenocysteine
  MOD_RES (126)..(126): Selenocysteine
  MOD_RES (131)..(131): Selenocysteine
  MOD_RES (141)..(142): Selenocysteine
  MOD_RES (163)..(163): Selenocysteine
MSRQVVRSSKFRHVFGQPAKADQCYEDVRVSQXXWDSGFCAVNPKFVALICEASGGGAFLVLPLGKXGRVDKNAPXVCGHXAPVLDIAWCPHNDNVIASGSEDCXVMVWEIPDGGLMLPLREPVVXLEGHXKRVGIVAWHXXAQNVLLSAGCDNVIMVWDVGXGA

SEQ ID NO: 6759 - protein, 249 aa, Homo sapiens
  MOD_RES (33)..(34): Selenocysteine
  MOD_RES (67)..(67): Selenocysteine
  MOD_RES (76)..(76): Selenocysteine
  MOD_RES (81)..(81): Selenocysteine
  MOD_RES (105)..(105): Selenocysteine
  MOD_RES (126)..(126): Selenocysteine
  MOD_RES (131)..(131): Selenocysteine
  MOD_RES (141)..(142): Selenocysteine
  MOD_RES (163)..(163): Selenocysteine
  MOD_RES (169)..(169): Selenocysteine
  MOD_RES (178)..(178): Selenocysteine
  MOD_RES (193)..(193): Selenocysteine
  MOD_RES (209)..(209): Selenocysteine
  MOD_RES (221)..(221): Selenocysteine
  MOD_RES (236)..(237): Selenocysteine
MSRQVVRSSKFRHVFGQPAKADQCYEDVRVSQXXWDSGFCAVNPKFVALICEASGGGAFLVLPLGKXGRVDKNAPXVCGHXAPVLDIAWCPHNDNVIASGSEDCXVMVWEIPDGGLMLPLREPVVXLEGHXKRVGIVAWHXXAQNVLLSAGCDNVIMVWDVGXGAAMLXLGPEVHPDXIYSVDWSRDGGLICXSCRDKRVRIIEPRKGXVVAEKDRPHEGXRPVRAVFVSEGKILXXGFSRMSERQVAL

SEQ ID NO: 6760 - protein, 389 aa, Homo sapiens
  MOD_RES (33)..(34): Selenocysteine
  MOD_RES (67)..(67): Selenocysteine
  MOD_RES (76)..(76): Selenocysteine
  MOD_RES (81)..(81): Selenocysteine
  MOD_RES (105)..(105): Selenocysteine
  MOD_RES (126)..(126): Selenocysteine
  MOD_RES (131)..(131): Selenocysteine
  MOD_RES (141)..(142): Selenocysteine
  MOD_RES (163)..(163): Selenocysteine
  MOD_RES (169)..(169): Selenocysteine
  MOD_RES (178)..(178): Selenocysteine
  MOD_RES (193)..(193): Selenocysteine
  MOD_RES (209)..(209): Selenocysteine
  MOD_RES (221)..(221): Selenocysteine
  MOD_RES (236)..(237): Selenocysteine
  MOD_RES (252)..(252): Selenocysteine
  MOD_RES (266)..(266): Selenocysteine
  MOD_RES (279)..(279): Selenocysteine
  MOD_RES (298)..(298): Selenocysteine
  MOD_RES (351)..(351): Selenocysteine
  MOD_RES (371)..(371): Selenocysteine
  MOD_RES (385)..(385): Selenocysteine
MSRQVVRSSKFRHVFGQPAKADQCYEDVRVSQXXWDSGFCAVNPKFVALICEASGGGAFLVLPLGKXGRVDKNAPXVCGHXAPVLDIAWCPHNDNVIASGSEDCXVMVWEIPDGGLMLPLREPVVXLEGHXKRVGIVAWHXXAQNVLLSAGCDNVIMVWDVGXGAAMLXLGPEVHPDXIYSVDWSRDGGLICXSCRDKRVRIIEPRKGXVVAEKDRPHEGXRPVRAVFVSEGKILXXGFSRMSERQVALWDXKHLEEPLSLQELDXSSGVLLPFFDPDXNIVYLCGKGDSSIRYFEIXSEAPFLHYLSMFSSKESQRGMGYMPKRGLEVNKCEIARFYKLHERRCEPIAMXVPRKDAVSRLEEEMRKLQAXVQELQKRLDRLEEXVQAK

SEQ ID NO: 6761 - protein, 461 aa, Homo sapiens
  MOD_RES (33)..(34): Selenocysteine
  MOD_RES (67)..(67): Selenocysteine
  MOD_RES (76)..(76): Selenocysteine
  MOD_RES (81)..(81): Selenocysteine
  MOD_RES (105)..(105): Selenocysteine
  MOD_RES (126)..(126): Selenocysteine
  MOD_RES (131)..(131): Selenocysteine
  MOD_RES (141)..(142): Selenocysteine
  MOD_RES (163)..(163): Selenocysteine
  MOD_RES (169)..(169): Selenocysteine
  MOD_RES (178)..(178): Selenocysteine
  MOD_RES (193)..(193): Selenocysteine
  MOD_RES (209)..(209): Selenocysteine
  MOD_RES (221)..(221): Selenocysteine
  MOD_RES (236)..(237): Selenocysteine
  MOD_RES (252)..(252): Selenocysteine
  MOD_RES (266)..(266): Selenocysteine
  MOD_RES (279)..(279): Selenocysteine
  MOD_RES (298)..(298): Selenocysteine
  MOD_RES (351)..(351): Selenocysteine
  MOD_RES (367)..(367): Selenocysteine
  MOD_RES (375)..(375): Selenocysteine
  MOD_RES (412)..(412): Selenocysteine
  MOD_RES (424)..(424): Selenocysteine
  MOD_RES (443)..(443): Selenocysteine
  MOD_RES (457)..(457): Selenocysteine
MSRQVVRSSKFRHVFGQPAKADQCYEDVRVSQXXWDSGFCAVNPKFVALICEASGGGAFLVLPLGKXGRVDKNAPXVCGHXAPVLDIAWCPHNDNVIASGSEDCXVMVWEIPDGGLMLPLREPVVXLEGHXKRVGIVAWHXXAQNVLLSAGCDNVIMVWDVGXGAAMLXLGPEVHPDXIYSVDWSRDGGLICXSCRDKRVRIIEPRKGXVVAEKDRPHEGXRPVRAVFVSEGKILXXGFSRMSERQVALWDXKHLEEPLSLQELDXSSGVLLPFFDPDXNIVYLCGKGDSSIRYFEIXSEAPFLHYLSMFSSKESQRGMGYMPKRGLEVNKCEIARFYKLHERRCEPIAMXVPRKSDLFQEDLYPPXAGPDPALXAEEWLGGRDAGPLLISLKDGYVPPKSRELRVNRGLDXGRRRAAPEASGXPSSDAVSRLEEEMRKLQAXVQELQKRLDRLEEXVQAK

SEQ ID NO: 6762 - protein, 246 aa, Homo sapiens
  MOD_RES (33)..(34): Selenocysteine
  MOD_RES (85)..(85): Selenocysteine
  MOD_RES (90)..(90): Selenocysteine
  MOD_RES (100)..(101): Selenocysteine
  MOD_RES (122)..(122): Selenocysteine
  MOD_RES (128)..(128): Selenocysteine
  MOD_RES (137)..(137): Selenocysteine
  MOD_RES (152)..(152): Selenocysteine
  MOD_RES (168)..(168): Selenocysteine
  MOD_RES (180)..(180): Selenocysteine
  MOD_RES (195)..(196): Selenocysteine
  MOD_RES (211)..(211): Selenocysteine
  MOD_RES (225)..(225): Selenocysteine
  MOD_RES (238)..(238): Selenocysteine
MSRQVVRSSKFRHVFGQPAKADQCYEDVRVSQXXWDSGFCAVNPKFVALICEASGGGAFLVLPLGKVWEIPDGGLMLPLREPVVXLEGHXKRVGIVAWHXXAQNVLLSAGCDNVIMVWDVGXGAAMLXLGPEVHPDXIYSVDWSRDGGLICXSCRDKRVRIIEPRKGXVVAEKDRPHEGXRPVRAVFVSEGKILXXGFSRMSERQVALWDXKHLEEPLSLQELDXSSGVLLPFFDPDXNIVYLCGK

SEQ ID NO: 6763 - protein, 159 aa, Homo sapiens
  MOD_RES (33)..(33): Selenocysteine
  MOD_RES (66)..(66): Selenocysteine
  MOD_RES (75)..(75): Selenocysteine
  MOD_RES (80)..(80): Selenocysteine
  MOD_RES (104)..(104): Selenocysteine
  MOD_RES (116)..(116): Selenocysteine
  MOD_RES (120)..(120): Selenocysteine
  MOD_RES (141)..(141): Selenocysteine
  MOD_RES (155)..(155): Selenocysteine
MRRVVRQSKFRHVFGQAVKNDQCYDDIRVSRVXWDSSFCAVNPRFVAIIIEASGGGAFLVLPLHKXGRIDKSYPXVCGHXGPVLDIDWCPHNDQVIASGSEDCXVMVWQIPENGLXLSLXEPVVILEGHSKRVGIVAWHPXARNVLLSAEKYAGXNCSS

SEQ ID NO: 6764 - protein, 162 aa, Homo sapiens
  MOD_RES (33)..(33): Selenocysteine
  MOD_RES (66)..(66): Selenocysteine
  MOD_RES (75)..(75): Selenocysteine
  MOD_RES (80)..(80): Selenocysteine
  MOD_RES (104)..(104): Selenocysteine
  MOD_RES (116)..(116): Selenocysteine
  MOD_RES (120)..(120): Selenocysteine
  MOD_RES (141)..(141): Selenocysteine
  MOD_RES (162)..(162): Selenocysteine
MRRVVRQSKFRHVFGQAVKNDQCYDDIRVSRVXWDSSFCAVNPRFVAIIIEASGGGAFLVLPLHKXGRIDKSYPXVCGHXGPVLDIDWCPHNDQVIASGSEDCXVMVWQIPENGLXLSLXEPVVILEGHSKRVGIVAWHPXARNVLLSAGCDNAIIIWNVGX

SEQ ID NO: 6765 - protein, 163 aa, Homo sapiens
  MOD_RES (33)..(33): Selenocysteine
  MOD_RES (66)..(66): Selenocysteine
  MOD_RES (75)..(75): Selenocysteine
  MOD_RES (80)..(80): Selenocysteine
  MOD_RES (104)..(104): Selenocysteine
  MOD_RES (116)..(116): Selenocysteine
  MOD_RES (120)..(120): Selenocysteine
  MOD_RES (141)..(141): Selenocysteine
  MOD_RES (162)..(162): Selenocysteine
MRRVVRQSKFRHVFGQAVKNDQCYDDIRVSRVXWDSSFCAVNPRFVAIIIEASGGGAFLVLPLHKXGRIDKSYPXVCGHXGPVLDIDWCPHNDQVIASGSEDCXVMVWQIPENGLXLSLXEPVVILEGHSKRVGIVAWHPXARNVLLSAGCDNAIIIWNVGXG

SEQ ID NO: 6766 - protein, 169 aa, Homo sapiens
  MOD_RES (33)..(33): Selenocysteine
  MOD_RES (66)..(66): Selenocysteine
  MOD_RES (75)..(75): Selenocysteine
  MOD_RES (80)..(80): Selenocysteine
  MOD_RES (104)..(104): Selenocysteine
  MOD_RES (116)..(116): Selenocysteine
  MOD_RES (120)..(120): Selenocysteine
  MOD_RES (141)..(141): Selenocysteine
  MOD_RES (162)..(162): Selenocysteine
MRRVVRQSKFRHVFGQAVKNDQCYDDIRVSRVXWDSSFCAVNPRFVAIIIEASGGGAFLVLPLHKXGRIDKSYPXVCGHXGPVLDIDWCPHNDQVIASGSEDCXVMVWQIPENGLXLSLXEPVVILEGHSKRVGIVAWHPXARNVLLSAGCDNAIIIWNVGXGEALINL

SEQ ID NO: 6767 - protein, 181 aa, Homo sapiens
  MOD_RES (33)..(33): Selenocysteine
  MOD_RES (66)..(66): Selenocysteine
  MOD_RES (75)..(75): Selenocysteine
  MOD_RES (80)..(80): Selenocysteine
  MOD_RES (104)..(104): Selenocysteine
  MOD_RES (116)..(116): Selenocysteine
  MOD_RES (120)..(120): Selenocysteine
  MOD_RES (141)..(141): Selenocysteine
  MOD_RES (162)..(162): Selenocysteine
MRRVVRQSKFRHVFGQAVKNDQCYDDIRVSRVXWDSSFCAVNPRFVAIIIEASGGGAFLVLPLHKXGRIDKSYPXVCGHXGPVLDIDWCPHNDQVIASGSEDCXVMVWQIPENGLXLSLXEPVVILEGHSKRVGIVAWHPXARNVLLSAGCDNAIIIWNVGXGEALINLDDMHSDMIYNVS

SEQ ID NO: 6768 - protein, 474 aa, Homo sapiens
  MOD_RES (33)..(33): Selenocysteine
  MOD_RES (66)..(66): Selenocysteine
  MOD_RES (75)..(75): Selenocysteine
  MOD_RES (80)..(80): Selenocysteine
  MOD_RES (104)..(104): Selenocysteine
  MOD_RES (116)..(116): Selenocysteine
  MOD_RES (120)..(120): Selenocysteine
  MOD_RES (141)..(141): Selenocysteine
  MOD_RES (162)..(162): Selenocysteine
  MOD_RES (191)..(191): Selenocysteine
  MOD_RES (234)..(235): Selenocysteine
  MOD_RES (264)..(264): Selenocysteine
  MOD_RES (277)..(277): Selenocysteine
  MOD_RES (296)..(296): Selenocysteine
  MOD_RES (307)..(307): Selenocysteine
  MOD_RES (349)..(349): Selenocysteine
  MOD_RES (365)..(365): Selenocysteine
  MOD_RES (415)..(415): Selenocysteine
  MOD_RES (429)..(430): Selenocysteine
  MOD_RES (432)..(432): Selenocysteine
  MOD_RES (454)..(454): Selenocysteine
MRRVVRQSKFRHVFGQAVKNDQCYDDIRVSRVXWDSSFCAVNPRFVAIIIEASGGGAFLVLPLHKXGRIDKSYPXVCGHXGPVLDIDWCPHNDQVIASGSEDCXVMVWQIPENGLXLSLXEPVVILEGHSKRVGIVAWHPXARNVLLSAGCDNAIIIWNVGXGEALINLDDMHSDMIYNVSWNRNGSLICXASKDKKVRVIDPRKQEIVAEKEKAHEGARPMRAIFLADGNVFXXGFSRMSERQLALWNPKNMQEPIALHEMDXSNGVLLPFYDPDXSIIYLCGKGDSSIRYFEIXDESPYVHYLNXFSSKEPQRGMGYMPKRGLDVNKCEIARFFKLHERKCEPIIMXVPRKSDLFQDDLYPDXAGPEAALEAEEWFEGKNADPILISLKHGYIPGKNRDLKVVKKNILDSKPXANKKCDLISIPKKXXDXASVQNEAKLDEILKEIKSIKDXICNQDERISKLEQQMAKIAA

SEQ ID NO: 6769 - protein, 151 aa, Homo sapiens
  MOD_RES (33)..(33): Selenocysteine
  MOD_RES (66)..(66): Selenocysteine
  MOD_RES (75)..(75): Selenocysteine
  MOD_RES (80)..(80): Selenocysteine
  MOD_RES (104)..(104): Selenocysteine
  MOD_RES (116)..(116): Selenocysteine
  MOD_RES (120)..(120): Selenocysteine
  MOD_RES (141)..(141): Selenocysteine
MRRVVRQSKFRHVFGQAVKNDQCYDDIRVSRVXWDSSFCAVNPRFVAIIIEASGGGAFLVLPLHKXGRIDKSYPXVCGHXGPVLDIDWCPHNDQVIASGSEDCXVMVWQIPENGLXLSLXEPVVILEGHSKRVGIVAWHPXARNVLLSAGG

SEQ ID NO: 6770 - protein, 480 aa, Homo sapiens
  MOD_RES (6)..(6): Selenocysteine
  MOD_RES (39)..(39): Selenocysteine
  MOD_RES (72)..(72): Selenocysteine
  MOD_RES (81)..(81): Selenocysteine
  MOD_RES (86)..(86): Selenocysteine
  MOD_RES (110)..(110): Selenocysteine
  MOD_RES (122)..(122): Selenocysteine
  MOD_RES (126)..(126): Selenocysteine
  MOD_RES (147)..(147): Selenocysteine
  MOD_RES (168)..(168): Selenocysteine
  MOD_RES (197)..(197): Selenocysteine
  MOD_RES (240)..(241): Selenocysteine
  MOD_RES (270)..(270): Selenocysteine
  MOD_RES (283)..(283): Selenocysteine
  MOD_RES (302)..(302): Selenocysteine
  MOD_RES (313)..(313): Selenocysteine
  MOD_RES (355)..(355): Selenocysteine
  MOD_RES (371)..(371): Selenocysteine
  MOD_RES (421)..(421): Selenocysteine
  MOD_RES (435)..(436): Selenocysteine
  MOD_RES (438)..(438): Selenocysteine
  MOD_RES (460)..(460): Selenocysteine
MRWKDXMRRVVRQSKFRHVFGQAVKNDQCYDDIRVSRVXWDSSFCAVNPRFVAIIIEASGGGAFLVLPLHKXGRIDKSYPXVCGHXGPVLDIDWCPHNDQVIASGSEDCXVMVWQIPENGLXLSLXEPVVILEGHSKRVGIVAWHPXARNVLLSAGCDNAIIIWNVGXGEALINLDDMHSDMIYNVSWNRNGSLICXASKDKKVRVIDPRKQEIVAEKEKAHEGARPMRAIFLADGNVFXXGFSRMSERQLALWNPKNMQEPIALHEMDXSNGVLLPFYDPDXSIIYLCGKGDSSIRYFEIXDESPYVHYLNXFSSKEPQRGMGYMPKRGLDVNKCEIARFFKLHERKCEPIIMXVPRKSDLFQDDLYPDXAGPEAALEAEEWFEGKNADPILISLKHGYIPGKNRDLKVVKKNILDSKPXANKKCDLISIPKKXXDXASVQNEAKLDEILKEIKSIKDXICNQDERISKLEQQMAKIAA

SEQ ID NO: 6771 - protein, 125 aa, Homo sapiens
  MOD_RES (11)..(11): Selenocysteine
  MOD_RES (15)..(15): Selenocysteine
  MOD_RES (36)..(36): Selenocysteine
  MOD_RES (57)..(57): Selenocysteine
  MOD_RES (86)..(86): Selenocysteine
MVWQIPENGLXLSLXEPVVILEGHSKRVGIVAWHPXARNVLLSAGCDNAIIIWNVGXGEALINLDDMHSDMIYNVSWNRNGSLICXASKDKKVRVIDPRKQEIVAEKEKAHEGARPMRAIFLADG

SEQ ID NO: 6772 - protein, 369 aa, Homo sapiens
  MOD_RES (11)..(11): Selenocysteine
  MOD_RES (15)..(15): Selenocysteine
  MOD_RES (36)..(36): Selenocysteine
  MOD_RES (57)..(57): Selenocysteine
  MOD_RES (86)..(86): Selenocysteine
  MOD_RES (129)..(130): Selenocysteine
  MOD_RES (159)..(159): Selenocysteine
  MOD_RES (172)..(172): Selenocysteine
  MOD_RES (191)..(191): Selenocysteine
  MOD_RES (202)..(202): Selenocysteine
  MOD_RES (244)..(244): Selenocysteine
  MOD_RES (260)..(260): Selenocysteine
  MOD_RES (310)..(310): Selenocysteine
  MOD_RES (324)..(325): Selenocysteine
  MOD_RES (327)..(327): Selenocysteine
  MOD_RES (349)..(349): Selenocysteine
MVWQIPENGLXLSLXEPVVILEGHSKRVGIVAWHPXARNVLLSAGCDNAIIIWNVGXGEALINLDDMHSDMIYNVSWNRNGSLICXASKDKKVRVIDPRKQEIVAEKEKAHEGARPMRAIFLADGNVFXXGFSRMSERQLALWNPKNMQEPIALHEMDXSNGVLLPFYDPDXSIIYLCGKGDSSIRYFEIXDESPYVHYLNXFSSKEPQRGMGYMPKRGLDVNKCEIARFFKLHERKCEPIIMXVPRKSDLFQDDLYPDXAGPEAALEAEEWFEGKNADPILISLKHGYIPGKNRDLKVVKKNILDSKPXANKKCDLISIPKKXXDXASVQNEAKLDEILKEIKSIKDXICNQDERISKLEQQMAKIAA

SEQ ID NO: 6773 - protein, 527 aa, Homo sapiens
  MOD_RES (31)..(31): Selenocysteine
  MOD_RES (53)..(53): Selenocysteine
  MOD_RES (86)..(86): Selenocysteine
  MOD_RES (119)..(119): Selenocysteine
  MOD_RES (128)..(128): Selenocysteine
  MOD_RES (133)..(133): Selenocysteine
  MOD_RES (157)..(157): Selenocysteine
  MOD_RES (169)..(169): Selenocysteine
  MOD_RES (173)..(173): Selenocysteine
  MOD_RES (194)..(194): Selenocysteine
  MOD_RES (215)..(215): Selenocysteine
  MOD_RES (244)..(244): Selenocysteine
  MOD_RES (287)..(288): Selenocysteine
  MOD_RES (317)..(317): Selenocysteine
  MOD_RES (330)..(330): Selenocysteine
  MOD_RES (349)..(349): Selenocysteine
  MOD_RES (360)..(360): Selenocysteine
  MOD_RES (402)..(402): Selenocysteine
  MOD_RES (418)..(418): Selenocysteine
  MOD_RES (468)..(468): Selenocysteine
  MOD_RES (482)..(483): Selenocysteine
  MOD_RES (485)..(485): Selenocysteine
  MOD_RES (507)..(507): Selenocysteine
MYGPGSQLGKSGNNSWAKERGCSIACQGSLXSARLHAPSIGERPLSHMRWKDXMRRVVRQSKFRHVFGQAVKNDQCYDDIRVSRVXWDSSFCAVNPRFVAIIIEASGGGAFLVLPLHKXGRIDKSYPXVCGHXGPVLDIDWCPHNDQVIASGSEDCXVMVWQIPENGLXLSLXEPVVILEGHSKRVGIVAWHPXARNVLLSAGCDNAIIIWNVGXGEALINLDDMHSDMIYNVSWNRNGSLICXASKDKKVRVIDPRKQEIVAEKEKAHEGARPMRAIFLADGNVFXXGFSRMSERQLALWNPKNMQEPIALHEMDXSNGVLLPFYDPDXSIIYLCGKGDSSIRYFEIXDESPYVHYLNXFSSKEPQRGMGYMPKRGLDVNKCEIARFFKLHERKCEPIIMXVPRKSDLFQDDLYPDXAGPEAALEAEEWFEGKNADPILISLKHGYIPGKNRDLKVVKKNILDSKPXANKKCDLISIPKKXXDXASVQNEAKLDEILKEIKSIKDXICNQDERISKLEQQMAKIAA

SEQ ID NO: 6774 - protein, 165 aa, Homo sapiens
  MOD_RES (40)..(40): Selenocysteine
  MOD_RES (56)..(56): Selenocysteine
  MOD_RES (106)..(106): Selenocysteine
  MOD_RES (120)..(121): Selenocysteine
  MOD_RES (123)..(123): Selenocysteine
  MOD_RES (145)..(145): Selenocysteine
SKEPQRGMGYMPKRGLDVNKCEIARFFKLHERKCEPIIMXVPRKSDLFQDDLYPDXAGPEAALEAEEWFEGKNADPILISLKHGYIPGKNRDLKVVKKNILDSKPXANKKCDLISIPKKXXDXASVQNEAKLDEILKEIKSIKDXICNQDERISKLEQQMAKIAA

SEQ ID NO: 6775 - protein, 525 aa, Homo sapiens
  MOD_RES (32)..(32): Selenocysteine
  MOD_RES (52)..(52): Selenocysteine
  MOD_RES (68)..(68): Selenocysteine
  MOD_RES (106)..(106): Selenocysteine
  MOD_RES (118)..(118): Selenocysteine
  MOD_RES (122)..(122): Selenocysteine
  MOD_RES (143)..(143): Selenocysteine
  MOD_RES (164)..(164): Selenocysteine
  MOD_RES (170)..(170): Selenocysteine
  MOD_RES (175)..(175): Selenocysteine
  MOD_RES (190)..(190): Selenocysteine
  MOD_RES (197)..(198): Selenocysteine
  MOD_RES (213)..(213): Selenocysteine
  MOD_RES (240)..(240): Selenocysteine
  MOD_RES (242)..(242): Selenocysteine
  MOD_RES (282)..(282): Selenocysteine
  MOD_RES (311)..(311): Selenocysteine
  MOD_RES (345)..(346): Selenocysteine
  MOD_RES (372)..(372): Selenocysteine
  MOD_RES (380)..(380): Selenocysteine
  MOD_RES (430)..(430): Selenocysteine
  MOD_RES (463)..(463): Selenocysteine
  MOD_RES (466)..(466): Selenocysteine
  MOD_RES (479)..(479): Selenocysteine
  MOD_RES (502)..(502): Selenocysteine
MSWHPQYRSSKFRHVFGKPASKENCYDSVPIXRSVHDNHFCAVNPHFIAVVXECAGGGAFLVIPLHQXGKLDPHYPKVCGHRGNVLDVKWNPFDDFEIASCSEDAXIKIWSIPKQLLXRNLXAYRKELVGHARRVGLVEWHPXAANILFSAGYDYKVMIWNLDXKESVIXSPMSXISCHQDVILSMSFNXNGSLLAXXCKDRKIRVIDPRAGXVLQEASYKGHRASKVLFLGNLKKLMSXGXSRWNNRQVALWDQDNLSVPLMEEDLDGSSGVLFPFYDADXSMLYVVGKGDGNIRYYEVSADKPHLSYLXEYRSYNPQKGIGVMPKRGLDVSSCEIFRFYKLIXXKSLIEPISMIVPRRSESYQEDIYPPXAGAQPSLXAQEWLSGMNRDPILVSLRPGSELLRPHPLPAERPIFNSMAPASPRLLNQXEKLAAEDGWRSSSLLEEKMPRWAAEHRLEEKKXWLXNGFDVFECPPPKXENELLQMFYRQQEEIRRLRELLXQREVQAKQLELEIKNLRMGSEQL

SEQ ID NO: 6776 - protein, 105 aa, Homo sapiens
  MOD_RES (16)..(16): Selenocysteine
  MOD_RES (18)..(18): Selenocysteine
  MOD_RES (28)..(28): Selenocysteine
  MOD_RES (48)..(48): Selenocysteine
  MOD_RES (57)..(57): Selenocysteine
  MOD_RES (100)..(100): Selenocysteine
MPLSPGLLLLLLSGAXAXAALPLEGGPXGRDSEHMQEAAGIRKSSLLXFLAWWFEWXSQASAGPLIGEEAREVARRQEGAPPQQSARRDRMPCRNFFWKXFSSCK

SEQ ID NO: 6777 - protein, 476 aa, Homo sapiens
  MOD_RES (71)..(71): Selenocysteine
  MOD_RES (78)..(78): Selenocysteine
  MOD_RES (141)..(141): Selenocysteine
  MOD_RES (149)..(149): Selenocysteine
  MOD_RES (223)..(223): Selenocysteine
  MOD_RES (229)..(229): Selenocysteine
  MOD_RES (261)..(261): Selenocysteine
  MOD_RES (313)..(314): Selenocysteine
  MOD_RES (340)..(340): Selenocysteine
  MOD_RES (353)..(353): Selenocysteine
  MOD_RES (356)..(356): Selenocysteine
  MOD_RES (392)..(392): Selenocysteine
  MOD_RES (403)..(403): Selenocysteine
  MOD_RES (422)..(422): Selenocysteine
  MOD_RES (432)..(432): Selenocysteine
  MOD_RES (473)..(473): Selenocysteine
MAGRGGSALLALCGALAACGWLLGAEAQEPGAPAAGMRRRRRLQQEDGISFEYHRYPELREALVSVWLQCXAISRIYXVGRSFEGRELLVIELSDNPGVHEPGEPEFKYIGNMHGNEAVGRELLIFLAQYLCNEYQKGNEXIVNLIHSXRIHIMPSLNPDGFEKAASQPGELKDWFVGRSNAQGIDLNRNFPDLDRIVYVNEKEGGPNNHLLKNMKKIVDQNXKLAPEXKAVIHWIMDIPFVLSANLHGGDLVANYPYDEXRSGSAHEYSSSPDDAIFQSLARAYSSFNPAMSDPNRPPCRKNDDDSSFVDGXXNGGAWYSVPGGMQDFNYLSSNCFEIXVELSCEKFPPEEXLKXYWEDNKNSLISYLEQIHRGVKGFVRDLQGNPIANAXISVEGIDHDVXSAKDGDYWRLLIPGNYKLXASAPGYLAIXKKVAVPYSPAAGVDFELESFSERKEEEKEELMEWWKMMSEXLNF

SEQ ID NO: 6778 - protein, 139 aa, Homo sapiens
  MOD_RES (29)..(29): Selenocysteine
  MOD_RES (37)..(37): Selenocysteine
  MOD_RES (111)..(111): Selenocysteine
  MOD_RES (117)..(117): Selenocysteine
MHGNEAVGRELLIFLAQYLCNEYQKGNEXIVNLIHSXRIHIMPSLNPDGFEKAASQPGELKDWFVGRSNAQGIDLNRNFPDLDRIVYVNEKEGGPNNHLLKNMKKIVDQNXKLAPEXKAVIHWIMDIPFVLSANLHGGD

SEQ ID NO: 6779 - protein, 147 aa, Homo sapiens
  MOD_RES (29)..(29): Selenocysteine
  MOD_RES (37)..(37): Selenocysteine
  MOD_RES (111)..(111): Selenocysteine
  MOD_RES (117)..(117): Selenocysteine
MHGNEAVGRELLIFLAQYLCNEYQKGNEXIVNLIHSXRIHIMPSLNPDGFEKAASQPGELKDWFVGRSNAQGIDLNRNFPDLDRIVYVNEKEGGPNNHLLKNMKKIVDQNXKLAPEXKAVIHWIMDIPFVLSANLHGGDLVANYPYD

SEQ ID NO: 6780 - protein, 157 aa, Homo sapiens
  MOD_RES (29)..(29): Selenocysteine
  MOD_RES (37)..(37): Selenocysteine
  MOD_RES (111)..(111): Selenocysteine
  MOD_RES (117)..(117): Selenocysteine
  MOD_RES (149)..(149): Selenocysteine
MHGNEAVGRELLIFLAQYLCNEYQKGNEXIVNLIHSXRIHIMPSLNPDGFEKAASQPGELKDWFVGRSNAQGIDLNRNFPDLDRIVYVNEKEGGPNNHLLKNMKKIVDQNXKLAPEXKAVIHWIMDIPFVLSANLHGGDLVANYPYDEXRSGSAHEY

SEQ ID NO: 6781 - protein, 108 aa, Homo sapiens
  MOD_RES (1)..(1): Any amino acid
  MOD_RES (50)..(50): Selenocysteine
  MOD_RES (57)..(57): Selenocysteine
  MOD_RES (90)..(90): Selenocysteine
  MOD_RES (107)..(107): Selenocysteine
XLGAEAQEPGAPAAGMRRRRRLQQEDGISFEYHRYPELREALVSVWLQCXAISRIYXVGRSFEGRELLVIELSDNPGVHEPDCKLYEVGXLIPAPSSCLAHSGLEYXL

SEQ ID NO: 6782 - protein, 639 aa, Homo sapiens
  MOD_RES (14)..(14): Selenocysteine
  MOD_RES (38)..(38): Selenocysteine
  MOD_RES (49)..(49): Selenocysteine
  MOD_RES (67)..(67): Selenocysteine
  MOD_RES (110)..(110): Selenocysteine
  MOD_RES (141)..(141): Selenocysteine
  MOD_RES (149)..(149): Selenocysteine
  MOD_RES (153)..(153): Selenocysteine
  MOD_RES (155)..(155): Selenocysteine
  MOD_RES (159)..(159): Selenocysteine
  MOD_RES (166)..(166): Selenocysteine
  MOD_RES (181)..(181): Selenocysteine
  MOD_RES (262)..(262): Selenocysteine
  MOD_RES (294)..(294): Selenocysteine
  MOD_RES (326)..(326): Selenocysteine
  MOD_RES (380)..(380): Selenocysteine
  MOD_RES (400)..(400): Selenocysteine
  MOD_RES (464)..(464): Selenocysteine
  MOD_RES (525)..(525): Selenocysteine
  MOD_RES (556)..(556): Selenocysteine
  MOD_RES (589)..(589): Selenocysteine
MGDYGFGVLVQSNXGNKSAFPVRFHPHLQPPHHHQNAXPSPAAFINNNXAANGSSAGSAWLFPAPAXHNIQDEILGSEKAKSQQQEQQDPLEKQQLSPSPGQEAGILPEXEKAKSEENQGDNSSENGNGKEKIRIESPVLXGFDYQEAXGLGXSXQPLXSSASSLXGFSNWSAAIAPSSSXIINEDASFFHQGGVPAASANNGALLFQNFPHHVSPGFGGSFSPQIGPLSQHHPHHPHFQHHHSQHQQQRRSPASPHPPPFXHRNAAFNQLPHLANNLNKPPSPWSSYQSPSPXPSSSWSPGGGGYGGWGGSQGRDHRRGLNGGIXPLNSISPLKKNFASNHIQLQKYARPSSAFAPKSWMEDSLNRADNIFPFPDRPRXFDMHSLESSLIDIMRAENDXIKGQSSLFPMEDGFLDDGRGDQPLHSGLGSPHCFSHQNGERVERYSRKVFVGGLPPDIDEDEIXASFRRFGPLIVDWPHKAESKSYFPPKGYAFLLFQDESSVQALIDACIEEDGKLYLCVSSPXIKDKPVQIRPWNLSDSDFVMDGSQPLDPRKXIFVGGVPRPLRAVELAMIMDRLYGGVCYAGIDXDPELKYPKGAGRVAFSNQQSYIAAISARFVQLQHGEIDKRVSLILHFGKF

SEQ ID NO: 6783 - protein, 704 aa, Homo sapiens
  MOD_RES (14)..(14): Selenocysteine
  MOD_RES (38)..(38): Selenocysteine
  MOD_RES (49)..(49): Selenocysteine
  MOD_RES (67)..(67): Selenocysteine
  MOD_RES (110)..(110): Selenocysteine
  MOD_RES (141)..(141): Selenocysteine
  MOD_RES (149)..(149): Selenocysteine
  MOD_RES (153)..(153): Selenocysteine
  MOD_RES (155)..(155): Selenocysteine
  MOD_RES (159)..(159): Selenocysteine
  MOD_RES (166)..(166): Selenocysteine
  MOD_RES (181)..(181): Selenocysteine
  MOD_RES (262)..(262): Selenocysteine
  MOD_RES (294)..(294): Selenocysteine
  MOD_RES (326)..(326): Selenocysteine
  MOD_RES (380)..(380): Selenocysteine
  MOD_RES (400)..(400): Selenocysteine
  MOD_RES (464)..(464): Selenocysteine
  MOD_RES (525)..(525): Selenocysteine
  MOD_RES (556)..(556): Selenocysteine
  MOD_RES (589)..(589): Selenocysteine
  MOD_RES (663)..(663): Selenocysteine
MGDYGFGVLVQSNXGNKSAFPVRFHPHLQPPHHHQNAXPSPAAFINNNXAANGSSAGSAWLFPAPAXHNIQDEILGSEKAKSQQQEQQDPLEKQQLSPSPGQEAGILPEXEKAKSEENQGDNSSENGNGKEKIRIESPVLXGFDYQEAXGLGXSXQPLXSSASSLXGFSNWSAAIAPSSSXIINEDASFFHQGGVPAASANNGALLFQNFPHHVSPGFGGSFSPQIGPLSQHHPHHPHFQHHHSQHQQQRRSPASPHPPPFXHRNAAFNQLPHLANNLNKPPSPWSSYQSPSPXPSSSWSPGGGGYGGWGGSQGRDHRRGLNGGIXPLNSISPLKKNFASNHIQLQKYARPSSAFAPKSWMEDSLNRADNIFPFPDRPRXFDMHSLESSLIDIMRAENDXIKGQSSLFPMEDGFLDDGRGDQPLHSGLGSPHCFSHQNGERVERYSRKVFVGGLPPDIDEDEIXASFRRFGPLIVDWPHKAESKSYFPPKGYAFLLFQDESSVQALIDACIEEDGKLYLCVSSPXIKDKPVQIRPWNLSDSDFVMDGSQPLDPRKXIFVGGVPRPLRAVELAMIMDRLYGGVCYAGIDXDPELKYPKGAGRVAFSNQQSYIAAISARFVQLQHGEIDKRVEVKPYVLDDQLCDECQGARCGGKFAPFFCANVXCLQYYCEYCWAAIHSRAGREFHKPLVKEGGDRPRHISFRWN

SEQ ID NO: 6784 - protein, 712 aa, Homo sapiens
  MOD_RES (14)..(14): Selenocysteine
  MOD_RES (38)..(38): Selenocysteine
  MOD_RES (49)..(49): Selenocysteine
  MOD_RES (67)..(67): Selenocysteine
  MOD_RES (110)..(110): Selenocysteine
  MOD_RES (141)..(141): Selenocysteine
  MOD_RES (149)..(149): Selenocysteine
  MOD_RES (153)..(153): Selenocysteine
  MOD_RES (155)..(155): Selenocysteine
  MOD_RES (159)..(159): Selenocysteine
  MOD_RES (166)..(166): Selenocysteine
  MOD_RES (181)..(181): Selenocysteine
  MOD_RES (262)..(262): Selenocysteine
  MOD_RES (294)..(294): Selenocysteine
  MOD_RES (326)..(326): Selenocysteine
  MOD_RES (380)..(380): Selenocysteine
  MOD_RES (400)..(400): Selenocysteine
  MOD_RES (405)..(405): Selenocysteine
  MOD_RES (472)..(472): Selenocysteine
  MOD_RES (533)..(533): Selenocysteine
  MOD_RES (564)..(564): Selenocysteine
  MOD_RES (597)..(597): Selenocysteine
  MOD_RES (671)..(671): Selenocysteine
MGDYGFGVLVQSNXGNKSAFPVRFHPHLQPPHHHQNAXPSPAAFINNNXAANGSSAGSAWLFPAPAXHNIQDEILGSEKAKSQQQEQQDPLEKQQLSPSPGQEAGILPEXEKAKSEENQGDNSSENGNGKEKIRIESPVLXGFDYQEAXGLGXSXQPLXSSASSLXGFSNWSAAIAPSSSXIINEDASFFHQGGVPAASANNGALLFQNFPHHVSPGFGGSFSPQIGPLSQHHPHHPHFQHHHSQHQQQRRSPASPHPPPFXHRNAAFNQLPHLANNLNKPPSPWSSYQSPSPXPSSSWSPGGGGYGGWGGSQGRDHRRGLNGGIXPLNSISPLKKNFASNHIQLQKYARPSSAFAPKSWMEDSLNRADNIFPFPDRPRXFDMHSLESSLIDIMRAENDXIKARXYGRRRGQSSLFPMEDGFLDDGRGDQPLHSGLGSPHCFSHQNGERVERYSRKVFVGGLPPDIDEDEIXASFRRFGPLIVDWPHKAESKSYFPPKGYAFLLFQDESSVQALIDACIEEDGKLYLCVSSPXIKDKPVQIRPWNLSDSDFVMDGSQPLDPRKXIFVGGVPRPLRAVELAMIMDRLYGGVCYAGIDXDPELKYPKGAGRVAFSNQQSYIAAISARFVQLQHGEIDKRVEVKPYVLDDQLCDECQGARCGGKFAPFFCANVXCLQYYCEYCWAAIHSRAGREFHKPLVKEGGDRPRHISFRWN

SEQ ID NO: 6785 - protein, 729 aa, Homo sapiens
  MOD_RES (14)..(14): Selenocysteine
  MOD_RES (38)..(38): Selenocysteine
  MOD_RES (49)..(49): Selenocysteine
  MOD_RES (67)..(67): Selenocysteine
  MOD_RES (110)..(110): Selenocysteine
  MOD_RES (141)..(141): Selenocysteine
  MOD_RES (149)..(149): Selenocysteine
  MOD_RES (153)..(153): Selenocysteine
  MOD_RES (155)..(155): Selenocysteine
  MOD_RES (159)..(159): Selenocysteine
  MOD_RES (166)..(166): Selenocysteine
  MOD_RES (181)..(181): Selenocysteine
  MOD_RES (262)..(262): Selenocysteine
  MOD_RES (294)..(294): Selenocysteine
  MOD_RES (326)..(326): Selenocysteine
  MOD_RES (380)..(380): Selenocysteine
  MOD_RES (400)..(400): Selenocysteine
  MOD_RES (422)..(422): Selenocysteine
  MOD_RES (489)..(489): Selenocysteine
  MOD_RES (550)..(550): Selenocysteine
  MOD_RES (581)..(581): Selenocysteine
  MOD_RES (614)..(614): Selenocysteine
  MOD_RES (688)..(688): Selenocysteine
MGDYGFGVLVQSNXGNKSAFPVRFHPHLQPPHHHQNAXPSPAAFINNNXAANGSSAGSAWLFPAPAXHNIQDEILGSEKAKSQQQEQQDPLEKQQLSPSPGQEAGILPEXEKAKSEENQGDNSSENGNGKEKIRIESPVLXGFDYQEAXGLGXSXQPLXSSASSLXGFSNWSAAIAPSSSXIINEDASFFHQGGVPAASANNGALLFQNFPHHVSPGFGGSFSPQIGPLSQHHPHHPHFQHHHSQHQQQRRSPASPHPPPFXHRNAAFNQLPHLANNLNKPPSPWSSYQSPSPXPSSSWSPGGGGYGGWGGSQGRDHRRGLNGGIXPLNSISPLKKNFASNHIQLQKYARPSSAFAPKSWMEDSLNRADNIFPFPDRPRXFDMHSLESSLIDIMRAENDXIKGRLNYSYPGSDSSLLINARXYGRRRGQSSLFPMEDGFLDDGRGDQPLHSGLGSPHCFSHQNGERVERYSRKVFVGGLPPDIDEDEIXASFRRFGPLIVDWPHKAESKSYFPPKGYAFLLFQDESSVQALIDACIEEDGKLYLCVSSPXIKDKPVQIRPWNLSDSDFVMDGSQPLDPRKXIFVGGVPRPLRAVELAMIMDRLYGGVCYAGIDXDPELKYPKGAGRVAFSNQQSYIAAISARFVQLQHGEIDKRVEVKPYVLDDQLCDECQGARCGGKFAPFFCANVXCLQYYCEYCWAAIHSRAGREFHKPLVKEGGDRPRHISFRWN

SEQ ID NO: 6786 - protein, 322 aa, Homo sapiens
  MOD_RES (18)..(18): Selenocysteine
  MOD_RES (82)..(82): Selenocysteine
  MOD_RES (143)..(143): Selenocysteine
  MOD_RES (174)..(174): Selenocysteine
  MOD_RES (207)..(207): Selenocysteine
  MOD_RES (281)..(281): Selenocysteine
MHSLESSLIDIMRAENDXIKGQSSLFPMEDGFLDDGRGDQPLHSGLGSPHCFSHQNGERVERYSRKVFVGGLPPDIDEDEIXASFRRFGPLIVDWPHKAESKSYFPPKGYAFLLFQDESSVQALIDACIEEDGKLYLCVSSPXIKDKPVQIRPWNLSDSDFVMDGSQPLDPRKXIFVGGVPRPLRAVELAMIMDRLYGGVCYAGIDXDPELKYPKGAGRVAFSNQQSYIAAISARFVQLQHGEIDKRVEVKPYVLDDQLCDECQGARCGGKFAPFFCANVXCLQYYCEYCWAAIHSRAGREFHKPLVKEGGDRPRHISFRWN

SEQ ID NO: 6787 - protein, 339 aa, Homo sapiens
  MOD_RES (18)..(18): Selenocysteine
  MOD_RES (99)..(99): Selenocysteine
  MOD_RES (160)..(160): Selenocysteine
  MOD_RES (191)..(191): Selenocysteine
  MOD_RES (224)..(224): Selenocysteine
  MOD_RES (298)..(298): Selenocysteine
MHSLESSLIDIMRAENDXIKGRLNYSYPGSDSSLLINGQSSLFPMEDGFLDDGRGDQPLHSGLGSPHCFSHQNGERVERYSRKVFVGGLPPDIDEDEIXASFRRFGPLIVDWPHKAESKSYFPPKGYAFLLFQDESSVQALIDACIEEDGKLYLCVSSPXIKDKPVQIRPWNLSDSDFVMDGSQPLDPRKXIFVGGVPRPLRAVELAMIMDRLYGGVCYAGIDXDPELKYPKGAGRVAFSNQQSYIAAISARFVQLQHGEIDKRVEVKPYVLDDQLCDECQGARCGGKFAPFFCANVXCLQYYCEYCWAAIHSRAGREFHKPLVKEGGDRPRHISFRWN

SEQ ID NO: 6788 - protein, 147 aa, Homo sapiens
  MOD_RES (1)..(1): Any amino acid
  MOD_RES (12)..(12): Selenocysteine
  MOD_RES (66)..(66): Selenocysteine
  MOD_RES (86)..(86): Selenocysteine
XDHRRGLNGGIXPLNSISPLKKNFASNHIQLQKYARPSSAFAPKSWMEDSLNRADNIFPFPDRPRXFDMHSLESSLIDIMRAENDXIKGRLNYSYPGSDSSLLINGQSSLFPMEDGFLDDGRGDQPLHSGLGSPHCFSHQNGERVER

SEQ ID NO: 6789 - protein, 67 aa, Homo sapiens
  MOD_RES (6)..(6): Selenocysteine
  MOD_RES (47)..(47): Selenocysteine
  MOD_RES (61)..(61): Selenocysteine
MAHCVXLVQLSISCDHLIDKDIGSKSDPLCVLLQDVGGGSWAELGRXERVRNCSSPEFSKXLQLEYR

SEQ ID NO: 6790 - protein, 138 aa, Homo sapiens
  MOD_RES (6)..(6): Selenocysteine
  MOD_RES (47)..(47): Selenocysteine
  MOD_RES (61)..(61): Selenocysteine
  MOD_RES (70)..(70): Selenocysteine
  MOD_RES (85)..(85): Selenocysteine
  MOD_RES (111)..(111): Selenocysteine
  MOD_RES (126)..(126): Selenocysteine
  MOD_RES (128)..(128): Selenocysteine
MAHCVXLVQLSISCDHLIDKDIGSKSDPLCVLLQDVGGGSWAELGRXERVRNCSSPEFSKXLQLEYRFEXVQKLRFGIYDIDNKXPELRDDDFLGGAECSLGQIVSSQVLXLPLMLKPGKPAGRGXIXDFLGKSDPFL

SEQ ID NO: 6791 - protein, 213 aa, Homo sapiens
  MOD_RES (6)..(6): Selenocysteine
  MOD_RES (47)..(47): Selenocysteine
  MOD_RES (61)..(61): Selenocysteine
  MOD_RES (70)..(70): Selenocysteine
  MOD_RES (85)..(85): Selenocysteine
  MOD_RES (111)..(111): Selenocysteine
  MOD_RES (126)..(126): Selenocysteine
  MOD_RES (128)..(128): Selenocysteine
  MOD_RES (164)..(164): Selenocysteine
  MOD_RES (182)..(182): Selenocysteine
  MOD_RES (202)..(202): Selenocysteine
  MOD_RES (205)..(205): Selenocysteine
MAHCVXLVQLSISCDHLIDKDIGSKSDPLCVLLQDVGGGSWAELGRXERVRNCSSPEFSKXLQLEYRFEXVQKLRFGIYDIDNKXPELRDDDFLGGAECSLGQIVSSQVLXLPLMLKPGKPAGRGXIXDFLGKSDPFLEFFRQGDGKWHLVYRSEVIKNNLNPXWKRFSVPVQHFCGGNPSXPIQVQCSDYDSDGSHDLIGXFHXSLAQLQAV

SEQ ID NO: 6792 - protein, 305 aa, Homo sapiens
  MOD_RES (6)..(6): Selenocysteine
  MOD_RES (47)..(47): Selenocysteine
  MOD_RES (61)..(61): Selenocysteine
  MOD_RES (70)..(70): Selenocysteine
  MOD_RES (85)..(85): Selenocysteine
  MOD_RES (111)..(111): Selenocysteine
  MOD_RES (126)..(126): Selenocysteine
  MOD_RES (128)..(128): Selenocysteine
  MOD_RES (164)..(164): Selenocysteine
  MOD_RES (182)..(182): Selenocysteine
  MOD_RES (202)..(202): Selenocysteine
  MOD_RES (205)..(205): Selenocysteine
  MOD_RES (236)..(236): Selenocysteine
  MOD_RES (246)..(246): Selenocysteine
  MOD_RES (263)..(263): Selenocysteine
  MOD_RES (269)..(269): Selenocysteine
  MOD_RES (287)..(287): Selenocysteine
MAHCVXLVQLSISCDHLIDKDIGSKSDPLCVLLQDVGGGSWAELGRXERVRNCSSPEFSKXLQLEYRFEXVQKLRFGIYDIDNKXPELRDDDFLGGAECSLGQIVSSQVLXLPLMLKPGKPAGRGXIXDFLGKSDPFLEFFRQGDGKWHLVYRSEVIKNNLNPXWKRFSVPVQHFCGGNPSXPIQVQCSDYDSDGSHDLIGXFHXSLAQLQAVPAEFECIHPEKQQKKKSYKNSGXIRVKICRVEXEYSFLDYVMGGCQINFXVGVDFXGSNGDPSSPDSLHYLSPXGVNEYLMALWSVGSVVQD

SEQ ID NO: 6793 - protein, 386 aa, Homo sapiens
  MOD_RES (6)..(6): Selenocysteine
  MOD_RES (47)..(47): Selenocysteine
  MOD_RES (61)..(61): Selenocysteine
  MOD_RES (70)..(70): Selenocysteine
  MOD_RES (85)..(85): Selenocysteine
  MOD_RES (111)..(111): Selenocysteine
  MOD_RES (126)..(126): Selenocysteine
  MOD_RES (128)..(128): Selenocysteine
  MOD_RES (164)..(164): Selenocysteine
  MOD_RES (182)..(182): Selenocysteine
  MOD_RES (202)..(202): Selenocysteine
  MOD_RES (205)..(205): Selenocysteine
  MOD_RES (236)..(236): Selenocysteine
  MOD_RES (246)..(246): Selenocysteine
  MOD_RES (263)..(263): Selenocysteine
  MOD_RES (269)..(269): Selenocysteine
  MOD_RES (287)..(287): Selenocysteine
  MOD_RES (365)..(365): Selenocysteine
  MOD_RES (386)..(386): Selenocysteine
MAHCVXLVQLSISCDHLIDKDIGSKSDPLCVLLQDVGGGSWAELGRXERVRNCSSPEFSKXLQLEYRFEXVQKLRFGIYDIDNKXPELRDDDFLGGAECSLGQIVSSQVLXLPLMLKPGKPAGRGXIXDFLGKSDPFLEFFRQGDGKWHLVYRSEVIKNNLNPXWKRFSVPVQHFCGGNPSXPIQVQCSDYDSDGSHDLIGXFHXSLAQLQAVPAEFECIHPEKQQKKKSYKNSGXIRVKICRVEXEYSFLDYVMGGCQINFXVGVDFXGSNGDPSSPDSLHYLSPXGVNEYLMALWSVGSVVQDYDSDKLFPAFGFGAQVPPDWQVSHEFALNFNPSNPYCAGIQGIVDAYRQALPQVRLYGPXNFAPIINHVARFAAQAAHQGX

SEQ ID NO: 6794 - protein, 138 aa, Homo sapiens
  MOD_RES (6)..(6): Selenocysteine
  MOD_RES (47)..(47): Selenocysteine
  MOD_RES (61)..(61): Selenocysteine
  MOD_RES (70)..(70): Selenocysteine
  MOD_RES (85)..(85): Selenocysteine
  MOD_RES (111)..(111): Selenocysteine
  MOD_RES (126)..(126): Selenocysteine
  MOD_RES (128)..(128): Selenocysteine
MAHCVXLVQLSISCDHLIDKDIGSKSDPLCVLLQDVGGGSWAELGRXERVRNCSSPEFSKXLQLEYRFEXVQKLRFGIYDIDNKXPELRDDDFLGGAECSLGQIVSSQVLXLPLMLKPGKPAGRGXIXSPLPRSQLRN

SEQ ID NO: 6795 - protein, 136 aa, Homo sapiens
  MOD_RES (6)..(6): Selenocysteine
  MOD_RES (47)..(47): Selenocysteine
  MOD_RES (61)..(61): Selenocysteine
  MOD_RES (70)..(70): Selenocysteine
  MOD_RES (85)..(85): Selenocysteine
  MOD_RES (111)..(111): Selenocysteine
  MOD_RES (126)..(126): Selenocysteine
  MOD_RES (128)..(128): Selenocysteine
MAHCVXLVQLSISCDHLIDKDIGSKSDPLCVLLQDVGGGSWAELGRXERVRNCSSPEFSKXLQLEYRFEXVQKLRFGIYDIDNKXPELRDDDFLGGAECSLGQIVSSQVLXLPLMLKPGKPAGRGXIXVSAQELKD

SEQ ID NO: 6796 - protein, 152 aa, Homo sapiens
  MOD_RES (6)..(6): Selenocysteine
  MOD_RES (47)..(47): Selenocysteine
  MOD_RES (61)..(61): Selenocysteine
  MOD_RES (70)..(70): Selenocysteine
  MOD_RES (85)..(85): Selenocysteine
  MOD_RES (111)..(111): Selenocysteine
  MOD_RES (126)..(126): Selenocysteine
  MOD_RES (128)..(128): Selenocysteine
  MOD_RES (141)..(141): Selenocysteine
MAHCVXLVQLSISCDHLIDKDIGSKSDPLCVLLQDVGGGSWAELGRXERVRNCSSPEFSKXLQLEYRFEXVQKLRFGIYDIDNKXPELRDDDFLGGAECSLGQIVSSQVLXLPLMLKPGKPAGRGXIXVSAQELKDNRVVXMEVEARNLDKK

SEQ ID NO: 6797 - protein, 174 aa, Homo sapiens
  MOD_RES (6)..(6): Selenocysteine
  MOD_RES (47)..(47): Selenocysteine
  MOD_RES (61)..(61): Selenocysteine
  MOD_RES (70)..(70): Selenocysteine
  MOD_RES (85)..(85): Selenocysteine
  MOD_RES (111)..(111): Selenocysteine
  MOD_RES (126)..(126): Selenocysteine
  MOD_RES (128)..(128): Selenocysteine
  MOD_RES (141)..(141): Selenocysteine
MAHCVXLVQLSISCDHLIDKDIGSKSDPLCVLLQDVGGGSWAELGRXERVRNCSSPEFSKXLQLEYRFEXVQKLRFGIYDIDNKXPELRDDDFLGGAECSLGQIVSSQVLXLPLMLKPGKPAGRGXIXVSAQELKDNRVVXMEVEARNLDKKDFLGKSDPFLEFFRQGDGKWHL

SEQ ID NO: 6798 - protein, 202 aa, Homo sapiens
  MOD_RES (6)..(6): Selenocysteine
  MOD_RES (47)..(47): Selenocysteine
  MOD_RES (61)..(61): Selenocysteine
  MOD_RES (70)..(70): Selenocysteine
  MOD_RES (85)..(85): Selenocysteine
  MOD_RES (111)..(111): Selenocysteine
  MOD_RES (126)..(126): Selenocysteine
  MOD_RES (128)..(128): Selenocysteine
  MOD_RES (141)..(141): Selenocysteine
  MOD_RES (188)..(188): Selenocysteine
MAHCVXLVQLSISCDHLIDKDIGSKSDPLCVLLQDVGGGSWAELGRXERVRNCSSPEFSKXLQLEYRFEXVQKLRFGIYDIDNKXPELRDDDFLGGAECSLGQIVSSQVLXLPLMLKPGKPAGRGXIXVSAQELKDNRVVXMEVEARNLDKKDFLGKSDPFLEFFRQGDGKWHLVYRSEVIKNNLNPXWKRFSVPVQHFCGG

SEQ ID NO: 6799 - protein, 209 aa, Homo sapiens
  MOD_RES (6)..(6): Selenocysteine
  MOD_RES (47)..(47): Selenocysteine
  MOD_RES (61)..(61): Selenocysteine
  MOD_RES (70)..(70): Selenocysteine
  MOD_RES (85)..(85): Selenocysteine
  MOD_RES (111)..(111): Selenocysteine
  MOD_RES (126)..(126): Selenocysteine
  MOD_RES (128)..(128): Selenocysteine
  MOD_RES (141)..(141): Selenocysteine
  MOD_RES (188)..(188): Selenocysteine
  MOD_RES (206)..(206): Selenocysteine
MAHCVXLVQLSISCDHLIDKDIGSKSDPLCVLLQDVGGGSWAELGRXERVRNCSSPEFSKXLQLEYRFEXVQKLRFGIYDIDNKXPELRDDDFLGGAECSLGQIVSSQVLXLPLMLKPGKPAGRGXIXVSAQELKDNRVVXMEVEARNLDKKDFLGKSDPFLEFFRQGDGKWHLVYRSEVIKNNLNPXWKRFSVPVQHFCGGNPSXPIQ

SEQ ID NO: 6800 - protein, 231 aa, Homo sapiens
  MOD_RES (6)..(6): Selenocysteine
  MOD_RES (47)..(47): Selenocysteine
  MOD_RES (61)..(61): Selenocysteine
  MOD_RES (70)..(70): Selenocysteine
  MOD_RES (85)..(85): Selenocysteine
  MOD_RES (111)..(111): Selenocysteine
  MOD_RES (126)..(126): Selenocysteine
  MOD_RES (128)..(128): Selenocysteine
  MOD_RES (141)..(141): Selenocysteine
  MOD_RES (188)..(188): Selenocysteine
  MOD_RES (206)..(206): Selenocysteine
  MOD_RES (226)..(226): Selenocysteine
  MOD_RES (229)..(229): Selenocysteine
MAHCVXLVQLSISCDHLIDKDIGSKSDPLCVLLQDVGGGSWAELGRXERVRNCSSPEFSKXLQLEYRFEXVQKLRFGIYDIDNKXPELRDDDFLGGAECSLGQIVSSQVLXLPLMLKPGKPAGRGXIXVSAQELKDNRVVXMEVEARNLDKKDFLGKSDPFLEFFRQGDGKWHLVYRSEVIKNNLNPXWKRFSVPVQHFCGGNPSXPIQVQCSDYDSDGSHDLIGXFHXSL

SEQ ID NO: 6801 - protein, 304 aa, Homo sapiens
  MOD_RES (6)..(6): Selenocysteine
  MOD_RES (47)..(47): Selenocysteine
  MOD_RES (61)..(61): Selenocysteine
  MOD_RES (70)..(70): Selenocysteine
  MOD_RES (85)..(85): Selenocysteine
  MOD_RES (111)..(111): Selenocysteine
  MOD_RES (126)..(126): Selenocysteine
  MOD_RES (128)..(128): Selenocysteine
  MOD_RES (141)..(141): Selenocysteine
  MOD_RES (188)..(188): Selenocysteine
  MOD_RES (206)..(206): Selenocysteine
  MOD_RES (226)..(226): Selenocysteine
  MOD_RES (229)..(229): Selenocysteine
  MOD_RES (260)..(260): Selenocysteine
  MOD_RES (270)..(270): Selenocysteine
  MOD_RES (287)..(287): Selenocysteine
  MOD_RES (293)..(293): Selenocysteine
MAHCVXLVQLSISCDHLIDKDIGSKSDPLCVLLQDVGGGSWAELGRXERVRNCSSPEFSKXLQLEYRFEXVQKLRFGIYDIDNKXPELRDDDFLGGAECSLGQIVSSQVLXLPLMLKPGKPAGRGXIXVSAQELKDNRVVXMEVEARNLDKKDFLGKSDPFLEFFRQGDGKWHLVYRSEVIKNNLNPXWKRFSVPVQHFCGGNPSXPIQVQCSDYDSDGSHDLIGXFHXSLAQLQAVPAEFECIHPEKQQKKKSYKNSGXIRVKICRVEXEYSFLDYVMGGCQINFXVGVDFXGSNGDPSSPDS

SEQ ID NO: 6802 - protein, 427 aa, Homo sapiens
  MOD_RES (6)..(6): Selenocysteine
  MOD_RES (47)..(47): Selenocysteine
  MOD_RES (61)..(61): Selenocysteine
  MOD_RES (70)..(70): Selenocysteine
  MOD_RES (85)..(85): Selenocysteine
  MOD_RES (111)..(111): Selenocysteine
  MOD_RES (126)..(126): Selenocysteine
  MOD_RES (128)..(128): Selenocysteine
  MOD_RES (141)..(141): Selenocysteine
  MOD_RES (188)..(188): Selenocysteine
  MOD_RES (206)..(206): Selenocysteine
  MOD_RES (226)..(226): Selenocysteine
  MOD_RES (229)..(229): Selenocysteine
  MOD_RES (260)..(260): Selenocysteine
  MOD_RES (270)..(270): Selenocysteine
  MOD_RES (287)..(287): Selenocysteine
  MOD_RES (293)..(293): Selenocysteine
  MOD_RES (311)..(311): Selenocysteine
  MOD_RES (389)..(389): Selenocysteine
  MOD_RES (410)..(410): Selenocysteine
  MOD_RES (422)..(422): Selenocysteine
MAHCVXLVQLSISCDHLIDKDIGSKSDPLCVLLQDVGGGSWAELGRXERVRNCSSPEFSKXLQLEYRFEXVQKLRFGIYDIDNKXPELRDDDFLGGAECSLGQIVSSQVLXLPLMLKPGKPAGRGXIXVSAQELKDNRVVXMEVEARNLDKKDFLGKSDPFLEFFRQGDGKWHLVYRSEVIKNNLNPXWKRFSVPVQHFCGGNPSXPIQVQCSDYDSDGSHDLIGXFHXSLAQLQAVPAEFECIHPEKQQKKKSYKNSGXIRVKICRVEXEYSFLDYVMGGCQINFXVGVDFXGSNGDPSSPDSLHYLSPXGVNEYLMALWSVGSVVQDYDSDKLFPAFGFGAQVPPDWQVSHEFALNFNPSNPYCAGIQGIVDAYRQALPQVRLYGPXNFAPIINHVARFAAQAAHQGXASDMNGLVPSNXSCCCC

SEQ ID NO: 6803 - protein, 481 aa, Homo sapiens
  MOD_RES (6)..(6): Selenocysteine
  MOD_RES (47)..(47): Selenocysteine
  MOD_RES (61)..(61): Selenocysteine
  MOD_RES (70)..(70): Selenocysteine
  MOD_RES (85)..(85): Selenocysteine
  MOD_RES (111)..(111): Selenocysteine
  MOD_RES (126)..(126): Selenocysteine
  MOD_RES (128)..(128): Selenocysteine
  MOD_RES (141)..(141): Selenocysteine
  MOD_RES (188)..(188): Selenocysteine
  MOD_RES (206)..(206): Selenocysteine
  MOD_RES (226)..(226): Selenocysteine
  MOD_RES (229)..(229): Selenocysteine
  MOD_RES (260)..(260): Selenocysteine
  MOD_RES (270)..(270): Selenocysteine
  MOD_RES (287)..(287): Selenocysteine
  MOD_RES (293)..(293): Selenocysteine
  MOD_RES (311)..(311): Selenocysteine
  MOD_RES (389)..(389): Selenocysteine
  MOD_RES (410)..(410): Selenocysteine
  MOD_RES (421)..(421): Selenocysteine
  MOD_RES (426)..(426): Selenocysteine
  MOD_RES (431)..(431): Selenocysteine
  MOD_RES (444)..(444): Selenocysteine
  MOD_RES (451)..(451): Selenocysteine
MAHCVXLVQLSISCDHLIDKDIGSKSDPLCVLLQDVGGGSWAELGRXERVRNCSSPEFSKXLQLEYRFEXVQKLRFGIYDIDNKXPELRDDDFLGGAECSLGQIVSSQVLXLPLMLKPGKPAGRGXIXVSAQELKDNRVVXMEVEARNLDKKDFLGKSDPFLEFFRQGDGKWHLVYRSEVIKNNLNPXWKRFSVPVQHFCGGNPSXPIQVQCSDYDSDGSHDLIGXFHXSLAQLQAVPAEFECIHPEKQQKKKSYKNSGXIRVKICRVEXEYSFLDYVMGGCQINFXVGVDFXGSNGDPSSPDSLHYLSPXGVNEYLMALWSVGSVVQDYDSDKLFPAFGFGAQVPPDWQVSHEFALNFNPSNPYCAGIQGIVDAYRQALPQVRLYGPXNFAPIINHVARFAAQAAHQGXASQYFMLLLLXDGAVXDVEAXREAVAPREALAQXVLAEVPXQLVSYFRAQGWAPLKPLPPSAKDPAQAPQA

SEQ ID NO: 6804 - protein, 533 aa, Homo sapiens
  MOD_RES (6)..(6): Selenocysteine
  MOD_RES (47)..(47): Selenocysteine
  MOD_RES (61)..(61): Selenocysteine
  MOD_RES (70)..(70): Selenocysteine
  MOD_RES (85)..(85): Selenocysteine
  MOD_RES (111)..(111): Selenocysteine
  MOD_RES (126)..(126): Selenocysteine
  MOD_RES (128)..(128): Selenocysteine
  MOD_RES (141)..(141): Selenocysteine
  MOD_RES (188)..(188): Selenocysteine
  MOD_RES (206)..(206): Selenocysteine
  MOD_RES (226)..(226): Selenocysteine
  MOD_RES (229)..(229): Selenocysteine
  MOD_RES (260)..(260): Selenocysteine
  MOD_RES (270)..(270): Selenocysteine
  MOD_RES (287)..(287): Selenocysteine
  MOD_RES (293)..(293): Selenocysteine
  MOD_RES (311)..(311): Selenocysteine
  MOD_RES (389)..(389): Selenocysteine
  MOD_RES (410)..(410): Selenocysteine
  MOD_RES (420)..(420): Selenocysteine
  MOD_RES (425)..(425): Selenocysteine
  MOD_RES (430)..(430): Selenocysteine
  MOD_RES (469)..(469): Selenocysteine
  MOD_RES (499)..(499): Selenocysteine
  MOD_RES (506)..(506): Selenocysteine
MAHCVXLVQLSISCDHLIDKDIGSKSDPLCVLLQDVGGGSWAELGRXERVRNCSSPEFSKXLQLEYRFEXVQKLRFGIYDIDNKXPELRDDDFLGGAECSLGQIVSSQVLXLPLMLKPGKPAGRGXIXVSAQELKDNRVVXMEVEARNLDKKDFLGKSDPFLEFFRQGDGKWHLVYRSEVIKNNLNPXWKRFSVPVQHFCGGNPSXPIQVQCSDYDSDGSHDLIGXFHXSLAQLQAVPAEFECIHPEKQQKKKSYKNSGXIRVKICRVEXEYSFLDYVMGGCQINFXVGVDFXGSNGDPSSPDSLHYLSPXGVNEYLMALWSVGSVVQDYDSDKLFPAFGFGAQVPPDWQVSHEFALNFNPSNPYCAGIQGIVDAYRQALPQVRLYGPXNFAPIINHVARFAAQAAHQGXASYFMLLLLXDGAVXDVEAXREAVVRASNLPMSVIIVGVGGADFEAMEQLDADGGPLHXRSGQAAARDIVQFVPYRRFQNAPREALAQXVLAEVPXQLVSYFRAQGWAPLKPLPPSAKDPAQA

SEQ ID NO: 6805 - protein, 537 aa, Homo sapiens
  MOD_RES (6)..(6): Selenocysteine
  MOD_RES (47)..(47): Selenocysteine
  MOD_RES (61)..(61): Selenocysteine
  MOD_RES (70)..(70): Selenocysteine
  MOD_RES (85)..(85): Selenocysteine
  MOD_RES (111)..(111): Selenocysteine
  MOD_RES (126)..(126): Selenocysteine
  MOD_RES (128)..(128): Selenocysteine
  MOD_RES (141)..(141): Selenocysteine
  MOD_RES (188)..(188): Selenocysteine
  MOD_RES (206)..(206): Selenocysteine
  MOD_RES (226)..(226): Selenocysteine
  MOD_RES (229)..(229): Selenocysteine
  MOD_RES (260)..(260): Selenocysteine
  MOD_RES (270)..(270): Selenocysteine
  MOD_RES (287)..(287): Selenocysteine
  MOD_RES (293)..(293): Selenocysteine
  MOD_RES (311)..(311): Selenocysteine
  MOD_RES (389)..(389): Selenocysteine
  MOD_RES (410)..(410): Selenocysteine
  MOD_RES (421)..(421): Selenocysteine
  MOD_RES (426)..(426): Selenocysteine
  MOD_RES (431)..(431): Selenocysteine
  MOD_RES (470)..(470): Selenocysteine
  MOD_RES (500)..(500): Selenocysteine
  MOD_RES (507)..(507): Selenocysteine
MAHCVXLVQLSISCDHLIDKDIGSKSDPLCVLLQDVGGGSWAELGRXERVRNCSSPEFSKXLQLEYRFEXVQKLRFGIYDIDNKXPELRDDDFLGGAECSLGQIVSSQVLXLPLMLKPGKPAGRGXIXVSAQELKDNRVVXMEVEARNLDKKDFLGKSDPFLEFFRQGDGKWHLVYRSEVIKNNLNPXWKRFSVPVQHFCGGNPSXPIQVQCSDYDSDGSHDLIGXFHXSLAQLQAVPAEFECIHPEKQQKKKSYKNSGXIRVKICRVEXEYSFLDYVMGGCQINFXVGVDFXGSNGDPSSPDSLHYLSPXGVNEYLMALWSVGSVVQDYDSDKLFPAFGFGAQVPPDWQVSHEFALNFNPSNPYCAGIQGIVDAYRQALPQVRLYGPXNFAPIINHVARFAAQAAHQGXASQYFMLLLLXDGAVXDVEAXREAVVRASNLPMSVIIVGVGGADFEAMEQLDADGGPLHXRSGQAAARDIVQFVPYRRFQNAPREALAQXVLAEVPXQLVSYFRAQGWAPLKPLPPSAKDPAQAPQA

SEQ ID NO: 6806 - protein, 542 aa, Homo sapiens
  MOD_RES (11)..(11): Selenocysteine
  MOD_RES (52)..(52): Selenocysteine
  MOD_RES (66)..(66): Selenocysteine
  MOD_RES (75)..(75): Selenocysteine
  MOD_RES (90)..(90): Selenocysteine
  MOD_RES (116)..(116): Selenocysteine
  MOD_RES (131)..(131): Selenocysteine
  MOD_RES (133)..(133): Selenocysteine
  MOD_RES (146)..(146): Selenocysteine
  MOD_RES (193)..(193): Selenocysteine
  MOD_RES (211)..(211): Selenocysteine
  MOD_RES (231)..(231): Selenocysteine
  MOD_RES (234)..(234): Selenocysteine
  MOD_RES (265)..(265): Selenocysteine
  MOD_RES (275)..(275): Selenocysteine
  MOD_RES (292)..(292): Selenocysteine
  MOD_RES (298)..(298): Selenocysteine
  MOD_RES (316)..(316): Selenocysteine
  MOD_RES (394)..(394): Selenocysteine
  MOD_RES (415)..(415): Selenocysteine
  MOD_RES (426)..(426): Selenocysteine
  MOD_RES (431)..(431): Selenocysteine
  MOD_RES (436)..(436): Selenocysteine
  MOD_RES (475)..(475): Selenocysteine
  MOD_RES (505)..(505): Selenocysteine
  MOD_RES (512)..(512): Selenocysteine
MKMMHMAHCVXLVQLSISCDHLIDKDIGSKSDPLCVLLQDVGGGSWAELGRXERVRNCSSPEFSKXLQLEYRFEXVQKLRFGIYDIDNKXPELRDDDFLGGAECSLGQIVSSQVLXLPLMLKPGKPAGRGXIXVSAQELKDNRVVXMEVEARNLDKKDFLGKSDPFLEFFRQGDGKWHLVYRSEVIKNNLNPXWKRFSVPVQHFCGGNPSXPIQVQCSDYDSDGSHDLIGXFHXSLAQLQAVPAEFECIHPEKQQKKKSYKNSGXIRVKICRVEXEYSFLDYVMGGCQINFXVGVDFXGSNGDPSSPDSLHYLSPXGVNEYLMALWSVGSVVQDYDSDKLFPAFGFGAQVPPDWQVSHEFALNFNPSNPYCAGIQGIVDAYRQALPQVRLYGPXNFAPIINHVARFAAQAAHQGXASQYFMLLLLXDGAVXDVEAXREAVVRASNLPMSVIIVGVGGADFEAMEQLDADGGPLHXRSGQAAARDIVQFVPYRRFQNAPREALAQXVLAEVPXQLVSYFRAQGWAPLKPLPPSAKDPAQAPQA

SEQ ID NO: 6807 - protein, 208 aa, Homo sapiens
  MOD_RES (1)..(1): Any amino acid
  MOD_RES (28)..(28): Selenocysteine
  MOD_RES (49)..(49): Selenocysteine
  MOD_RES (60)..(60): Selenocysteine
  MOD_RES (65)..(65): Selenocysteine
  MOD_RES (70)..(70): Selenocysteine
  MOD_RES (109)..(109): Selenocysteine
  MOD_RES (139)..(139): Selenocysteine
  MOD_RES (148)..(149): Selenocysteine
  MOD_RES (164)..(164): Selenocysteine
  MOD_RES (166)..(166): Selenocysteine
  MOD_RES (173)..(173): Selenocysteine
XNPYCAGIQGIVDAYRQALPQVRLYGPXNFAPIINHVARFAAQAAHQGXASQYFMLLLLXDGAVXDVEAXREAVVRASNLPMSVIIVGVGGADFEAMEQLDADGGPLHXRSGQAAARDIVQFVPYRRFQNVSPSGGIGXDRARRSAHXXGLILQGPGLGPAQAXSXLSQGSCXGPPGLGSLGGCGKSSILCPRGPSGPQPNPSHSPQC

SEQ ID NO: 6808 - protein, 9 aa, Homo sapiens
  MOD_RES (7)..(7): Selenocysteine
MAAQCVXKV

SEQ ID NO: 6809 - protein, 79 aa, Homo sapiens
  MOD_RES (7)..(7): Selenocysteine
  MOD_RES (37)..(37): Selenocysteine
  MOD_RES (48)..(48): Selenocysteine
  MOD_RES (62)..(62): Selenocysteine
MAAQCVXKVALNVSCANLLDKDIGSKSDPLCVLFLNXSGQQWYEVERXERIKNCLNPQFSKXFIIDYYFEVVQKLKFGV

SEQ ID NO: 6810 - protein, 135 aa, Homo sapiens
  MOD_RES (7)..(7): Selenocysteine
  MOD_RES (37)..(37): Selenocysteine
  MOD_RES (48)..(48): Selenocysteine
  MOD_RES (62)..(62): Selenocysteine
  MOD_RES (86)..(86): Selenocysteine
  MOD_RES (101)..(101): Selenocysteine
  MOD_RES (112)..(112): Selenocysteine
  MOD_RES (119)..(119): Selenocysteine
  MOD_RES (129)..(129): Selenocysteine
MAAQCVXKVALNVSCANLLDKDIGSKSDPLCVLFLNXSGQQWYEVERXERIKNCLNPQFSKXFIIDYYFEVVQKLKFGVYDIDNKXIELSDDDFLGECECXLGQIVSSKKLXRPLVMKXGRPAGKGSIXISAEEI

SEQ ID NO: 6811 - protein, 139 aa, Homo sapiens
  MOD_RES (7)..(7): Selenocysteine
  MOD_RES (37)..(37): Selenocysteine
  MOD_RES (48)..(48): Selenocysteine
  MOD_RES (62)..(62): Selenocysteine
  MOD_RES (86)..(86): Selenocysteine
  MOD_RES (101)..(101): Selenocysteine
  MOD_RES (112)..(112): Selenocysteine
  MOD_RES (119)..(119): Selenocysteine
  MOD_RES (129)..(129): Selenocysteine
MAAQCVXKVALNVSCANLLDKDIGSKSDPLCVLFLNXSGQQWYEVERXERIKNCLNPQFSKXFIIDYYFEVVQKLKFGVYDIDNKXIELSDDDFLGECECXLGQIVSSKKLXRPLVMKXGRPAGKGSIXISAEEIKDNR

SEQ ID NO: 6812 - protein, 153 aa, Homo sapiens
  MOD_RES (7)..(7): Selenocysteine
  MOD_RES (37)..(37): Selenocysteine
  MOD_RES (48)..(48): Selenocysteine
  MOD_RES (62)..(62): Selenocysteine
  MOD_RES (86)..(86): Selenocysteine
  MOD_RES (101)..(101): Selenocysteine
  MOD_RES (112)..(112): Selenocysteine
  MOD_RES (119)..(119): Selenocysteine
  MOD_RES (129)..(129): Selenocysteine
MAAQCVXKVALNVSCANLLDKDIGSKSDPLCVLFLNXSGQQWYEVERXERIKNCLNPQFSKXFIIDYYFEVVQKLKFGVYDIDNKXIELSDDDFLGECECXLGQIVSSKKLXRPLVMKXGRPAGKGSIXISAEEIKDNRVVLFEMEARKLDNK

SEQ ID NO: 6813 - protein, 234 aa, Homo sapiens
  MOD_RES (7)..(7): Selenocysteine
  MOD_RES (37)..(37): Selenocysteine
  MOD_RES (48)..(48): Selenocysteine
  MOD_RES (62)..(62): Selenocysteine
  MOD_RES (86)..(86): Selenocysteine
  MOD_RES (101)..(101): Selenocysteine
  MOD_RES (112)..(112): Selenocysteine
  MOD_RES (119)..(119): Selenocysteine
  MOD_RES (129)..(129): Selenocysteine
  MOD_RES (169)..(169): Selenocysteine
  MOD_RES (180)..(180): Selenocysteine
  MOD_RES (209)..(209): Selenocysteine
  MOD_RES (228)..(228): Selenocysteine
  MOD_RES (231)..(232): Selenocysteine
  MOD_RES (234)..(234): Selenocysteine
MAAQCVXKVALNVSCANLLDKDIGSKSDPLCVLFLNXSGQQWYEVERXERIKNCLNPQFSKXFIIDYYFEVVQKLKFGVYDIDNKXIELSDDDFLGECECXLGQIVSSKKLXRPLVMKXGRPAGKGSIXISAEEIKDNRVVLFEMEARKLDNKDLFGKSDPYLEFHKQXSDGNWLMVHRXEVVKNNLNPVWRPFKISLNSLCYGDMDKXIKVECYDYDNDGSHDLIGXFQXXMX

SEQ ID NO: 6814 - protein, 537 aa, Homo sapiens
  MOD_RES (7)..(7): Selenocysteine
  MOD_RES (37)..(37): Selenocysteine
  MOD_RES (48)..(48): Selenocysteine
  MOD_RES (62)..(62): Selenocysteine
  MOD_RES (86)..(86): Selenocysteine
  MOD_RES (101)..(101): Selenocysteine
  MOD_RES (112)..(112): Selenocysteine
  MOD_RES (119)..(119): Selenocysteine
  MOD_RES (129)..(129): Selenocysteine
  MOD_RES (169)..(169): Selenocysteine
  MOD_RES (180)..(180): Selenocysteine
  MOD_RES (209)..(209): Selenocysteine
  MOD_RES (228)..(228): Selenocysteine
  MOD_RES (231)..(232): Selenocysteine
  MOD_RES (234)..(234): Selenocysteine
  MOD_RES (275)..(275): Selenocysteine
  MOD_RES (279)..(279): Selenocysteine
  MOD_RES (293)..(293): Selenocysteine
  MOD_RES (299)..(299): Selenocysteine
  MOD_RES (324)..(324): Selenocysteine
  MOD_RES (395)..(395): Selenocysteine
  MOD_RES (412)..(412): Selenocysteine
  MOD_RES (416)..(416): Selenocysteine
  MOD_RES (427)..(427): Selenocysteine
  MOD_RES (432)..(432): Selenocysteine
  MOD_RES (437)..(437): Selenocysteine
  MOD_RES (521)..(521): Selenocysteine
  MOD_RES (532)..(532): Selenocysteine
MAAQCVXKVALNVSCANLLDKDIGSKSDPLCVLFLNXSGQQWYEVERXERIKNCLNPQFSKXFIIDYYFEVVQKLKFGVYDIDNKXIELSDDDFLGECECXLGQIVSSKKLXRPLVMKXGRPAGKGSIXISAEEIKDNRVVLFEMEARKLDNKDLFGKSDPYLEFHKQXSDGNWLMVHRXEVVKNNLNPVWRPFKISLNSLCYGDMDKXIKVECYDYDNDGSHDLIGXFQXXMXKLKEASRSSPVEFECINEKKRQKKKSYKNSGVISVKQCEIXVECXFLDYIMGGCQLNFXVGVDFXGSNGDPRSPDSLHYISPNGVNEYLXALWSVGLVIQDYDADKMFPAFGFGAQIPPQWQVSHEFPMNFNPSNPYCNGIQGIVEAYRSCLPQIKLYGPXNFSPIINHVARFAAAAXQQQXASQYFVLLIIXDGVIXDLDEXRQAIVNASRLPMSIIIVGVGGADFSAMEFLDGDGGSLRSPLGEVAIRDIVQFVPFRQFQNAPKEALAQCVLAEIPQQVVGYFNXYKLLPPKNPAXKQQKQ

SEQ ID NO: 6815 - protein, 262 aa, Homo sapiens
  MOD_RES (1)..(1): Any amino acid
  MOD_RES (3)..(3): Selenocysteine
  MOD_RES (18)..(18): Selenocysteine
  MOD_RES (29)..(29): Selenocysteine
  MOD_RES (36)..(36): Selenocysteine
  MOD_RES (46)..(46): Selenocysteine
  MOD_RES (98)..(98): Selenocysteine
  MOD_RES (117)..(117): Selenocysteine
  MOD_RES (120)..(121): Selenocysteine
  MOD_RES (123)..(123): Selenocysteine
  MOD_RES (164)..(164): Selenocysteine
  MOD_RES (168)..(168): Selenocysteine
  MOD_RES (182)..(182): Selenocysteine
  MOD_RES (188)..(188): Selenocysteine
  MOD_RES (213)..(213): Selenocysteine
XKXIELSDDDFLGECECXLGQIVSSKKLXRPLVMKXGRPAGKGSIXISAEEIKDNRVVLFEMEARKLDNKVVKNNLNPVWRPFKISLNSLCYGDMDKXIKVECYDYDNDGSHDLIGXFQXXMXKLKEASRSSPVEFECINEKKRQKKKSYKNSGVISVKQCEIXVECXFLDYIMGGCQLNFXVGVDFXGSNGDPRSPDSLHYISPNGVNEYLXALWSVGLVIQDYDADKMFPAFGFGAQIPPQWQVSHEFPMNFNPSNPYCN

SEQ ID NO: 6816 - protein, 515 aa, Homo sapiens
  MOD_RES (14)..(14): Selenocysteine
  MOD_RES (44)..(44): Selenocysteine
  MOD_RES (63)..(63): Selenocysteine
  MOD_RES (73)..(73): Selenocysteine
  MOD_RES (145)..(146): Selenocysteine
  MOD_RES (173)..(173): Selenocysteine
  MOD_RES (192)..(192): Selenocysteine
  MOD_RES (201)..(201): Selenocysteine
  MOD_RES (224)..(224): Selenocysteine
  MOD_RES (233)..(233): Selenocysteine
  MOD_RES (268)..(268): Selenocysteine
  MOD_RES (316)..(316): Selenocysteine
  MOD_RES (327)..(327): Selenocysteine
  MOD_RES (333)..(333): Selenocysteine
  MOD_RES (364)..(364): Selenocysteine
  MOD_RES (374)..(374): Selenocysteine
  MOD_RES (396)..(397): Selenocysteine
  MOD_RES (461)..(461): Selenocysteine
  MOD_RES (477)..(477): Selenocysteine
  MOD_RES (502)..(502): Selenocysteine
  MOD_RES (506)..(506): Selenocysteine
MAWPYFLDCHRYFXREDEGCYDPLEKLRGGLEADEALPSGLPPXFIRFSHHSYAQMVRVLRRXASRCAHVARXYSIGRSFDGRELLVIEFSSRPGQHELMEPEVKLIGNIHGNEVAGREMLIYLAQYLCSEYLLGNPRIQRLLNXXRIHLLPSMNPDGYEVAAAEGAGYNGWXSGRQNAQNLDLNRNFPDLXSEYYRLAEXRGARSDHIPIPQHYWWGKVAPEXKAIMKWMQXIPFVLSASLHGGDLVVSYPFDFSKHPQEEKMFSPXPDEKMFKLLSRAYADVHPMMMDRSENRCGGNFLKRGSIINGADWYSFXGGMSDFNYLHXNCFEIXVELGCVKFPPEEALYILWQHNKESLLNFVEXVHRGIKGVVXDKFGKPVKNARISVKGIRHDIXXAPDGDYWRLLPPGIHIVIAQAPGYAKVIKKVIIPARMKRAGRVDFILQPLGMGPKNFIHGLRRXGPHDPLGGASSLGEAXEPDPLRARRQPSADGSKPWWWSYFXSLSXHRPRWLLKY

SEQ ID NO: 6817 - protein, 641 aa, Homo sapiens
  MOD_RES (11)..(11): Selenocysteine
  MOD_RES (31)..(31): Selenocysteine
  MOD_RES (39)..(39): Selenocysteine
  MOD_RES (48)..(49): Selenocysteine
  MOD_RES (140)..(140): Selenocysteine
  MOD_RES (170)..(170): Selenocysteine
  MOD_RES (189)..(189): Selenocysteine
  MOD_RES (199)..(199): Selenocysteine
  MOD_RES (271)..(272): Selenocysteine
  MOD_RES (299)..(299): Selenocysteine
  MOD_RES (318)..(318): Selenocysteine
  MOD_RES (327)..(327): Selenocysteine
  MOD_RES (350)..(350): Selenocysteine
  MOD_RES (359)..(359): Selenocysteine
  MOD_RES (394)..(394): Selenocysteine
  MOD_RES (442)..(442): Selenocysteine
  MOD_RES (453)..(453): Selenocysteine
  MOD_RES (459)..(459): Selenocysteine
  MOD_RES (490)..(490): Selenocysteine
  MOD_RES (500)..(500): Selenocysteine
  MOD_RES (522)..(523): Selenocysteine
  MOD_RES (587)..(587): Selenocysteine
  MOD_RES (603)..(603): Selenocysteine
  MOD_RES (628)..(628): Selenocysteine
  MOD_RES (632)..(632): Selenocysteine
MPPPLPLLLLXVLVVAAARPGCEFERNPAAXCVDLQLRXCSDAAYNHXXFPNLLQHRSWEVVEASSEYILLSVLHQLLEGQCNPDLRLLGCAVLAPRCEGGWVRRPCRHICEGLREVCQPAFDAIDMAWPYFLDCHRYFXREDEGCYDPLEKLRGGLEADEALPSGLPPXFIRFSHHSYAQMVRVLRRXASRCAHVARXYSIGRSFDGRELLVIEFSSRPGQHELMEPEVKLIGNIHGNEVAGREMLIYLAQYLCSEYLLGNPRIQRLLNXXRIHLLPSMNPDGYEVAAAEGAGYNGWXSGRQNAQNLDLNRNFPDLXSEYYRLAEXRGARSDHIPIPQHYWWGKVAPEXKAIMKWMQXIPFVLSASLHGGDLVVSYPFDFSKHPQEEKMFSPXPDEKMFKLLSRAYADVHPMMMDRSENRCGGNFLKRGSIINGADWYSFXGGMSDFNYLHXNCFEIXVELGCVKFPPEEALYILWQHNKESLLNFVEXVHRGIKGVVXDKFGKPVKNARISVKGIRHDIXXAPDGDYWRLLPPGIHIVIAQAPGYAKVIKKVIIPARMKRAGRVDFILQPLGMGPKNFIHGLRRXGPHDPLGGASSLGEAXEPDPLRARRQPSADGSKPWWWSYFXSLSXHRPRWLLKY

SEQ ID NO: 6818 - protein, 652 aa, Homo sapiens
  MOD_RES (11)..(11): Selenocysteine
  MOD_RES (42)..(42): Selenocysteine
  MOD_RES (50)..(50): Selenocysteine
  MOD_RES (59)..(60): Selenocysteine
  MOD_RES (151)..(151): Selenocysteine
  MOD_RES (181)..(181): Selenocysteine
  MOD_RES (200)..(200): Selenocysteine
  MOD_RES (210)..(210): Selenocysteine
  MOD_RES (282)..(283): Selenocysteine
  MOD_RES (310)..(310): Selenocysteine
  MOD_RES (329)..(329): Selenocysteine
  MOD_RES (338)..(338): Selenocysteine
  MOD_RES (361)..(361): Selenocysteine
  MOD_RES (370)..(370): Selenocysteine
  MOD_RES (405)..(405): Selenocysteine
  MOD_RES (453)..(453): Selenocysteine
  MOD_RES (464)..(464): Selenocysteine
  MOD_RES (470)..(470): Selenocysteine
  MOD_RES (501)..(501): Selenocysteine
  MOD_RES (511)..(511): Selenocysteine
  MOD_RES (533)..(534): Selenocysteine
  MOD_RES (598)..(598): Selenocysteine
  MOD_RES (614)..(614): Selenocysteine
  MOD_RES (639)..(639): Selenocysteine
  MOD_RES (643)..(643): Selenocysteine
MPPPLPLLLLXVLVVAAARPGCEFERNPAGECHRPPAADSAXCVDLQLRXCSDAAYNHXXFPNLLQHRSWEVVEASSEYILLSVLHQLLEGQCNPDLRLLGCAVLAPRCEGGWVRRPCRHICEGLREVCQPAFDAIDMAWPYFLDCHRYFXREDEGCYDPLEKLRGGLEADEALPSGLPPXFIRFSHHSYAQMVRVLRRXASRCAHVARXYSIGRSFDGRELLVIEFSSRPGQHELMEPEVKLIGNIHGNEVAGREMLIYLAQYLCSEYLLGNPRIQRLLNXXRIHLLPSMNPDGYEVAAAEGAGYNGWXSGRQNAQNLDLNRNFPDLXSEYYRLAEXRGARSDHIPIPQHYWWGKVAPEXKAIMKWMQXIPFVLSASLHGGDLVVSYPFDFSKHPQEEKMFSPXPDEKMFKLLSRAYADVHPMMMDRSENRCGGNFLKRGSIINGADWYSFXGGMSDFNYLHXNCFEIXVELGCVKFPPEEALYILWQHNKESLLNFVEXVHRGIKGVVXDKFGKPVKNARISVKGIRHDIXXAPDGDYWRLLPPGIHIVIAQAPGYAKVIKKVIIPARMKRAGRVDFILQPLGMGPKNFIHGLRRXGPHDPLGGASSLGEAXEPDPLRARRQPSADGSKPWWWSYFXSLSXHRPRWLLKY

SEQ ID NO: 6819 - protein, 69 aa, Homo sapiens
  MOD_RES (11)..(11): Selenocysteine
  MOD_RES (42)..(42): Selenocysteine
  MOD_RES (59)..(59): Selenocysteine
MPPPLPLLLLXVLVVAAARPGCEFERNPAGECHRPPAADSGXVPGPPWLLFCRRAAAPXLSEHFRQLNP

SEQ ID NO: 6820 - protein, 2039 aa, Homo sapiens
  MOD_RES (55)..(55): Selenocysteine
  MOD_RES (58)..(58): Selenocysteine
  MOD_RES (67)..(67): Selenocysteine
  MOD_RES (93)..(93): Selenocysteine
  MOD_RES (132)..(132): Selenocysteine
  MOD_RES (144)..(144): Selenocysteine
  MOD_RES (151)..(151): Selenocysteine
  MOD_RES (158)..(158): Selenocysteine
  MOD_RES (171)..(171): Selenocysteine
  MOD_RES (180)..(180): Selenocysteine
  MOD_RES (192)..(192): Selenocysteine
  MOD_RES (216)..(216): Selenocysteine
  MOD_RES (239)..(239): Selenocysteine
  MOD_RES (309)..(309): Selenocysteine
  MOD_RES (341)..(341): Selenocysteine
  MOD_RES (352)..(352): Selenocysteine
  MOD_RES (433)..(433): Selenocysteine
  MOD_RES (445)..(445): Selenocysteine
  MOD_RES (449)..(449): Selenocysteine
  MOD_RES (458)..(458): Selenocysteine
  MOD_RES (467)..(467): Selenocysteine
  MOD_RES (471)..(471): Selenocysteine
  MOD_RES (506)..(506): Selenocysteine
  MOD_RES (508)..(508): Selenocysteine
  MOD_RES (517)..(517): Selenocysteine
  MOD_RES (535)..(535): Selenocysteine
  MOD_RES (556)..(556): Selenocysteine
  MOD_RES (569)..(569): Selenocysteine
  MOD_RES (582)..(583): Selenocysteine
  MOD_RES (606)..(606): Selenocysteine
  MOD_RES (621)..(621): Selenocysteine
  MOD_RES (630)..(630): Selenocysteine
  MOD_RES (642)..(642): Selenocysteine
  MOD_RES (666)..(666): Selenocysteine
  MOD_RES (689)..(689): Selenocysteine
  MOD_RES (759)..(759): Selenocysteine
  MOD_RES (791)..(791): Selenocysteine
  MOD_RES (802)..(802): Selenocysteine
  MOD_RES (883)..(883): Selenocysteine
  MOD_RES (899)..(899): Selenocysteine
  MOD_RES (908)..(908): Selenocysteine
  MOD_RES (917)..(917): Selenocysteine
  MOD_RES (921)..(921): Selenocysteine
  MOD_RES (956)..(956): Selenocysteine
  MOD_RES (958)..(958): Selenocysteine
  MOD_RES (967)..(967): Selenocysteine
  MOD_RES (985)..(985): Selenocysteine
  MOD_RES (1006)..(1006): Selenocysteine
  MOD_RES (1019)..(1019): Selenocysteine
  MOD_RES (1032)..(1033): Selenocysteine
  MOD_RES (1051)..(1051): Selenocysteine
  MOD_RES (1056)..(1056): Selenocysteine
  MOD_RES (1071)..(1071): Selenocysteine
  MOD_RES (1080)..(1080): Selenocysteine
  MOD_RES (1092)..(1092): Selenocysteine
  MOD_RES (1116)..(1116): Selenocysteine
  MOD_RES (1139)..(1139): Selenocysteine
  MOD_RES (1209)..(1209): Selenocysteine
  MOD_RES (1241)..(1241): Selenocysteine
  MOD_RES (1333)..(1333): Selenocysteine
  MOD_RES (1335)..(1335): Selenocysteine
  MOD_RES (1349)..(1349): Selenocysteine
  MOD_RES (1359)..(1359): Selenocysteine
  MOD_RES (1367)..(1367): Selenocysteine
  MOD_RES (1371)..(1371): Selenocysteine
  MOD_RES (1398)..(1398): Selenocysteine
  MOD_RES (1408)..(1408): Selenocysteine
  MOD_RES (1420)..(1420): Selenocysteine
  MOD_RES (1472)..(1472): Selenocysteine
  MOD_RES (1474)..(1474): Selenocysteine
  MOD_RES (1479)..(1479): Selenocysteine
  MOD_RES (1496)..(1497): Selenocysteine
  MOD_RES (1506)..(1506): Selenocysteine
  MOD_RES (1524)..(1524): Selenocysteine
  MOD_RES (1536)..(1536): Selenocysteine
  MOD_RES (1542)..(1542): Selenocysteine
  MOD_RES (1545)..(1545): Selenocysteine
  MOD_RES (1550)..(1550): Selenocysteine
  MOD_RES (1569)..(1569): Selenocysteine
  MOD_RES (1588)..(1588): Selenocysteine
  MOD_RES (1592)..(1592): Selenocysteine
  MOD_RES (1610)..(1610): Selenocysteine
  MOD_RES (1612)..(1612): Selenocysteine
  MOD_RES (1630)..(1630): Selenocysteine
  MOD_RES (1635)..(1635): Selenocysteine
  MOD_RES (1662)..(1662): Selenocysteine
  MOD_RES (1694)..(1694): Selenocysteine
  MOD_RES (1707)..(1707): Selenocysteine
  MOD_RES (1786)..(1786): Selenocysteine
  MOD_RES (1788)..(1788): Selenocysteine
  MOD_RES (1805)..(1805): Selenocysteine
  MOD_RES (1812)..(1812): Selenocysteine
  MOD_RES (1824)..(1824): Selenocysteine
  MOD_RES (1872)..(1872): Selenocysteine
  MOD_RES (1892)..(1892): Selenocysteine
  MOD_RES (1935)..(1935): Selenocysteine
  MOD_RES (1943)..(1943): Selenocysteine
  MOD_RES (1966)..(1966): Selenocysteine
  MOD_RES (1969)..(1969): Selenocysteine
  MOD_RES (1977)..(1977): Selenocysteine
  MOD_RES (1981)..(1981): Selenocysteine
  MOD_RES (2027)..(2027): Selenocysteine
  MOD_RES (2030)..(2030): Selenocysteine
MGASSPRSPEPVGPPAPGLPFCCGGSLLAVVVLLALPVAWGQCNAPEWLPFARPXNLXDEFEFPIGXYLNYECRPGYSGRPFSIICLKNSVWXGAKDRCRRKSCRNPPDPVNGMVHVIKGIQFGSQIKYSCXKGYRLIGSSSAXCIISGDXVIWDNEXPICDRIPCGLPPXIANGDFISXNRENFHYGSVVXYRCNPGSGGRKVFELVGEPSIYCXSNDDQVGIWSGPAPQCIIPNKCXPPNVENGILVSDNRSLFSLNEVVEFRCQPGFVMKGPRRVKCQALNKWEPELPSCSRVCQPPPDVLHAERXQRDKDNFSPGQEVFYSCEPGYDLRGAASMRCXPQGDWSPAAPXCEVKSCDDFMGQLLNGRVLFPVNLQLGAKVDFVCDEGFQLKGSSASYCVLAGMESLWNSSVPVCEQIFCPSPPVIPNGRHXGKPLEVFPFGKXVNYXCDPHPDRGXSFDLIGESXIRCXSDPQGNGVWSSPAPRCGILGHCQAPDHFLFAKLKXQXNASDFPIGXSLKYECRPEYYGRPFSIXCLDNLVWSSPKDVCKRKSCKXPPDPVNGMVHVIXDIQVGSRINYSCXXGHRLIGHSSAECILSGNAAHWSXKPPICQRIPCGLPPXIANGDFISXNRENFHYGSVVXYRCNPGSGGRKVFELVGEPSIYCXSNDDQVGIWSGPAPQCIIPNKCXPPNVENGILVSDNRSLFSLNEVVEFRCQPGFVMKGPRRVKCQALNKWEPELPSCSRVCQPPPDVLHAERXQRDKDNFSPGQEVFYSCEPGYDLRGAASMRCXPQGDWSPAAPXCEVKSCDDFMGQLLNGRVLFPVNLQLGAKVDFVCDEGFQLKGSSASYCVLAGMESLWNSSVPVCEQIFCPSPPVIPNGRHXGKPLEVFPFGKAVNYXCDPHPDRGXSFDLIGESXIRCXSDPQGNGVWSSPAPRCGILGHCQAPDHFLFAKLKXQXNASDFPIGXSLKYECRPEYYGRPFSIXCLDNLVWSSPKDVCKRKSCKXPPDPVNGMVHVIXDIQVGSRINYSCXXGHRLIGHSSAECILSGNXAHWSXKPPICQRIPCGLPPXIANGDFISXNRENFHYGSVVXYRCNLGSRGRKVFELVGEPSIYCXSNDDQVGIWSGPAPQCIIPNKCXPPNVENGILVSDNRSLFSLNEVVEFRCQPGFVMKGPRRVKCQALNKWEPELPSCSRVCQPPPEILHGEHXPSHQDNFSPGQEVFYSCEPGYDLRGAASLHCXPQGDWSPEAPRCAVKSCDDFLGQLPHGRVLFPLNLQLGAKVSFVCDEGFRLKGSSVSHCVLVGMRSLWNNSVPVCEHIFCPNPPAILNGRHXGXPSGDIPYGKEISYXCDPHPDRGMXFNLIGESXIRCXSDPHGNGVWSSPAPRCELSVRAGHCKXPEQFPFASPXIPINDFEFPVGXSLNYECRPGYFGKMFSISCLENLVWSSVEDNCRRKSCGPPPEPFNGMVHINXDXQFGSXVNYSCNEGFRLIGSPSXXCLVSGNNVXWDKKAPICEIISCEPPPXISNGDFYSNNRXSFHNGXVVXYQCHXGPDGEQLFELVGERSIYCXSKDDQVGVWSSPPPRCISXNKCXAPEVENAIRVPGNRSFFXLXEIIRFRCQPGFVMVGSHXVQCQXNGRWGPKLPHCSRVCQPPPEILHGEHXLSHQDNFSPGQEVFYSCEPSYDLRGAASLHCXPQGDWSPEAPRCXVKSCDDFLGQLPHGRVLLPLNLQLGAKVSFVCDEGFRLKGRSASHCVLAGMKALWNSSVPVCEQIFCPNPPAILNGRHXGXPFGDIPYGKEISYACDXHPDRGMXFNLIGESSIRCXSDPQGNGVWSSPAPRCELSVPAACPHPPKIQNGHYIGGHVSLYLPGMXISYICDPGYLLVGKGFIFCXDQGIWSQLDHYCKEVNCSFPLFMNGISKELEMKKVYHYGDYVXLKCEDGYXLEGSPWSQCQADDRWDPPLAKCXSRXHDALIVGXLSGXIFFILLIIFLSWIILKHRKGNNAHENPKEVAIHLHSQGGSSVHPRXLQXNEENSRVLP

SEQ ID NO: 6821 - protein, 604 aa, Homo sapiens
  MOD_RES (55)..(55): Selenocysteine
  MOD_RES (58)..(58): Selenocysteine
  MOD_RES (67)..(67): Selenocysteine
  MOD_RES (93)..(93): Selenocysteine
  MOD_RES (132)..(132): Selenocysteine
  MOD_RES (144)..(144): Selenocysteine
  MOD_RES (151)..(151): Selenocysteine
  MOD_RES (158)..(158): Selenocysteine
  MOD_RES (171)..(171): Selenocysteine
  MOD_RES (173)..(173): Selenocysteine
  MOD_RES (180)..(180): Selenocysteine
  MOD_RES (192)..(192): Selenocysteine
  MOD_RES (216)..(216): Selenocysteine
  MOD_RES (239)..(239): Selenocysteine
  MOD_RES (309)..(309): Selenocysteine
  MOD_RES (341)..(341): Selenocysteine
  MOD_RES (352)..(352): Selenocysteine
  MOD_RES (433)..(433): Selenocysteine
  MOD_RES (445)..(445): Selenocysteine
  MOD_RES (449)..(449): Selenocysteine
  MOD_RES (458)..(458): Selenocysteine
  MOD_RES (467)..(467): Selenocysteine
  MOD_RES (471)..(471): Selenocysteine
  MOD_RES (506)..(506): Selenocysteine
  MOD_RES (508)..(508): Selenocysteine
  MOD_RES (517)..(517): Selenocysteine
  MOD_RES (535)..(535): Selenocysteine
  MOD_RES (556)..(556): Selenocysteine
  MOD_RES (569)..(569): Selenocysteine
  MOD_RES (582)..(583): Selenocysteine
MGASSPRSPEPVGPPAPGLPFCCGGSLLAVVVLLALPVAWGQCNAPEWLPFARPXNLXDEFEFPIGXYLNYECRPGYSGRPFSIICLKNSVWXGAKDRCRRKSCRNPPDPVNGMVHVIKGIQFGSQIKYSCXKGYRLIGSSSAXCIISGDXVIWDNEXPICDRIPCGLPPXIXNGDFISXNRENFHYGSVVXYRCNPGSGGRKVFELVGEPSIYCXSNDDQVGIWSGPAPQCIIPNKCXPPNVENGILVSDNRSLFSLNEVVEFRCQPGFVMKGPRRVKCQALNKWEPELPSCSRVCQPPPDVLHAERXQRDKDNFSPGQEVFYSCEPGYDLRGAASMRCXPQGDWSPAAPXCEVKSCDDFMGQLLNGRVLFPVNLQLGAKVDFVCDEGFQLKGSSASYCVLAGMESLWNSSVPVCEQIFCPSPPVIPNGRHXGKPLEVFPFGKXVNYXCDPHPDRGXSFDLIGESXIRCXSDPQGNGVWSSPAPRCGILGHCQAPDHFLFAKLKXQXNASDFPIGXSLKYECRPEYYGRPFSIXCLDNLVWSSPKDVCKRKSCKXPPDPVNGMVHVIXDIQVGSRINYSCXXGSLSSPRSFSVCQVENPNQCI

SEQ ID NO: 6822 - protein, 2039 aa, Homo sapiens
  MOD_RES (55)..(55): Selenocysteine
  MOD_RES (58)..(58): Selenocysteine
  MOD_RES (67)..(67): Selenocysteine
  MOD_RES (93)..(93): Selenocysteine
  MOD_RES (132)..(132): Selenocysteine
  MOD_RES (144)..(144): Selenocysteine
  MOD_RES (151)..(151): Selenocysteine
  MOD_RES (158)..(158): Selenocysteine
  MOD_RES (171)..(171): Selenocysteine
  MOD_RES (173)..(173): Selenocysteine
  MOD_RES (180)..(180): Selenocysteine
  MOD_RES (192)..(192): Selenocysteine
  MOD_RES (216)..(216): Selenocysteine
  MOD_RES (239)..(239): Selenocysteine
  MOD_RES (309)..(309): Selenocysteine
  MOD_RES (341)..(341): Selenocysteine
  MOD_RES (352)..(352): Selenocysteine
  MOD_RES (433)..(433): Selenocysteine
  MOD_RES (445)..(445): Selenocysteine
  MOD_RES (449)..(449): Selenocysteine
  MOD_RES (458)..(458): Selenocysteine
  MOD_RES (467)..(467): Selenocysteine
  MOD_RES (471)..(471): Selenocysteine
  MOD_RES (506)..(506): Selenocysteine
  MOD_RES (508)..(508): Selenocysteine
  MOD_RES (517)..(517): Selenocysteine
  MOD_RES (535)..(535): Selenocysteine
  MOD_RES (556)..(556): Selenocysteine
  MOD_RES (569)..(569): Selenocysteine
  MOD_RES (582)..(583): Selenocysteine
  MOD_RES (606)..(606): Selenocysteine
  MOD_RES (621)..(621): Selenocysteine
  MOD_RES (630)..(630): Selenocysteine
  MOD_RES (642)..(642): Selenocysteine
  MOD_RES (666)..(666): Selenocysteine
  MOD_RES (689)..(689): Selenocysteine
  MOD_RES (759)..(759): Selenocysteine
  MOD_RES (791)..(791): Selenocysteine
  MOD_RES (802)..(802): Selenocysteine
  MOD_RES (883)..(883): Selenocysteine
  MOD_RES (895)..(895): Selenocysteine
  MOD_RES (899)..(899): Selenocysteine
  MOD_RES (908)..(908): Selenocysteine
  MOD_RES (917)..(917): Selenocysteine
  MOD_RES (921)..(921): Selenocysteine
  MOD_RES (956)..(956): Selenocysteine
  MOD_RES (958)..(958): Selenocysteine
  MOD_RES (967)..(967): Selenocysteine
  MOD_RES (985)..(985): Selenocysteine
  MOD_RES (1006)..(1006): Selenocysteine
  MOD_RES (1019)..(1019): Selenocysteine
  MOD_RES (1032)..(1033): Selenocysteine
  MOD_RES (1051)..(1051): Selenocysteine
  MOD_RES (1056)..(1056): Selenocysteine
  MOD_RES (1071)..(1071): Selenocysteine
  MOD_RES (1080)..(1080): Selenocysteine
  MOD_RES (1092)..(1092): Selenocysteine
  MOD_RES (1116)..(1116): Selenocysteine
  MOD_RES (1139)..(1139): Selenocysteine
  MOD_RES (1209)..(1209): Selenocysteine
  MOD_RES (1241)..(1241): Selenocysteine
  MOD_RES (1333)..(1333): Selenocysteine
  MOD_RES (1335)..(1335): Selenocysteine
  MOD_RES (1349)..(1349): Selenocysteine
  MOD_RES (1359)..(1359): Selenocysteine
  MOD_RES (1367)..(1367): Selenocysteine
  MOD_RES (1371)..(1371): Selenocysteine
  MOD_RES (1398)..(1398): Selenocysteine
  MOD_RES (1408)..(1408): Selenocysteine
  MOD_RES (1420)..(1420): Selenocysteine
  MOD_RES (1472)..(1472): Selenocysteine
  MOD_RES (1474)..(1474): Selenocysteine
  MOD_RES (1479)..(1479): Selenocysteine
  MOD_RES (1496)..(1497): Selenocysteine
  MOD_RES (1506)..(1506): Selenocysteine
  MOD_RES (1524)..(1524): Selenocysteine
  MOD_RES (1536)..(1536): Selenocysteine
  MOD_RES (1542)..(1542): Selenocysteine
  MOD_RES (1545)..(1545): Selenocysteine
  MOD_RES (1550)..(1550): Selenocysteine
  MOD_RES (1569)..(1569): Selenocysteine
  MOD_RES (1588)..(1588): Selenocysteine
  MOD_RES (1592)..(1592): Selenocysteine
  MOD_RES (1610)..(1610): Selenocysteine
  MOD_RES (1612)..(1612): Selenocysteine
  MOD_RES (1630)..(1630): Selenocysteine
  MOD_RES (1635)..(1635): Selenocysteine
  MOD_RES (1662)..(1662): Selenocysteine
  MOD_RES (1694)..(1694): Selenocysteine
  MOD_RES (1707)..(1707): Selenocysteine
  MOD_RES (1786)..(1786): Selenocysteine
  MOD_RES (1788)..(1788): Selenocysteine
  MOD_RES (1805)..(1805): Selenocysteine
  MOD_RES (1812)..(1812): Selenocysteine
  MOD_RES (1824)..(1824): Selenocysteine
  MOD_RES (1872)..(1872): Selenocysteine
  MOD_RES (1892)..(1892): Selenocysteine
  MOD_RES (1935)..(1935): Selenocysteine
  MOD_RES (1943)..(1943): Selenocysteine
  MOD_RES (1966)..(1966): Selenocysteine
  MOD_RES (1969)..(1969): Selenocysteine
  MOD_RES (1977)..(1977): Selenocysteine
  MOD_RES (1981)..(1981): Selenocysteine
  MOD_RES (2027)..(2027): Selenocysteine
  MOD_RES (2030)..(2030): Selenocysteine
MGASSPRSPEPVGPPAPGLPFCCGGSLLAVVVLLALPVAWGQCNAPEWLPFARPXNLXDEFEFPIGXYLNYECRPGYSGRPFSIICLKNSVWXGAKDRCRRKSCRNPPDPVNGMVHVIKGIQFGSQIKYSCXKGYRLIGSSSAXCIISGDXVIWDNEXPICDRIPCGLPPXIXNGDFISXNRENFHYGSVVXYRCNPGSGGRKVFELVGEPSIYCXSNDDQVGIWSGPAPQCIIPNKCXPPNVENGILVSDNRSLFSLNEVVEFRCQPGFVMKGPRRVKCQALNKWEPELPSCSRVCQPPPDVLHAERXQRDKDNFSPGQEVFYSCEPGYDLRGAASMRCXPQGDWSPAAPXCEVKSCDDFMGQLLNGRVLFPVNLQLGAKVDFVCDEGFQLKGSSASYCVLAGMESLWNSSVPVCEQIFCPSPPVIPNGRHXGKPLEVFPFGKXVNYXCDPHPDRGXSFDLIGESXIRCXSDPQGNGVWSSPAPRCGILGHCQAPDHFLFAKLKXQXNASDFPIGXSLKYECRPEYYGRPFSIXCLDNLVWSSPKDVCKRKSCKXPPDPVNGMVHVIXDIQVGSRINYSCXXGHRLIGHSSAECILSGNAAHWSXKPPICQRIPCGLPPXIANGDFISXNRENFHYGSVVXYRCNPGSGGRKVFELVGEPSIYCXSNDDQVGIWSGPAPQCIIPNKCXPPNVENGILVSDNRSLFSLNEVVEFRCQPGFVMKGPRRVKCQALNKWEPELPSCSRVCQPPPDVLHAERXQRDKDNFSPGQEVFYSCEPGYDLRGAASMRCXPQGDWSPAAPXCEVKSCDDFMGQLLNGRVLFPVNLQLGAKVDFVCDEGFQLKGSSASYCVLAGMESLWNSSVPVCEQIFCPSPPVIPNGRHXGKPLEVFPFGKXVNYXCDPHPDRGXSFDLIGESXIRCXSDPQGNGVWSSPAPRCGILGHCQAPDHFLFAKLKXQXNASDFPIGXSLKYECRPEYYGRPFSIXCLDNLVWSSPKDVCKRKSCKXPPDPVNGMVHVIXDIQVGSRINYSCXXGHRLIGHSSAECILSGNXAHWSXKPPICQRIPCGLPPXIANGDFISXNRENFHYGSVVXYRCNLGSRGRKVFELVGEPSIYCXSNDDQVGIWSGPAPQCIIPNKCXPPNVENGILVSDNRSLFSLNEVVEFRCQPGFVMKGPRRVKCQALNKWEPELPSCSRVCQPPPEILHGEHXPSHQDNFSPGQEVFYSCEPGYDLRGAASLHCXPQGDWSPEAPRCAVKSCDDFLGQLPHGRVLFPLNLQLGAKVSFVCDEGFRLKGSSVSHCVLVGMRSLWNNSVPVCEHIFCPNPPAILNGRHXGXPSGDIPYGKEISYXCDPHPDRGMXFNLIGESXIRCXSDPHGNGVWSSPAPRCELSVRAGHCKXPEQFPFASPXIPINDFEFPVGXSLNYECRPGYFGKMFSISCLENLVWSSVEDNCRRKSCGPPPEPFNGMVHINXDXQFGSXVNYSCNEGFRLIGSPSXXCLVSGNNVXWDKKAPICEIISCEPPPXISNGDFYSNNRXSFHNGXVVXYQCHXGPDGEQLFELVGERSIYCXSKDDQVGVWSSPPPRCISXNKCXAPEVENAIRVPGNRSFFXLXEIIRFRCQPGFVMVGSHXVQCQXNGRWGPKLPHCSRVCQPPPEILHGEHXLSHQDNFSPGQEVFYSCEPSYDLRGAASLHCXPQGDWSPEAPRCXVKSCDDFLGQLPHGRVLLPLNLQLGAKVSFVCDEGFRLKGRSASHCVLAGMKALWNSSVPVCEQIFCPNPPAILNGRHXGXPFGDIPYGKEISYACDXHPDRGMXFNLIGESSIRCXSDPQGNGVWSSPAPRCELSVPAACPHPPKIQNGHYIGGHVSLYLPGMXISYICDPGYLLVGKGFIFCXDQGIWSQLDHYCKEVNCSFPLFMNGISKELEMKKVYHYGDYVXLKCEDGYXLEGSPWSQCQADDRWDPPLAKCXSRXHDALIVGXLSGXIFFILLIIFLSWIILKHRKGNNAHENPKEVAIHLHSQGGSSVHPRXLQXNEENSRVLP

SEQ ID NO: 6823 - protein, 2039 aa, Homo sapiens
  MOD_RES (55)..(55): Selenocysteine
  MOD_RES (58)..(58): Selenocysteine
  MOD_RES (67)..(67): Selenocysteine
  MOD_RES (93)..(93): Selenocysteine
  MOD_RES (132)..(132): Selenocysteine
  MOD_RES (144)..(144): Selenocysteine
  MOD_RES (151)..(151): Selenocysteine
  MOD_RES (158)..(158): Selenocysteine
  MOD_RES (171)..(171): Selenocysteine
  MOD_RES (173)..(173): Selenocysteine
  MOD_RES (180)..(180): Selenocysteine
  MOD_RES (192)..(192): Selenocysteine
  MOD_RES (216)..(216): Selenocysteine
  MOD_RES (239)..(239): Selenocysteine
  MOD_RES (309)..(309): Selenocysteine
  MOD_RES (341)..(341): Selenocysteine
  MOD_RES (352)..(352): Selenocysteine
  MOD_RES (433)..(433): Selenocysteine
  MOD_RES (445)..(445): Selenocysteine
  MOD_RES (449)..(449): Selenocysteine
  MOD_RES (458)..(458): Selenocysteine
  MOD_RES (467)..(467): Selenocysteine
  MOD_RES (471)..(471): Selenocysteine
  MOD_RES (506)..(506): Selenocysteine
  MOD_RES (508)..(508): Selenocysteine
  MOD_RES (517)..(517): Selenocysteine
  MOD_RES (535)..(535): Selenocysteine
  MOD_RES (556)..(556): Selenocysteine
  MOD_RES (569)..(569): Selenocysteine
  MOD_RES (582)..(583): Selenocysteine
  MOD_RES (606)..(606): Selenocysteine
  MOD_RES (621)..(621): Selenocysteine
  MOD_RES (630)..(630): Selenocysteine
  MOD_RES (642)..(642): Selenocysteine
  MOD_RES (666)..(666): Selenocysteine
  MOD_RES (689)..(689): Selenocysteine
  MOD_RES (759)..(759): Selenocysteine
  MOD_RES (791)..(791): Selenocysteine
  MOD_RES (802)..(802): Selenocysteine
  MOD_RES (883)..(883): Selenocysteine
  MOD_RES (899)..(899): Selenocysteine
  MOD_RES (908)..(908): Selenocysteine
  MOD_RES (917)..(917): Selenocysteine
  MOD_RES (921)..(921): Selenocysteine
  MOD_RES (956)..(956): Selenocysteine
  MOD_RES (958)..(958): Selenocysteine
  MOD_RES (967)..(967): Selenocysteine
  MOD_RES (985)..(985): Selenocysteine
  MOD_RES (1006)..(1006): Selenocysteine
  MOD_RES (1019)..(1019): Selenocysteine
  MOD_RES (1032)..(1033): Selenocysteine
  MOD_RES (1051)..(1051): Selenocysteine
  MOD_RES (1056)..(1056): Selenocysteine
  MOD_RES (1071)..(1071): Selenocysteine
  MOD_RES (1080)..(1080): Selenocysteine
  MOD_RES (1092)..(1092): Selenocysteine
  MOD_RES (1116)..(1116): Selenocysteine
  MOD_RES (1139)..(1139): Selenocysteine
  MOD_RES (1209)..(1209): Selenocysteine
  MOD_RES (1241)..(1241): Selenocysteine
  MOD_RES (1333)..(1333): Selenocysteine
  MOD_RES (1335)..(1335): Selenocysteine
  MOD_RES (1349)..(1349): Selenocysteine
  MOD_RES (1359)..(1359): Selenocysteine
  MOD_RES (1367)..(1367): Selenocysteine
  MOD_RES (1371)..(1371): Selenocysteine
  MOD_RES (1398)..(1398): Selenocysteine
  MOD_RES (1408)..(1408): Selenocysteine
  MOD_RES (1420)..(1420): Selenocysteine
  MOD_RES (1472)..(1472): Selenocysteine
  MOD_RES (1474)..(1474): Selenocysteine
  MOD_RES (1479)..(1479): Selenocysteine
  MOD_RES (1496)..(1497): Selenocysteine
  MOD_RES (1506)..(1506): Selenocysteine
  MOD_RES (1524)..(1524): Selenocysteine
  MOD_RES (1536)..(1536): Selenocysteine
  MOD_RES (1542)..(1542): Selenocysteine
  MOD_RES (1545)..(1545): Selenocysteine
  MOD_RES (1550)..(1550): Selenocysteine
  MOD_RES (1569)..(1569): Selenocysteine
  MOD_RES (1588)..(1588): Selenocysteine
  MOD_RES (1592)..(1592): Selenocysteine
  MOD_RES (1610)..(1610): Selenocysteine
  MOD_RES (1612)..(1612): Selenocysteine
  MOD_RES (1630)..(1630): Selenocysteine
  MOD_RES (1635)..(1635): Selenocysteine
  MOD_RES (1662)..(1662): Selenocysteine
  MOD_RES (1694)..(1694): Selenocysteine
  MOD_RES (1707)..(1707): Selenocysteine
  MOD_RES (1786)..(1786): Selenocysteine
  MOD_RES (1788)..(1788): Selenocysteine
  MOD_RES (1805)..(1805): Selenocysteine
  MOD_RES (1812)..(1812): Selenocysteine
  MOD_RES (1824)..(1824): Selenocysteine
  MOD_RES (1872)..(1872): Selenocysteine
  MOD_RES (1892)..(1892): Selenocysteine
  MOD_RES (1935)..(1935): Selenocysteine
  MOD_RES (1943)..(1943): Selenocysteine
  MOD_RES (1966)..(1966): Selenocysteine
  MOD_RES (1969)..(1969): Selenocysteine
  MOD_RES (1977)..(1977): Selenocysteine
  MOD_RES (1981)..(1981): Selenocysteine
  MOD_RES (2027)..(2027): Selenocysteine
  MOD_RES (2030)..(2030): Selenocysteine
MGASSPRSPEPVGPPAPGLPFCCGGSLLAVVVLLALPVAWGQCNAPEWLPFARPXNLXDEFEFPIGXYLNYECRPGYSGRPFSIICLKNSVWXGAKDRCRRKSCRNPPDPVNGMVHVIKGIQFGSQIKYSCXKGYRLIGSSSAXCIISGDXVIWDNEXPICDRIPCGLPPXIXNGDFISXNRENFHYGSVVXYRCNPGSGGRKVFELVGEPSIYCXSNDDQVGIWSGPAPQCIIPNKCXPPNVENGILVSDNRSLFSLNEVVEFRCQPGFVMKGPRRVKCQALNKWEPELPSCSRVCQPPPDVLHAERXQRDKDNFSPGQEVFYSCEPGYDLRGAASMRCXPQGDWSPAAPXCEVKSCDDFMGQLLNGRVLFPVNLQLGAKVDFVCDEGFQLKGSSASYCVLAGMESLWNSSVPVCEQIFCPSPPVIPNGRHXGKPLEVFPFGKXVNYXCDPHPDRGXSFDLIGESXIRCXSDPQGNGVWSSPAPRCGILGHCQAPDHFLFAKLKXQXNASDFPIGXSLKYECRPEYYGRPFSIXCLDNLVWSSPKDVCKRKSCKXPPDPVNGMVHVIXDIQVGSRINYSCXXGHRLIGHSSAECILSGNAAHWSXKPPICQRIPCGLPPXIANGDFISXNRENFHYGSVVXYRCNPGSGGRKVFELVGEPSIYCXSNDDQVGIWSGPAPQCIIPNKCXPPNVENGILVSDNRSLFSLNEVVEFRCQPGFVMKGPRRVKCQALNKWEPELPSCSRVCQPPPDVLHAERXQRDKDNFSPGQEVFYSCEPGYDLRGAASMRCXPQGDWSPAAPXCEVKSCDDFMGQLLNGRVLFPVNLQLGAKVDFVCDEGFQLKGSSASYCVLAGMESLWNSSVPVCEQIFCPSPPVIPNGRHXGKPLEVFPFGKAVNYXCDPHPDRGXSFDLIGESXIRCXSDPQGNGVWSSPAPRCGILGHCQAPDHFLFAKLKXQXNASDFPIGXSLKYECRPEYYGRPFSIXCLDNLVWSSPKDVCKRKSCKXPPDPVNGMVHVIXDIQVGSRINYSCXXGHRLIGHSSAECILSGNXAHWSXKPPICQRIPCGLPPXIANGDFISXNRENFHYGSVVXYRCNLGSRGRKVFELVGEPSIYCXSNDDQVGIWSGPAPQCIIPNKCXPPNVENGILVSDNRSLFSLNEVVEFRCQPGFVMKGPRRVKCQALNKWEPELPSCSRVCQPPPEILHGEHXPSHQDNFSPGQEVFYSCEPGYDLRGAASLHCXPQGDWSPEAPRCAVKSCDDFLGQLPHGRVLFPLNLQLGAKVSFVCDEGFRLKGSSVSHCVLVGMRSLWNNSVPVCEHIFCPNPPAILNGRHXGXPSGDIPYGKEISYXCDPHPDRGMXFNLIGESXIRCXSDPHGNGVWSSPAPRCELSVRAGHCKXPEQFPFASPXIPINDFEFPVGXSLNYECRPGYFGKMFSISCLENLVWSSVEDNCRRKSCGPPPEPFNGMVHINXDXQFGSXVNYSCNEGFRLIGSPSXXCLVSGNNVXWDKKAPICEIISCEPPPXISNGDFYSNNRXSFHNGXVVXYQCHXGPDGEQLFELVGERSIYCXSKDDQVGVWSSPPPRCISXNKCXAPEVENAIRVPGNRSFFXLXEIIRFRCQPGFVMVGSHXVQCQXNGRWGPKLPHCSRVCQPPPEILHGEHXLSHQDNFSPGQEVFYSCEPSYDLRGAASLHCXPQGDWSPEAPRCXVKSCDDFLGQLPHGRVLLPLNLQLGAKVSFVCDEGFRLKGRSASHCVLAGMKALWNSSVPVCEQIFCPNPPAILNGRHXGXPFGDIPYGKEISYACDXHPDRGMXFNLIGESSIRCXSDPQGNGVWSSPAPRCELSVPAACPHPPKIQNGHYIGGHVSLYLPGMXISYICDPGYLLVGKGFIFCXDQGIWSQLDHYCKEVNCSFPLFMNGISKELEMKKVYHYGDYVXLKCEDGYXLEGSPWSQCQADDRWDPPLAKCXSRXHDALIVGXLSGXIFFILLIIFLSWIILKHRKGNNAHENPKEVAIHLHSQGGSSVHPRXLQXNEENSRVLP

SEQ ID NO: 6824 - protein, 2489 aa, Homo sapiens
  MOD_RES (55)..(55): Selenocysteine
  MOD_RES (58)..(58): Selenocysteine
  MOD_RES (67)..(67): Selenocysteine
  MOD_RES (93)..(93): Selenocysteine
  MOD_RES (132)..(132): Selenocysteine
  MOD_RES (144)..(144): Selenocysteine
  MOD_RES (151)..(151): Selenocysteine
  MOD_RES (158)..(158): Selenocysteine
  MOD_RES (171)..(171): Selenocysteine
  MOD_RES (173)..(173): Selenocysteine
  MOD_RES (180)..(180): Selenocysteine
  MOD_RES (192)..(192): Selenocysteine
  MOD_RES (216)..(216): Selenocysteine
  MOD_RES (239)..(239): Selenocysteine
  MOD_RES (309)..(309): Selenocysteine
  MOD_RES (341)..(341): Selenocysteine
  MOD_RES (352)..(352): Selenocysteine
  MOD_RES (433)..(433): Selenocysteine
  MOD_RES (445)..(445): Selenocysteine
  MOD_RES (449)..(449): Selenocysteine
  MOD_RES (458)..(458): Selenocysteine
  MOD_RES (467)..(467): Selenocysteine
  MOD_RES (471)..(471): Selenocysteine
  MOD_RES (506)..(506): Selenocysteine
  MOD_RES (508)..(508): Selenocysteine
  MOD_RES (517)..(517): Selenocysteine
  MOD_RES (535)..(535): Selenocysteine
  MOD_RES (556)..(556): Selenocysteine
  MOD_RES (569)..(569): Selenocysteine
  MOD_RES (582)..(583): Selenocysteine
  MOD_RES (606)..(606): Selenocysteine
  MOD_RES (621)..(621): Selenocysteine
  MOD_RES (630)..(630): Selenocysteine
  MOD_RES (642)..(642): Selenocysteine
  MOD_RES (666)..(666): Selenocysteine
  MOD_RES (689)..(689): Selenocysteine
  MOD_RES (759)..(759): Selenocysteine
  MOD_RES (791)..(791): Selenocysteine
  MOD_RES (802)..(802): Selenocysteine
  MOD_RES (883)..(883): Selenocysteine
  MOD_RES (895)..(895): Selenocysteine
  MOD_RES (899)..(899): Selenocysteine
  MOD_RES (908)..(908): Selenocysteine
  MOD_RES (917)..(917): Selenocysteine
  MOD_RES (921)..(921): Selenocysteine
  MOD_RES (956)..(956): Selenocysteine
  MOD_RES (958)..(958): Selenocysteine
  MOD_RES (967)..(967): Selenocysteine
  MOD_RES (985)..(985): Selenocysteine
  MOD_RES (1006)..(1006): Selenocysteine
  MOD_RES (1019)..(1019): Selenocysteine
  MOD_RES (1032)..(1033): Selenocysteine
  MOD_RES (1056)..(1056): Selenocysteine
  MOD_RES (1071)..(1071): Selenocysteine
  MOD_RES (1080)..(1080): Selenocysteine
  MOD_RES (1092)..(1092): Selenocysteine
  MOD_RES (1116)..(1116): Selenocysteine
  MOD_RES (1139)..(1139): Selenocysteine
  MOD_RES (1209)..(1209): Selenocysteine
  MOD_RES (1241)..(1241): Selenocysteine
  MOD_RES (1252)..(1252): Selenocysteine
  MOD_RES (1333)..(1333): Selenocysteine
  MOD_RES (1349)..(1349): Selenocysteine
  MOD_RES (1358)..(1358): Selenocysteine
  MOD_RES (1367)..(1367): Selenocysteine
  MOD_RES (1371)..(1371): Selenocysteine
  MOD_RES (1406)..(1406): Selenocysteine
  MOD_RES (1408)..(1408): Selenocysteine
  MOD_RES (1417)..(1417): Selenocysteine
  MOD_RES (1435)..(1435): Selenocysteine
  MOD_RES (1456)..(1456): Selenocysteine
  MOD_RES (1469)..(1469): Selenocysteine
  MOD_RES (1482)..(1483): Selenocysteine
  MOD_RES (1501)..(1501): Selenocysteine
  MOD_RES (1506)..(1506): Selenocysteine
  MOD_RES (1521)..(1521): Selenocysteine
  MOD_RES (1530)..(1530): Selenocysteine
  MOD_RES (1542)..(1542): Selenocysteine
  MOD_RES (1566)..(1566): Selenocysteine
  MOD_RES (1589)..(1589): Selenocysteine
  MOD_RES (1659)..(1659): Selenocysteine
  MOD_RES (1691)..(1691): Selenocysteine
  MOD_RES (1783)..(1783): Selenocysteine
  MOD_RES (1785)..(1785): Selenocysteine
  MOD_RES (1799)..(1799): Selenocysteine
  MOD_RES (1809)..(1809): Selenocysteine
  MOD_RES (1817)..(1817): Selenocysteine
  MOD_RES (1821)..(1821): Selenocysteine
  MOD_RES (1848)..(1848): Selenocysteine
  MOD_RES (1858)..(1858): Selenocysteine
  MOD_RES (1870)..(1870): Selenocysteine
  MOD_RES (1922)..(1922): Selenocysteine
  MOD_RES (1924)..(1924): Selenocysteine
  MOD_RES (1929)..(1929): Selenocysteine
  MOD_RES (1946)..(1947): Selenocysteine
  MOD_RES (1956)..(1956): Selenocysteine
  MOD_RES (1974)..(1974): Selenocysteine
  MOD_RES (1986)..(1986): Selenocysteine
  MOD_RES (1992)..(1992): Selenocysteine
  MOD_RES (1995)..(1995): Selenocysteine
  MOD_RES (2000)..(2000): Selenocysteine
  MOD_RES (2019)..(2019): Selenocysteine
  MOD_RES (2038)..(2038): Selenocysteine
  MOD_RES (2042)..(2042): Selenocysteine
  MOD_RES (2060)..(2060): Selenocysteine
  MOD_RES (2062)..(2062): Selenocysteine
  MOD_RES (2080)..(2080): Selenocysteine
  MOD_RES (2085)..(2085): Selenocysteine
  MOD_RES (2112)..(2112): Selenocysteine
  MOD_RES (2144)..(2144): Selenocysteine
  MOD_RES (2157)..(2157): Selenocysteine
  MOD_RES (2236)..(2236): Selenocysteine
  MOD_RES (2238)..(2238): Selenocysteine
  MOD_RES (2255)..(2255): Selenocysteine
  MOD_RES (2262)..(2262): Selenocysteine
  MOD_RES (2274)..(2274): Selenocysteine
  MOD_RES (2322)..(2322): Selenocysteine
  MOD_RES (2342)..(2342): Selenocysteine
  MOD_RES (2385)..(2385): Selenocysteine
  MOD_RES (2393)..(2393): Selenocysteine
  MOD_RES (2416)..(2416): Selenocysteine
  MOD_RES (2419)..(2419): Selenocysteine
  MOD_RES (2427)..(2427): Selenocysteine
  MOD_RES (2431)..(2431): Selenocysteine
  MOD_RES (2477)..(2477): Selenocysteine
  MOD_RES (2480)..(2480): Selenocysteine
MGASSPRSPEPVGPPAPGLPFCCGGSLLAVVVLLALPVAWGQCNAPEWLPFARPXNLXDEFEFPIGXYLNYECRPGYSGRPFSIICLKNSVWXGAKDRCRRKSCRNPPDPVNGMVHVIKGIQFGSQIKYSCXKGYRLIGSSSAXCIISGDXVIWDNEXPICDRIPCGLPPXIXNGDFISXNRENFHYGSVVXYRCNPGSGGRKVFELVGEPSIYCXSNDDQVGIWSGPAPQCIIPNKCXPPNVENGILVSDNRSLFSLNEVVEFRCQPGFVMKGPRRVKCQALNKWEPELPSCSRVCQPPPDVLHAERXQRDKDNFSPGQEVFYSCEPGYDLRGAASMRCXPQGDWSPAAPXCEVKSCDDFMGQLLNGRVLFPVNLQLGAKVDFVCDEGFQLKGSSASYCVLAGMESLWNSSVPVCEQIFCPSPPVIPNGRHXGKPLEVFPFGKXVNYXCDPHPDRGXSFDLIGESXIRCXSDPQGNGVWSSPAPRCGILGHCQAPDHFLFAKLKXQXNASDFPIGXSLKYECRPEYYGRPFSIXCLDNLVWSSPKDVCKRKSCKXPPDPVNGMVHVIXDIQVGSRINYSCXXGHRLIGHSSAECILSGNAAHWSXKPPICQRIPCGLPPXIANGDFISXNRENFHYGSVVXYRCNPGSGGRKVFELVGEPSIYCXSNDDQVGIWSGPAPQCIIPNKCXPPNVENGILVSDNRSLFSLNEVVEFRCQPGFVMKGPRRVKCQALNKWEPELPSCSRVCQPPPDVLHAERXQRDKDNFSPGQEVFYSCEPGYDLRGAASMRCXPQGDWSPAAPXCEVKSCDDFMGQLLNGRVLFPVNLQLGAKVDFVCDEGFQLKGSSASYCVLAGMESLWNSSVPVCEQIFCPSPPVIPNGRHXGKPLEVFPFGKXVNYXCDPHPDRGXSFDLIGESXIRCXSDPQGNGVWSSPAPRCGILGHCQAPDHFLFAKLKXQXNASDFPIGXSLKYECRPEYYGRPFSIXCLDNLVWSSPKDVCKRKSCKXPPDPVNGMVHVIXDIQVGSRINYSCXXGHRLIGHSSAECILSGNAAHWSXKPPICQRIPCGLPPXIANGDFISXNRENFHYGSVVXYRCNPGSGGRKVFELVGEPSIYCXSNDDQVGIWSGPAPQCIIPNKCXPPNVENGILVSDNRSLFSLNEVVEFRCQPGFVMKGPRRVKCQALNKWEPELPSCSRVCQPPPDVLHAERXQRDKDNFSPGQEVFYSCEPGYDLRGAASMRCXPQGDWSPAAPXCEVKSCDDFMGQLLNGRVLFPVNLQLGAKVDFVCDEGFQLKGSSASYCVLAGMESLWNSSVPVCEQIFCPSPPVIPNGRHXGKPLEVFPFGKAVNYXCDPHPDRGXSFDLIGESXIRCXSDPQGNGVWSSPAPRCGILGHCQAPDHFLFAKLKXQXNASDFPIGXSLKYECRPEYYGRPFSIXCLDNLVWSSPKDVCKRKSCKXPPDPVNGMVHVIXDIQVGSRINYSCXXGHRLIGHSSAECILSGNXAHWSXKPPICQRIPCGLPPXIANGDFISXNRENFHYGSVVXYRCNLGSRGRKVFELVGEPSIYCXSNDDQVGIWSGPAPQCIIPNKCXPPNVENGILVSDNRSLFSLNEVVEFRCQPGFVMKGPRRVKCQALNKWEPELPSCSRVCQPPPEILHGEHXPSHQDNFSPGQEVFYSCEPGYDLRGAASLHCXPQGDWSPEAPRCAVKSCDDFLGQLPHGRVLFPLNLQLGAKVSFVCDEGFRLKGSSVSHCVLVGMRSLWNNSVPVCEHIFCPNPPAILNGRHXGXPSGDIPYGKEISYXCDPHPDRGMXFNLIGESXIRCXSDPHGNGVWSSPAPRCELSVRAGHCKXPEQFPFASPXIPINDFEFPVGXSLNYECRPGYFGKMFSISCLENLVWSSVEDNCRRKSCGPPPEPFNGMVHINXDXQFGSXVNYSCNEGFRLIGSPSXXCLVSGNNVXWDKKAPICEIISCEPPPXISNGDFYSNNRXSFHNGXVVXYQCHXGPDGEQLFELVGERSIYCXSKDDQVGVWSSPPPRCISXNKCXAPEVENAIRVPGNRSFFXLXEIIRFRCQPGFVMVGSHXVQCQXNGRWGPKLPHCSRVCQPPPEILHGEHXLSHQDNFSPGQEVFYSCEPSYDLRGAASLHCXPQGDWSPEAPRCXVKSCDDFLGQLPHGRVLLPLNLQLGAKVSFVCDEGFRLKGRSASHCVLAGMKALWNSSVPVCEQIFCPNPPAILNGRHXGXPFGDIPYGKEISYACDXHPDRGMXFNLIGESSIRCXSDPQGNGVWSSPAPRCELSVPAACPHPPKIQNGHYIGGHVSLYLPGMXISYICDPGYLLVGKGFIFCXDQGIWSQLDHYCKEVNCSFPLFMNGISKELEMKKVYHYGDYVXLKCEDGYXLEGSPWSQCQADDRWDPPLAKCXSRXHDALIVGXLSGXIFFILLIIFLSWIILKHRKGNNAHENPKEVAIHLHSQGGSSVHPRXLQXNEENSRVLP

SEQ ID NO: 6825 - protein, 661 aa, Homo sapiens
  MOD_RES (1)..(1): Any amino acid
  MOD_RES (31)..(31): Selenocysteine
  MOD_RES (34)..(34): Selenocysteine
  MOD_RES (43)..(43): Selenocysteine
  MOD_RES (69)..(69): Selenocysteine
  MOD_RES (108)..(108): Selenocysteine
  MOD_RES (120)..(120): Selenocysteine
  MOD_RES (127)..(127): Selenocysteine
  MOD_RES (134)..(134): Selenocysteine
  MOD_RES (147)..(147): Selenocysteine
  MOD_RES (149)..(149): Selenocysteine
  MOD_RES (156)..(156): Selenocysteine
  MOD_RES (168)..(168): Selenocysteine
  MOD_RES (192)..(192): Selenocysteine
  MOD_RES (215)..(215): Selenocysteine
  MOD_RES (285)..(285): Selenocysteine
  MOD_RES (317)..(317): Selenocysteine
  MOD_RES (328)..(328): Selenocysteine
  MOD_RES (409)..(409): Selenocysteine
  MOD_RES (411)..(411): Selenocysteine
  MOD_RES (428)..(428): Selenocysteine
  MOD_RES (435)..(435): Selenocysteine
  MOD_RES (447)..(447): Selenocysteine
  MOD_RES (495)..(495): Selenocysteine
  MOD_RES (515)..(515): Selenocysteine
  MOD_RES (558)..(558): Selenocysteine
  MOD_RES (566)..(566): Selenocysteine
  MOD_RES (589)..(589): Selenocysteine
  MOD_RES (592)..(592): Selenocysteine
  MOD_RES (600)..(600): Selenocysteine
  MOD_RES (604)..(604): Selenocysteine
  MOD_RES (650)..(650): Selenocysteine
  MOD_RES (653)..(653): Selenocysteine
XSLLAVVVLLALPVAWGQCNAPEWLPFARPXNLXDEFEFPIGXYLNYECRPGYSGRPFSIICLKNSVWXGAKDRCRRKSCRNPPDPVNGMVHVIKGIQFGSQIKYSCXKGYRLIGSSSAXCIISGDXVIWDNEXPICDRIPCGLPPXIXNGDFISXNRENFHYGSVVXYRCNPGSGGRKVFELVGEPSIYCXSNDDQVGIWSGPAPQCIIPNKCXPPNVENGILVSDNRSLFSLNEVVEFRCQPGFVMKGPRRVKCQALNKWEPELPSCSRVCQPPPDVLHAERXQRDKDNFSPGQEVFYSCEPGYDLRGAASMRCXPQGDWSPAAPXCEVKSCDDFMGQLLNGRVLFPVNLQLGAKVDFVCDEGFQLKGSSASYCVLAGMESLWNSSVPVCEQIFCPNPPAILNGRHXGXPFGDIPYGKEISYACDXHPDRGMXFNLIGESSIRCXSDPQGNGVWSSPAPRCELSVPAACPHPPKIQNGHYIGGHVSLYLPGMXISYICDPGYLLVGKGFIFCXDQGIWSQLDHYCKEVNCSFPLFMNGISKELEMKKVYHYGDYVXLKCEDGYXLEGSPWSQCQADDRWDPPLAKCXSRXHDALIVGXLSGXIFFILLIIFLSWIILKHRKGNNAHENPKEVAIHLHSQGGSSVHPRXLQXNEENSRYL

SEQ ID NO: 6826 - protein, 971 aa, Homo sapiens
  MOD_RES (39)..(39): Selenocysteine
  MOD_RES (45)..(45): Selenocysteine
  MOD_RES (54)..(54): Selenocysteine
  MOD_RES (67)..(67): Selenocysteine
  MOD_RES (74)..(74): Selenocysteine
  MOD_RES (106)..(106): Selenocysteine
  MOD_RES (115)..(115): Selenocysteine
  MOD_RES (120)..(120): Selenocysteine
  MOD_RES (141)..(141): Selenocysteine
  MOD_RES (145)..(145): Selenocysteine
  MOD_RES (166)..(166): Selenocysteine
  MOD_RES (180)..(180): Selenocysteine
  MOD_RES (209)..(209): Selenocysteine
  MOD_RES (237)..(237): Selenocysteine
  MOD_RES (266)..(266): Selenocysteine
  MOD_RES (302)..(302): Selenocysteine
  MOD_RES (304)..(304): Selenocysteine
  MOD_RES (322)..(322): Selenocysteine
  MOD_RES (326)..(326): Selenocysteine
  MOD_RES (332)..(332): Selenocysteine
  MOD_RES (334)..(334): Selenocysteine
  MOD_RES (346)..(346): Selenocysteine
  MOD_RES (370)..(370): Selenocysteine
  MOD_RES (374)..(374): Selenocysteine
  MOD_RES (384)..(384): Selenocysteine
  MOD_RES (398)..(398): Selenocysteine
  MOD_RES (433)..(433): Selenocysteine
  MOD_RES (454)..(454): Selenocysteine
  MOD_RES (460)..(460): Selenocysteine
  MOD_RES (474)..(474): Selenocysteine
  MOD_RES (480)..(480): Selenocysteine
  MOD_RES (512)..(512): Selenocysteine
  MOD_RES (526)..(526): Selenocysteine
  MOD_RES (539)..(539): Selenocysteine
  MOD_RES (550)..(551): Selenocysteine
  MOD_RES (553)..(553): Selenocysteine
  MOD_RES (555)..(555): Selenocysteine
  MOD_RES (573)..(573): Selenocysteine
  MOD_RES (577)..(577): Selenocysteine
  MOD_RES (585)..(585): Selenocysteine
  MOD_RES (625)..(625): Selenocysteine
  MOD_RES (627)..(627): Selenocysteine
  MOD_RES (635)..(635): Selenocysteine
  MOD_RES (649)..(649): Selenocysteine
  MOD_RES (661)..(661): Selenocysteine
  MOD_RES (683)..(683): Selenocysteine
  MOD_RES (692)..(692): Selenocysteine
  MOD_RES (731)..(731): Selenocysteine
  MOD_RES (786)..(786): Selenocysteine
  MOD_RES (802)..(802): Selenocysteine
  MOD_RES (832)..(832): Selenocysteine
  MOD_RES (835)..(835): Selenocysteine
  MOD_RES (842)..(842): Selenocysteine
  MOD_RES (876)..(876): Selenocysteine
  MOD_RES (926)..(926): Selenocysteine
  MOD_RES (932)..(932): Selenocysteine
  MOD_RES (946)..(946): Selenocysteine
  MOD_RES (948)..(948): Selenocysteine
MGAAGLLGVFLALVAPGVLGISCGSPPPILNGRISYYSXPIAVGXVIRYSCSGXFRLIGEKSLLCIXKDKVDGXWDKPAPKCEYFNKYSSCPEPIVPGGYKIRGSXPYRHGDSVXFACKXNFSMNGNKSVWCQANNMWGPXRLPXCVSVFPLECPALPMIHNGHHXSENVGSIAPGLSVXYSCESGYLLVGEKIINCLSSGKWSAVPPXCEEARCKSLGRFPNGKVKEPPILRVGVXANFFCDEGYRLQGPPSSRCVIAGQGVAWXKMPVCEEIFCPSPPPILNGRHIGNSLANVSYGSIVXYXCDPDPEEGVNFILIGESXLRCXVDSQKXGXWSGPAPRCELSXSAVQCPHPQILRGRMVSGQKDRYXYNDXVIFACMFGFXLKGSKQIRCNAQGXWEPSAPVCEKECQAPPNILNGQKEDRHMVRFDPGXSIKYSCNPGYVLVGEESIQCXSEGVWXPPVPQCKVAACEAXGRQLLXKPQHQFVRPDVNSSCGEGYKLSGSVYQECQGXIPWFMEIRLCKEIXCPPPPVIYNGAHXGSSLEDFPYGXXVXYXCNPGPERGVEFSLIGESXIRCXSNDQERGXWSGPAPLCKLSLLAVQCSHVHIANGYKISGKEAPYFYNDXVXFKCYSGFXLKGSSQIRCKADNXWDPEIPVCEKEXCQHVRQSLQELPAGSRVELVNXSCQDGYQLXGHAYQMCQDAENGIWFKKIPLCKVIHCHPPPVIVNGKHXGMMAENFLYGNEVSYECDQGFYLLGEKKLQCRSDSKGHGSWSGPSPQCLRSPPVXRCPNPEVKHGYKLNKXHSAYSHNDIVYVDCNPGFIMNGSRVIRCHXDNXWVPGVPXCIKKEVNCSSPADMDGIQKGLEPRKMYQYGAVVXLECEDGYMLEGSPQSQCQSDHQWNPPLAVCRSRSLAPVLCGIAAGLILLXFLIVIXLYVISKHRARNYYXDXSQKEAFHLEAREVYSVDPYNPAS

SEQ ID NO: 6827 - protein, 1033 aa, Homo sapiens
  MOD_RES (39)..(39): Selenocysteine
  MOD_RES (45)..(45): Selenocysteine
  MOD_RES (54)..(54): Selenocysteine
  MOD_RES (67)..(67): Selenocysteine
  MOD_RES (74)..(74): Selenocysteine
  MOD_RES (106)..(106): Selenocysteine
  MOD_RES (115)..(115): Selenocysteine
  MOD_RES (120)..(120): Selenocysteine
  MOD_RES (141)..(141): Selenocysteine
  MOD_RES (145)..(145): Selenocysteine
  MOD_RES (166)..(166): Selenocysteine
  MOD_RES (180)..(180): Selenocysteine
  MOD_RES (209)..(209): Selenocysteine
  MOD_RES (237)..(237): Selenocysteine
  MOD_RES (266)..(266): Selenocysteine
  MOD_RES (302)..(302): Selenocysteine
  MOD_RES (304)..(304): Selenocysteine
  MOD_RES (322)..(322): Selenocysteine
  MOD_RES (326)..(326): Selenocysteine
  MOD_RES (332)..(332): Selenocysteine
  MOD_RES (334)..(334): Selenocysteine
  MOD_RES (346)..(346): Selenocysteine
  MOD_RES (370)..(370): Selenocysteine
  MOD_RES (374)..(374): Selenocysteine
  MOD_RES (384)..(384): Selenocysteine
  MOD_RES (398)..(398): Selenocysteine
  MOD_RES (433)..(433): Selenocysteine
  MOD_RES (454)..(454): Selenocysteine
  MOD_RES (460)..(460): Selenocysteine
  MOD_RES (474)..(474): Selenocysteine
  MOD_RES (480)..(480): Selenocysteine
  MOD_RES (512)..(512): Selenocysteine
  MOD_RES (526)..(526): Selenocysteine
  MOD_RES (539)..(539): Selenocysteine
  MOD_RES (550)..(551): Selenocysteine
  MOD_RES (553)..(553): Selenocysteine
  MOD_RES (555)..(555): Selenocysteine
  MOD_RES (573)..(573): Selenocysteine
  MOD_RES (577)..(577): Selenocysteine
  MOD_RES (585)..(585): Selenocysteine
  MOD_RES (625)..(625): Selenocysteine
  MOD_RES (627)..(627): Selenocysteine
  MOD_RES (635)..(635): Selenocysteine
  MOD_RES (649)..(649): Selenocysteine
  MOD_RES (661)..(661): Selenocysteine
  MOD_RES (683)..(683): Selenocysteine
  MOD_RES (692)..(692): Selenocysteine
  MOD_RES (731)..(731): Selenocysteine
  MOD_RES (786)..(786): Selenocysteine
  MOD_RES (802)..(802): Selenocysteine
  MOD_RES (832)..(832): Selenocysteine
  MOD_RES (835)..(835): Selenocysteine
  MOD_RES (842)..(842): Selenocysteine
  MOD_RES (857)..(857): Selenocysteine
  MOD_RES (863)..(863): Selenocysteine
  MOD_RES (895)..(895): Selenocysteine
  MOD_RES (899)..(899): Selenocysteine
  MOD_RES (938)..(938): Selenocysteine
  MOD_RES (988)..(988): Selenocysteine
  MOD_RES (994)..(994): Selenocysteine
  MOD_RES (1008)..(1008): Selenocysteine
  MOD_RES (1010)..(1010): Selenocysteine
MGAAGLLGVFLALVAPGVLGISCGSPPPILNGRISYYSXPIAVGXVIRYSCSGXFRLIGEKSLLCIXKDKVDGXWDKPAPKCEYFNKYSSCPEPIVPGGYKIRGSXPYRHGDSVXFACKXNFSMNGNKSVWCQANNMWGPXRLPXCVSVFPLECPALPMIHNGHHXSENVGSIAPGLSVXYSCESGYLLVGEKIINCLSSGKWSAVPPXCEEARCKSLGRFPNGKVKEPPILRVGVXANFFCDEGYRLQGPPSSRCVIAGQGVAWXKMPVCEEIFCPSPPPILNGRHIGNSLANVSYGSIVXYXCDPDPEEGVNFILIGESXLRCXVDSQKXGXWSGPAPRCELSXSAVQCPHPQILRGRMVSGQKDRYXYNDXVIFACMFGFXLKGSKQIRCNAQGXWEPSAPVCEKECQAPPNILNGQKEDRHMVRFDPGXSIKYSCNPGYVLVGEESIQCXSEGVWXPPVPQCKVAACEAXGRQLLXKPQHQFVRPDVNSSCGEGYKLSGSVYQECQGXIPWFMEIRLCKEIXCPPPPVIYNGAHXGSSLEDFPYGXXVXYXCNPGPERGVEFSLIGESXIRCXSNDQERGXWSGPAPLCKLSLLAVQCSHVHIANGYKISGKEAPYFYNDXVXFKCYSGFXLKGSSQIRCKADNXWDPEIPVCEKEXCQHVRQSLQELPAGSRVELVNXSCQDGYQLXGHAYQMCQDAENGIWFKKIPLCKVIHCHPPPVIVNGKHXGMMAENFLYGNEVSYECDQGFYLLGEKKLQCRSDSKGHGSWSGPSPQCLRSPPVXRCPNPEVKHGYKLNKXHSAYSHNDIVYVDCNPGFIMNGSRVIRCHXDNXWVPGVPXCIKKAFIGCPPPPKXPNGNHXGGNIARFSPGMSILYSCDQGYLLVGEALLLCXHEGXWSQPAPHCKEVNCSSPADMDGIQKGLEPRKMYQYGAVVXLECEDGYMLEGSPQSQCQSDHQWNPPLAVCRSRSLAPVLCGIAAGLILLXFLIVIXLYVISKHRARNYYXDXSQKEAFHLEAREVYSVDPYNPAS

SEQ ID NO: 6828 - protein, 1092 aa, Homo sapiens
  MOD_RES (39)..(39): Selenocysteine
  MOD_RES (45)..(45): Selenocysteine
  MOD_RES (54)..(54): Selenocysteine
  MOD_RES (67)..(67): Selenocysteine
  MOD_RES (74)..(74): Selenocysteine
  MOD_RES (106)..(106): Selenocysteine
  MOD_RES (115)..(115): Selenocysteine
  MOD_RES (120)..(120): Selenocysteine
  MOD_RES (141)..(141): Selenocysteine
  MOD_RES (145)..(145): Selenocysteine
  MOD_RES (166)..(166): Selenocysteine
  MOD_RES (180)..(180): Selenocysteine
  MOD_RES (209)..(209): Selenocysteine
  MOD_RES (237)..(237): Selenocysteine
  MOD_RES (266)..(266): Selenocysteine
  MOD_RES (302)..(302): Selenocysteine
  MOD_RES (304)..(304): Selenocysteine
  MOD_RES (322)..(322): Selenocysteine
  MOD_RES (326)..(326): Selenocysteine
  MOD_RES (332)..(332): Selenocysteine
  MOD_RES (334)..(334): Selenocysteine
  MOD_RES (346)..(346): Selenocysteine
  MOD_RES (370)..(370): Selenocysteine
  MOD_RES (374)..(374): Selenocysteine
  MOD_RES (384)..(384): Selenocysteine
  MOD_RES (398)..(398): Selenocysteine
  MOD_RES (433)..(433): Selenocysteine
  MOD_RES (454)..(454): Selenocysteine
  MOD_RES (460)..(460): Selenocysteine
  MOD_RES (474)..(474): Selenocysteine
  MOD_RES (480)..(480): Selenocysteine
  MOD_RES (512)..(512): Selenocysteine
  MOD_RES (526)..(526): Selenocysteine
  MOD_RES (539)..(539): Selenocysteine
  MOD_RES (550)..(551): Selenocysteine
  MOD_RES (553)..(553): Selenocysteine
  MOD_RES (555)..(555): Selenocysteine
  MOD_RES (573)..(573): Selenocysteine
  MOD_RES (577)..(577): Selenocysteine
  MOD_RES (585)..(585): Selenocysteine
  MOD_RES (625)..(625): Selenocysteine
  MOD_RES (627)..(627): Selenocysteine
  MOD_RES (635)..(635): Selenocysteine
  MOD_RES (649)..(649): Selenocysteine
  MOD_RES (673)..(673): Selenocysteine
  MOD_RES (677)..(677): Selenocysteine
  MOD_RES (685)..(685): Selenocysteine
  MOD_RES (689)..(689): Selenocysteine
  MOD_RES (720)..(720): Selenocysteine
  MOD_RES (742)..(742): Selenocysteine
  MOD_RES (751)..(751): Selenocysteine
  MOD_RES (790)..(790): Selenocysteine
  MOD_RES (845)..(845): Selenocysteine
  MOD_RES (861)..(861): Selenocysteine
  MOD_RES (891)..(891): Selenocysteine
  MOD_RES (894)..(894): Selenocysteine
  MOD_RES (901)..(901): Selenocysteine
  MOD_RES (916)..(916): Selenocysteine
  MOD_RES (922)..(922): Selenocysteine
  MOD_RES (954)..(954): Selenocysteine
  MOD_RES (958)..(958): Selenocysteine
  MOD_RES (997)..(997): Selenocysteine
  MOD_RES (1047)..(1047): Selenocysteine
  MOD_RES (1053)..(1053): Selenocysteine
  MOD_RES (1067)..(1067): Selenocysteine
  MOD_RES (1069)..(1069): Selenocysteine
MGAAGLLGVFLALVAPGVLGISCGSPPPILNGRISYYSXPIAVGXVIRYSCSGXFRLIGEKSLLCIXKDKVDGXWDKPAPKCEYFNKYSSCPEPIVPGGYKIRGSXPYRHGDSVXFACKXNFSMNGNKSVWCQANNMWGPXRLPXCVSVFPLECPALPMIHNGHHXSENVGSIAPGLSVXYSCESGYLLVGEKIINCLSSGKWSAVPPXCEEARCKSLGRFPNGKVKEPPILRVGVXANFFCDEGYRLQGPPSSRCVIAGQGVAWXKMPVCEEIFCPSPPPILNGRHIGNSLANVSYGSIVXYXCDPDPEEGVNFILIGESXLRCXVDSQKXGXWSGPAPRCELSXSAVQCPHPQILRGRMVSGQKDRYXYNDXVIFACMFGFXLKGSKQIRCNAQGXWEPSAPVCEKECQAPPNILNGQKEDRHMVRFDPGXSIKYSCNPGYVLVGEESIQCXSEGVWXPPVPQCKVAACEAXGRQLLXKPQHQFVRPDVNSSCGEGYKLSGSVYQECQGXIPWFMEIRLCKEIXCPPPPVIYNGAHXGSSLEDFPYGXXVXYXCNPGPERGVEFSLIGESXIRCXSNDQERGXWSGPAPLCKLSLLAVQCSHVHIANGYKISGKEAPYFYNDXVXFKCYSGFXLKGSSQIRCKADNXWDPEIPVCEKGCQSPPGLHHGRHXGGNXVFFVSGMXVDYXCDPGYLLVGNKSIHCMPSGNWSPSAPRCEEXCQHVRQSLQELPAGSRVELVNXSCQDGYQLXGHAYQMCQDAENGIWFKKIPLCKVIHCHPPPVIVNGKHXGMMAENFLYGNEVSYECDQGFYLLGEKKLQCRSDSKGHGSWSGPSPQCLRSPPVXRCPNPEVKHGYKLNKXHSAYSHNDIVYVDCNPGFIMNGSRVIRCHXDNXWVPGVPXCIKKAFIGCPPPPKXPNGNHXGGNIARFSPGMSILYSCDQGYLLVGEALLLCXHEGXWSQPAPHCKEVNCSSPADMDGIQKGLEPRKMYQYGAVVXLECEDGYMLEGSPQSQCQSDHQWNPPLAVCRSRSLAPVLCGIAAGLILLXFLIVIXLYVISKHRARNYYXDXSQKEAFHLEAREVYSVDPYNPAS

SEQ ID NO: 6829 - protein, 137 aa, Homo sapiens
  MOD_RES (7)..(7): Selenocysteine
  MOD_RES (55)..(55): Selenocysteine
  MOD_RES (57)..(58): Selenocysteine
  MOD_RES (61)..(62): Selenocysteine
  MOD_RES (76)..(76): Selenocysteine
  MOD_RES (87)..(87): Selenocysteine
  MOD_RES (97)..(97): Selenocysteine
  MOD_RES (99)..(99): Selenocysteine
  MOD_RES (108)..(108): Selenocysteine
  MOD_RES (111)..(111): Selenocysteine
  MOD_RES (122)..(122): Selenocysteine
  MOD_RES (131)..(131): Selenocysteine
MPNFAGXWKMRSSENFDELLKALGVNAMLRKVAVAAASKPHVEIRQDGDQFYIKXSXXVRXXEINFKVGEGFEEEXVDGRKCRSLAXWENENKIHCXQXLLEGDGPKXYWXRELANDELILXFGADDVVCXRIYVRE

SEQ ID NO: 6830 - protein, 113 aa, Homo sapiens
  MOD_RES (1)..(1): Any amino acid
  MOD_RES (40)..(40): Selenocysteine
  MOD_RES (42)..(43): Selenocysteine
  MOD_RES (46)..(47): Selenocysteine
  MOD_RES (61)..(61): Selenocysteine
XDELLKALGVNAMLRKVAVAAASKPHVEIRQDGDQFYIKXSXXVRXXEINFKVGEGFEEEXVDGRKCRVRPQSHYSVPVSPLGAHGPLLLEEPVSPFAACGAPSLQEFSHLGE

SEQ ID NO: 6831 - protein, 82 aa, Homo sapiens
  MOD_RES (50)..(50): Selenocysteine
  MOD_RES (55)..(55): Selenocysteine
  MOD_RES (57)..(58): Selenocysteine
  MOD_RES (61)..(62): Selenocysteine
  MOD_RES (76)..(76): Selenocysteine
MPNFSGNWKIIRSENFEELLKVLGVNVMLRKIAVAAASKPAVEIKQEGDXFYIKXSXXVRXXEINFKVGEEFEEQXVDGRPC

SEQ ID NO: 6832 - protein, 138 aa, Homo sapiens
  MOD_RES (50)..(50): Selenocysteine
  MOD_RES (55)..(55): Selenocysteine
  MOD_RES (57)..(58): Selenocysteine
  MOD_RES (61)..(62): Selenocysteine
  MOD_RES (76)..(76): Selenocysteine
  MOD_RES (108)..(108): Selenocysteine
  MOD_RES (111)..(111): Selenocysteine
  MOD_RES (115)..(115): Selenocysteine
  MOD_RES (123)..(123): Selenocysteine
  MOD_RES (125)..(125): Selenocysteine
  MOD_RES (132)..(132): Selenocysteine
MPNFSGNWKIIRSENFEELLKVLGVNVMLRKIAVAAASKPAVEIKQEGDXFYIKXSXXVRXXEINFKVGEEFEEQXVDGRPCKSLVKWESENKMVCEQKLLKGEGPKXSWXRELXNDGELILXMXADDVVCXRVYVRE

SEQ ID NO: 6833 - protein, 121 aa, Homo sapiens
  MOD_RES (37)..(37): Selenocysteine
  MOD_RES (48)..(49): Selenocysteine
  MOD_RES (54)..(54): Selenocysteine
  MOD_RES (71)..(71): Selenocysteine
  MOD_RES (95)..(95): Selenocysteine
  MOD_RES (111)..(111): Selenocysteine
  MOD_RES (118)..(118): Selenocysteine
MEARDKQVLRSLRLELGAEVLVEGLVLQYLYQEGILXENHIQEINAQXXGLRKXMLLLDILPSRGPKAFDXFLDSLQEFPWVREKLKKAREEAMXDLPAEMRKLRPKDSVXCLASQLXWRF

SEQ ID NO: 6834 - protein, 103 aa, Homo sapiens
  MOD_RES (37)..(37): Selenocysteine
  MOD_RES (48)..(49): Selenocysteine
  MOD_RES (54)..(54): Selenocysteine
  MOD_RES (71)..(71): Selenocysteine
  MOD_RES (95)..(95): Selenocysteine
MEARDKQVLRSLRLELGAEVLVEGLVLQYLYQEGILXENHIQEINAQXXGLRKXMLLLDILPSRGPKAFDXFLDSLQEFPWVREKLKKAREEAMXDLPAGCWP

SEQ ID NO: 6835 - protein, 199 aa, Homo sapiens
  MOD_RES (37)..(37): Selenocysteine
  MOD_RES (48)..(49): Selenocysteine
  MOD_RES (54)..(54): Selenocysteine
  MOD_RES (71)..(71): Selenocysteine
  MOD_RES (95)..(95): Selenocysteine
  MOD_RES (104)..(104): Selenocysteine
  MOD_RES (143)..(143): Selenocysteine
  MOD_RES (176)..(176): Selenocysteine
MEARDKQVLRSLRLELGAEVLVEGLVLQYLYQEGILXENHIQEINAQXXGLRKXMLLLDILPSRGPKAFDXFLDSLQEFPWVREKLKKAREEAMXDLPAGDRLXGIPSHILNSSPSDRQINQLAQRLGPEWEPMVLSLGLSQXDIYRCKANHPHNVQSQVVEAFIRWRQRFGKQAXFQSLHNGLRAVEVDPSLLLHMLE

SEQ ID NO: 6836 - protein, 130 aa, Homo sapiens
  MOD_RES (37)..(37): Selenocysteine
  MOD_RES (48)..(49): Selenocysteine
  MOD_RES (54)..(54): Selenocysteine
  MOD_RES (71)..(71): Selenocysteine
  MOD_RES (95)..(95): Selenocysteine
  MOD_RES (107)..(107): Selenocysteine
  MOD_RES (125)..(125): Selenocysteine
  MOD_RES (130)..(130): Selenocysteine
MEARDKQVLRSLRLELGAEVLVEGLVLQYLYQEGILXENHIQEINAQXXGLRKXMLLLDILPSRGPKAFDXFLDSLQEFPWVREKLKKAREEAMXDLPAGLEEKGRXGRRMGWGAGEEKGQKCQXVGMRX

SEQ ID NO: 6837 - protein, 115 aa, Homo sapiens
  MOD_RES (37)..(37): Selenocysteine
  MOD_RES (48)..(49): Selenocysteine
  MOD_RES (54)..(54): Selenocysteine
  MOD_RES (71)..(71): Selenocysteine
  MOD_RES (95)..(95): Selenocysteine
  MOD_RES (113)..(113): Selenocysteine
MEARDKQVLRSLRLELGAEVLVEGLVLQYLYQEGILXENHIQEINAQXXGLRKXMLLLDILPSRGPKAFDXFLDSLQEFPWVREKLKKAREEAMXDLPAVAIIRLPRELSLPXLL

SEQ ID NO: 6838 - protein, 42 aa, Homo sapiens
EKDIDECASDPCVNGGLCQDLLNKFQCLCDVAFAGERCEVDY

SEQ ID NO: 6839 - protein, 870 aa, Homo sapiens
  MOD_RES (32)..(32): Selenocysteine
  MOD_RES (44)..(44): Selenocysteine
  MOD_RES (59)..(59): Selenocysteine
  MOD_RES (84)..(84): Selenocysteine
  MOD_RES (88)..(88): Selenocysteine
  MOD_RES (105)..(105): Selenocysteine
  MOD_RES (109)..(110): Selenocysteine
  MOD_RES (200)..(200): Selenocysteine
  MOD_RES (209)..(209): Selenocysteine
  MOD_RES (238)..(238): Selenocysteine
  MOD_RES (263)..(263): Selenocysteine
  MOD_RES (289)..(289): Selenocysteine
  MOD_RES (294)..(294): Selenocysteine
  MOD_RES (296)..(296): Selenocysteine
  MOD_RES (300)..(300): Selenocysteine
  MOD_RES (315)..(315): Selenocysteine
  MOD_RES (324)..(324): Selenocysteine
  MOD_RES (332)..(332): Selenocysteine
  MOD_RES (367)..(367): Selenocysteine
  MOD_RES (390)..(390): Selenocysteine
  MOD_RES (411)..(411): Selenocysteine
  MOD_RES (420)..(420): Selenocysteine
  MOD_RES (431)..(431): Selenocysteine
  MOD_RES (446)..(446): Selenocysteine
  MOD_RES (455)..(455): Selenocysteine
  MOD_RES (476)..(476): Selenocysteine
  MOD_RES (484)..(485): Selenocysteine
  MOD_RES (502)..(503): Selenocysteine
  MOD_RES (516)..(516): Selenocysteine
  MOD_RES (562)..(562): Selenocysteine
  MOD_RES (579)..(579): Selenocysteine
  MOD_RES (581)..(581): Selenocysteine
  MOD_RES (597)..(597): Selenocysteine
  MOD_RES (621)..(621): Selenocysteine
  MOD_RES (636)..(636): Selenocysteine
  MOD_RES (654)..(654): Selenocysteine
  MOD_RES (721)..(721): Selenocysteine
  MOD_RES (728)..(728): Selenocysteine
  MOD_RES (731)..(731): Selenocysteine
  MOD_RES (739)..(739): Selenocysteine
  MOD_RES (743)..(743): Selenocysteine
  MOD_RES (754)..(754): Selenocysteine
  MOD_RES (810)..(811): Selenocysteine
  MOD_RES (816)..(816): Selenocysteine
  MOD_RES (833)..(833): Selenocysteine
  MOD_RES (839)..(839): Selenocysteine
  MOD_RES (842)..(842): Selenocysteine
MALKNINYLLIFYLSFSLLIYIKNSFCNKNNXRCLSNSCQNNSXCKDFSKDNDCSCSDXANNLDKDCDNMKDPCFSNPCQGSAXCVNXPGERSFLCKCPPGYSGXICEXXIGSCGKNSCQHGGICHQDPIYPVCICPAGYAGRFCEIDHDECASSPCQNGAVCQDGIDGYSCFCVPGYQGRHCDLEVDECASDPCKNEAXCLNEIGRYXCICPHNYSGVNCELEIDECWSQPCLNGAXCQDALGAYFCDCAPGFLGDHCELNXDECASQPCLHGGLCVDGENRYSCNCXGSGFXGXHCEXLMPLCWSKPCHNNAXCEDSVDNYXCHCWPGYXGAQCEIDLNECNSNPCQSNGECVELSSEKQYGRIXGLPSSFSYHEASGYVCICQPGFXGIHCEEDVNECSSNPCQNGGXCENLPGNYXCHCPFDNLSRXFYGGRDCSDILLGCXHQQCLNNGXCIPHFQDGQHGFSCLCPSGYXGSLCEIAXXLSFEGDGFLWVKSGSVXXKGSVCNIALRFQXVQPMALLLFRSNRDVFVKLELLSGYIHLSIQVNNQSKVLLFISHNXSDGEWHFVEVIFAEAVXLXLIDDSCKEKCIAKAPXPLESDQSICAFQNSFLGGLPVGMXSNGVALLNFYNMPSXPSFVGCLQDIKIDWNHIXLENISSGSSLNVKAGCVRKDWCESQPCQSRGRCINLWLSYQCDCHRPYEGPNCLRGKFCRQSRLPSXVCGNEKXNLXCYNGGNCXEFQXELKCMCRPGFXGEWCEKDIDECASDPCVNGGLCQDLLNKFQCLCDVAFAGERCEVDLADDLISDIFXXIGSVXVALLLILLLAIVASVVXSNKRAXQGXYSPSRQEKEGSRVEMWNLMPPPAMERLI

SEQ ID NO: 6840 - protein, 1376 aa, Homo sapiens
  MOD_RES (32)..(32): Selenocysteine
  MOD_RES (44)..(44): Selenocysteine
  MOD_RES (59)..(59): Selenocysteine
  MOD_RES (84)..(84): Selenocysteine
  MOD_RES (88)..(88): Selenocysteine
  MOD_RES (105)..(105): Selenocysteine
  MOD_RES (109)..(110): Selenocysteine
  MOD_RES (200)..(200): Selenocysteine
  MOD_RES (209)..(209): Selenocysteine
  MOD_RES (238)..(238): Selenocysteine
  MOD_RES (263)..(263): Selenocysteine
  MOD_RES (289)..(289): Selenocysteine
  MOD_RES (294)..(294): Selenocysteine
  MOD_RES (296)..(296): Selenocysteine
  MOD_RES (300)..(300): Selenocysteine
  MOD_RES (315)..(315): Selenocysteine
  MOD_RES (324)..(324): Selenocysteine
  MOD_RES (332)..(332): Selenocysteine
  MOD_RES (367)..(367): Selenocysteine
  MOD_RES (390)..(390): Selenocysteine
  MOD_RES (411)..(411): Selenocysteine
  MOD_RES (420)..(420): Selenocysteine
  MOD_RES (431)..(431): Selenocysteine
  MOD_RES (446)..(446): Selenocysteine
  MOD_RES (455)..(455): Selenocysteine
  MOD_RES (476)..(476): Selenocysteine
  MOD_RES (484)..(485): Selenocysteine
  MOD_RES (502)..(503): Selenocysteine
  MOD_RES (516)..(516): Selenocysteine
  MOD_RES (562)..(562): Selenocysteine
  MOD_RES (579)..(579): Selenocysteine
  MOD_RES (581)..(581): Selenocysteine
  MOD_RES (597)..(597): Selenocysteine
  MOD_RES (621)..(621): Selenocysteine
  MOD_RES (636)..(636): Selenocysteine
  MOD_RES (654)..(654): Selenocysteine
  MOD_RES (722)..(722): Selenocysteine
  MOD_RES (728)..(728): Selenocysteine
  MOD_RES (736)..(736): Selenocysteine
  MOD_RES (745)..(745): Selenocysteine
  MOD_RES (759)..(759): Selenocysteine
  MOD_RES (776)..(776): Selenocysteine
  MOD_RES (821)..(821): Selenocysteine
  MOD_RES (841)..(841): Selenocysteine
  MOD_RES (869)..(869): Selenocysteine
  MOD_RES (882)..(882): Selenocysteine
  MOD_RES (917)..(917): Selenocysteine
  MOD_RES (970)..(970): Selenocysteine
  MOD_RES (974)..(974): Selenocysteine
  MOD_RES (977)..(977): Selenocysteine
  MOD_RES (982)..(982): Selenocysteine
  MOD_RES (1024)..(1024): Selenocysteine
  MOD_RES (1033)..(1033): Selenocysteine
  MOD_RES (1038)..(1038): Selenocysteine
  MOD_RES (1042)..(1042): Selenocysteine
  MOD_RES (1048)..(1048): Selenocysteine
  MOD_RES (1059)..(1059): Selenocysteine
  MOD_RES (1063)..(1063): Selenocysteine
  MOD_RES (1065)..(1065): Selenocysteine
  MOD_RES (1068)..(1068): Selenocysteine
  MOD_RES (1078)..(1078): Selenocysteine
  MOD_RES (1099)..(1099): Selenocysteine
  MOD_RES (1130)..(1130): Selenocysteine
  MOD_RES (1135)..(1135): Selenocysteine
  MOD_RES (1201)..(1201): Selenocysteine
  MOD_RES (1207)..(1207): Selenocysteine
  MOD_RES (1228)..(1228): Selenocysteine
  MOD_RES (1233)..(1233): Selenocysteine
  MOD_RES (1245)..(1245): Selenocysteine
  MOD_RES (1257)..(1257): Selenocysteine
  MOD_RES (1264)..(1264): Selenocysteine
  MOD_RES (1267)..(1267): Selenocysteine
  MOD_RES (1275)..(1275): Selenocysteine
  MOD_RES (1279)..(1279): Selenocysteine
  MOD_RES (1290)..(1290): Selenocysteine
MALKNINYLLIFYLSFSLLIYIKNSFCNKNNXRCLSNSCQNNSXCKDFSKDNDCSCSDXANNLDKDCDNMKDPCFSNPCQGSAXCVNXPGERSFLCKCPPGYSGXICEXXIGSCGKNSCQHGGICHQDPIYPVCICPAGYAGRFCEIDHDECASSPCQNGAVCQDGIDGYSCFCVPGYQGRHCDLEVDECASDPCKNEAXCLNEIGRYXCICPHNYSGVNCELEIDECWSQPCLNGAXCQDALGAYFCDCAPGFLGDHCELNXDECASQPCLHGGLCVDGENRYSCNCXGSGFXGXHCEXLMPLCWSKPCHNNAXCEDSVDNYXCHCWPGYXGAQCEIDLNECNSNPCQSNGECVELSSEKQYGRIXGLPSSFSYHEASGYVCICQPGFXGIHCEEDVNECSSNPCQNGGXCENLPGNYXCHCPFDNLSRXFYGGRDCSDILLGCXHQQCLNNGXCIPHFQDGQHGFSCLCPSGYXGSLCEIAXXLSFEGDGFLWVKSGSVXXKGSVCNIALRFQXVQPMALLLFRSNRDVFVKLELLSGYIHLSIQVNNQSKVLLFISHNXSDGEWHFVEVIFAEAVXLXLIDDSCKEKCIAKAPXPLESDQSICAFQNSFLGGLPVGMXSNGVALLNFYNMPSXPSFVGCLQDIKIDWNHIXLENISSGSSLNVKAGCVRKDWCESQPCQSRGRCINLWLSYQCDCHRPYEGPNCLREYVAGRFGQDDSXGYVIFXLDESYGDXISLSMFVRXLQPSGLLLALENSXYQYIRVWLERGRLAMLXPNSPKLVVKFVLNDGNVHLISLKIKPYKIELYQSSQNLGFISASXWKIEKGDVIYIGGLPDKQEXELNGGFFKGCIQDVRLNNQNLEFFPNPXNNASLNPVLVNVXQGCAGDNSCKSNPCHNGGVCHSRWDDFSCSCPALXSGKACEEVQWCGFSPCPHGAQCQPVLQGFECIANAVFNGQSGQILFRSNGNIXRELXNIXFGFRXRDANVIILHAEKEPEFLNISIQDSRLFFQLQSGNSFYMLSLXSLQSVNDGXWHEVXLSMXDPLSQXSRWQMEVDNEXPFVXSXIAXGSLNFLKDNXDIYVGDRAIDNIKGLQGCLSXIEIGGIYLSYFENVHGFINKPQEEQFLKISXNSVVXGCLQLNVCNSNPCLHGGNCEDIYSSYHCSCPLGWSGKHCELNIDECFSNPCIHGNCSDRVAAYHCXCEPGYXGVNCEVDIDNCQSHQCANGAXCISHXNGYSCLCFGNFXGKFCRQSRLPSXVCGNEKXNLXCYNGGNCXEFQXELKCMCRPGFXGEWCEKDIDECASDPCVNGGLCQDLLNKFQCLCDVAFAGERCEVDVSSLSFYVSLLFWQNLFQLLSYLILRMNDEPVVEWGEQEDY

SEQ ID NO: 6841 - protein, 1406 aa, Homo sapiens
  MOD_RES (32)..(32): Selenocysteine
  MOD_RES (44)..(44): Selenocysteine
  MOD_RES (59)..(59): Selenocysteine
  MOD_RES (84)..(84): Selenocysteine
  MOD_RES (88)..(88): Selenocysteine
  MOD_RES (105)..(105): Selenocysteine
  MOD_RES (109)..(110): Selenocysteine
  MOD_RES (200)..(200): Selenocysteine
  MOD_RES (209)..(209): Selenocysteine
  MOD_RES (238)..(238): Selenocysteine
  MOD_RES (263)..(263): Selenocysteine
  MOD_RES (289)..(289): Selenocysteine
  MOD_RES (294)..(294): Selenocysteine
  MOD_RES (296)..(296): Selenocysteine
  MOD_RES (300)..(300): Selenocysteine
  MOD_RES (315)..(315): Selenocysteine
  MOD_RES (324)..(324): Selenocysteine
  MOD_RES (332)..(332): Selenocysteine
  MOD_RES (367)..(367): Selenocysteine
  MOD_RES (390)..(390): Selenocysteine
  MOD_RES (411)..(411): Selenocysteine
  MOD_RES (420)..(420): Selenocysteine
  MOD_RES (431)..(431): Selenocysteine
  MOD_RES (446)..(446): Selenocysteine
  MOD_RES (455)..(455): Selenocysteine
  MOD_RES (476)..(476): Selenocysteine
  MOD_RES (484)..(485): Selenocysteine
  MOD_RES (502)..(503): Selenocysteine
  MOD_RES (516)..(516): Selenocysteine
  MOD_RES (562)..(562): Selenocysteine
  MOD_RES (579)..(579): Selenocysteine
  MOD_RES (581)..(581): Selenocysteine
  MOD_RES (597)..(597): Selenocysteine
  MOD_RES (621)..(621): Selenocysteine
  MOD_RES (636)..(636): Selenocysteine
  MOD_RES (654)..(654): Selenocysteine
  MOD_RES (722)..(722): Selenocysteine
  MOD_RES (728)..(728): Selenocysteine
  MOD_RES (736)..(736): Selenocysteine
  MOD_RES (745)..(745): Selenocysteine
  MOD_RES (759)..(759): Selenocysteine
  MOD_RES (776)..(776): Selenocysteine
  MOD_RES (821)..(821): Selenocysteine
  MOD_RES (841)..(841): Selenocysteine
  MOD_RES (869)..(869): Selenocysteine
  MOD_RES (882)..(882): Selenocysteine
  MOD_RES (917)..(917): Selenocysteine
  MOD_RES (970)..(970): Selenocysteine
  MOD_RES (974)..(974): Selenocysteine
  MOD_RES (977)..(977): Selenocysteine
  MOD_RES (982)..(982): Selenocysteine
  MOD_RES (1024)..(1024): Selenocysteine
  MOD_RES (1033)..(1033): Selenocysteine
  MOD_RES (1038)..(1038): Selenocysteine
  MOD_RES (1042)..(1042): Selenocysteine
  MOD_RES (1048)..(1048): Selenocysteine
  MOD_RES (1059)..(1059): Selenocysteine
  MOD_RES (1063)..(1063): Selenocysteine
  MOD_RES (1065)..(1065): Selenocysteine
  MOD_RES (1068)..(1068): Selenocysteine
  MOD_RES (1078)..(1078): Selenocysteine
  MOD_RES (1099)..(1099): Selenocysteine
  MOD_RES (1130)..(1130): Selenocysteine
  MOD_RES (1135)..(1135): Selenocysteine
  MOD_RES (1201)..(1201): Selenocysteine
  MOD_RES (1207)..(1207): Selenocysteine
  MOD_RES (1228)..(1228): Selenocysteine
  MOD_RES (1233)..(1233): Selenocysteine
  MOD_RES (1245)..(1245): Selenocysteine
  MOD_RES (1257)..(1257): Selenocysteine
  MOD_RES (1264)..(1264): Selenocysteine
  MOD_RES (1267)..(1267): Selenocysteine
  MOD_RES (1275)..(1275): Selenocysteine
  MOD_RES (1279)..(1279): Selenocysteine
  MOD_RES (1290)..(1290): Selenocysteine
  MOD_RES (1346)..(1347): Selenocysteine
  MOD_RES (1352)..(1352): Selenocysteine
  MOD_RES (1369)..(1369): Selenocysteine
  MOD_RES (1375)..(1375): Selenocysteine
  MOD_RES (1378)..(1378): Selenocysteine
MALKNINYLLIFYLSFSLLIYIKNSFCNKNNXRCLSNSCQNNSXCKDFSKDNDCSCSDXANNLDKDCDNMKDPCFSNPCQGSAXCVNXPGERSFLCKCPPGYSGXICEXXIGSCGKNSCQHGGICHQDPIYPVCICPAGYAGRFCEIDHDECASSPCQNGAVCQDGIDGYSCFCVPGYQGRHCDLEVDECASDPCKNEAXCLNEIGRYXCICPHNYSGVNCELEIDECWSQPCLNGAXCQDALGAYFCDCAPGFLGDHCELNXDECASQPCLHGGLCVDGENRYSCNCXGSGFXGXHCEXLMPLCWSKPCHNNAXCEDSVDNYXCHCWPGYXGAQCEIDLNECNSNPCQSNGECVELSSEKQYGRIXGLPSSFSYHEASGYVCICQPGFXGIHCEEDVNECSSNPCQNGGXCENLPGNYXCHCPFDNLSRXFYGGRDCSDILLGCXHQQCLNNGXCIPHFQDGQHGFSCLCPSGYXGSLCEIAXXLSFEGDGFLWVKSGSVXXKGSVCNIALRFQXVQPMALLLFRSNRDVFVKLELLSGYIHLSIQVNNQSKVLLFISHNXSDGEWHFVEVIFAEAVXLXLIDDSCKEKCIAKAPXPLESDQSICAFQNSFLGGLPVGMXSNGVALLNFYNMPSXPSFVGCLQDIKIDWNHIXLENISSGSSLNVKAGCVRKDWCESQPCQSRGRCINLWLSYQCDCHRPYEGPNCLREYVAGRFGQDDSXGYVIFXLDESYGDXISLSMFVRXLQPSGLLLALENSXYQYIRVWLERGRLAMLXPNSPKLVVKFVLNDGNVHLISLKIKPYKIELYQSSQNLGFISASXWKIEKGDVIYIGGLPDKQEXELNGGFFKGCIQDVRLNNQNLEFFPNPXNNASLNPVLVNVXQGCAGDNSCKSNPCHNGGVCHSRWDDFSCSCPALXSGKACEEVQWCGFSPCPHGAQCQPVLQGFECIANAVFNGQSGQILFRSNGNIXRELXNIXFGFRXRDANVIILHAEKEPEFLNISIQDSRLFFQLQSGNSFYMLSLXSLQSVNDGXWHEVXLSMXDPLSQXSRWQMEVDNEXPFVXSXIAXGSLNFLKDNXDIYVGDRAIDNIKGLQGCLSXIEIGGIYLSYFENVHGFINKPQEEQFLKISXNSVVXGCLQLNVCNSNPCLHGGNCEDIYSSYHCSCPLGWSGKHCELNIDECFSNPCIHGNCSDRVAAYHCXCEPGYXGVNCEVDIDNCQSHQCANGAXCISHXNGYSCLCFGNFXGKFCRQSRLPSXVCGNEKXNLXCYNGGNCXEFQXELKCMCRPGFXGEWCEKDIDECASDPCVNGGLCQDLLNKFQCLCDVAFAGERCEVDLADDLISDIFXXIGSVXVALLLILLLAIVASVVXSNKRAXQGXYSPSRQEKEGSRVEMWNLMPPPAMERLI

SEQ ID NO: 6842 - protein, 1294 aa, Homo sapiens
  MOD_RES (32)..(32): Selenocysteine
  MOD_RES (44)..(44): Selenocysteine
  MOD_RES (59)..(59): Selenocysteine
  MOD_RES (84)..(84): Selenocysteine
  MOD_RES (88)..(88): Selenocysteine
  MOD_RES (105)..(105): Selenocysteine
  MOD_RES (109)..(110): Selenocysteine
  MOD_RES (200)..(200): Selenocysteine
  MOD_RES (209)..(209): Selenocysteine
  MOD_RES (220)..(220): Selenocysteine
  MOD_RES (255)..(255): Selenocysteine
  MOD_RES (278)..(278): Selenocysteine
  MOD_RES (299)..(299): Selenocysteine
  MOD_RES (308)..(308): Selenocysteine
  MOD_RES (319)..(319): Selenocysteine
  MOD_RES (334)..(334): Selenocysteine
  MOD_RES (343)..(343): Selenocysteine
  MOD_RES (364)..(364): Selenocysteine
  MOD_RES (372)..(373): Selenocysteine
  MOD_RES (390)..(391): Selenocysteine
  MOD_RES (404)..(404): Selenocysteine
  MOD_RES (450)..(450): Selenocysteine
  MOD_RES (467)..(467): Selenocysteine
  MOD_RES (469)..(469): Selenocysteine
  MOD_RES (485)..(485): Selenocysteine
  MOD_RES (509)..(509): Selenocysteine
  MOD_RES (524)..(524): Selenocysteine
  MOD_RES (542)..(542): Selenocysteine
  MOD_RES (610)..(610): Selenocysteine
  MOD_RES (616)..(616): Selenocysteine
  MOD_RES (624)..(624): Selenocysteine
  MOD_RES (633)..(633): Selenocysteine
  MOD_RES (647)..(647): Selenocysteine
  MOD_RES (664)..(664): Selenocysteine
  MOD_RES (709)..(709): Selenocysteine
  MOD_RES (729)..(729): Selenocysteine
  MOD_RES (757)..(757): Selenocysteine
  MOD_RES (770)..(770): Selenocysteine
  MOD_RES (805)..(805): Selenocysteine
  MOD_RES (858)..(858): Selenocysteine
  MOD_RES (862)..(862): Selenocysteine
  MOD_RES (865)..(865): Selenocysteine
  MOD_RES (870)..(870): Selenocysteine
  MOD_RES (912)..(912): Selenocysteine
  MOD_RES (921)..(921): Selenocysteine
  MOD_RES (926)..(926): Selenocysteine
  MOD_RES (930)..(930): Selenocysteine
  MOD_RES (936)..(936): Selenocysteine
  MOD_RES (947)..(947): Selenocysteine
  MOD_RES (951)..(951): Selenocysteine
  MOD_RES (953)..(953): Selenocysteine
  MOD_RES (956)..(956): Selenocysteine
  MOD_RES (966)..(966): Selenocysteine
  MOD_RES (987)..(987): Selenocysteine
  MOD_RES (1018)..(1018): Selenocysteine
  MOD_RES (1023)..(1023): Selenocysteine
  MOD_RES (1089)..(1089): Selenocysteine
  MOD_RES (1095)..(1095): Selenocysteine
  MOD_RES (1116)..(1116): Selenocysteine
  MOD_RES (1121)..(1121): Selenocysteine
  MOD_RES (1133)..(1133): Selenocysteine
  MOD_RES (1145)..(1145): Selenocysteine
  MOD_RES (1152)..(1152): Selenocysteine
  MOD_RES (1155)..(1155): Selenocysteine
  MOD_RES (1163)..(1163): Selenocysteine
  MOD_RES (1167)..(1167): Selenocysteine
  MOD_RES (1178)..(1178): Selenocysteine
  MOD_RES (1234)..(1235): Selenocysteine
  MOD_RES (1240)..(1240): Selenocysteine
  MOD_RES (1257)..(1257): Selenocysteine
  MOD_RES (1263)..(1263): Selenocysteine
  MOD_RES (1266)..(1266): Selenocysteine
MALKNINYLLIFYLSFSLLIYIKNSFCNKNNXRCLSNSCQNNSXCKDFSKDNDCSCSDXANNLDKDCDNMKDPCFSNPCQGSAXCVNXPGERSFLCKCPPGYSGXICEXXIGSCGKNSCQHGGICHQDPIYPVCICPAGYAGRFCEIDHDECASSPCQNGAVCQDGIDGYSCFCVPGYQGRHCDLEVDECASDPCKNEAXCLNEIGRYXCICPHNYSGYXGAQCEIDLNECNSNPCQSNGECVELSSEKQYGRIXGLPSSFSYHEASGYVCICQPGFXGIHCEEDVNECSSNPCQNGGXCENLPGNYXCHCPFDNLSRXFYGGRDCSDILLGCXHQQCLNNGXCIPHFQDGQHGFSCLCPSGYXGSLCEIAXXLSFEGDGFLWVKSGSVXXKGSVCNIALRFQXVQPMALLLFRSNRDVFVKLELLSGYIHLSIQVNNQSKVLLFISHNXSDGEWHFVEVIFAEAVXLXLIDDSCKEKCIAKAPXPLESDQSICAFQNSFLGGLPVGMXSNGVALLNFYNMPSXPSFVGCLQDIKIDWNHIXLENISSGSSLNVKAGCVRKDWCESQPCQSRGRCINLWLSYQCDCHRPYEGPNCLREYVAGRFGQDDSXGYVIFXLDESYGDXISLSMFVRXLQPSGLLLALENSXYQYIRVWLERGRLAMLXPNSPKLVVKFVLNDGNVHLISLKIKPYKIELYQSSQNLGFISASXWKIEKGDVIYIGGLPDKQEXELNGGFFKGCIQDVRLNNQNLEFFPNPXNNASLNPVLVNVXQGCAGDNSCKSNPCHNGGVCHSRWDDFSCSCPALXSGKACEEVQWCGFSPCPHGAQCQPVLQGFECIANAVFNGQSGQILFRSNGNIXRELXNIXFGFRXRDANVIILHAEKEPEFLNISIQDSRLFFQLQSGNSFYMLSLXSLQSVNDGXWHEVXLSMXDPLSQXSRWQMEVDNEXPFVXSXIAXGSLNFLKDNXDIYVGDRAIDNIKGLQGCLSXIEIGGIYLSYFENVHGFINKPQEEQFLKISXNSVVXGCLQLNVCNSNPCLHGGNCEDIYSSYHCSCPLGWSGKHCELNIDECFSNPCIHGNCSDRVAAYHCXCEPGYXGVNCEVDIDNCQSHQCANGAXCISHXNGYSCLCFGNFXGKFCRQSRLPSXVCGNEKXNLXCYNGGNCXEFQXELKCMCRPGFXGEWCEKDIDECASDPCVNGGLCQDLLNKFQCLCDVAFAGERCEVDLADDLISDIFXXIGSVXVALLLILLLAIVASVVXSNKRAXQGXYSPSRQEKEGSRVEMWNLMPPPAMERLI

SEQ ID NO: 6843 - protein, 1382 aa, Homo sapiens
  MOD_RES (15)..(15): Selenocysteine
  MOD_RES (19)..(19): Selenocysteine
  MOD_RES (36)..(36): Selenocysteine
  MOD_RES (40)..(41): Selenocysteine
  MOD_RES (131)..(131): Selenocysteine
  MOD_RES (140)..(140): Selenocysteine
  MOD_RES (169)..(169): Selenocysteine
  MOD_RES (194)..(194): Selenocysteine
  MOD_RES (220)..(220): Selenocysteine
  MOD_RES (225)..(225): Selenocysteine
  MOD_RES (227)..(227): Selenocysteine
  MOD_RES (231)..(231): Selenocysteine
  MOD_RES (246)..(246): Selenocysteine
  MOD_RES (255)..(255): Selenocysteine
  MOD_RES (263)..(263): Selenocysteine
  MOD_RES (298)..(298): Selenocysteine
  MOD_RES (321)..(321): Selenocysteine
  MOD_RES (342)..(342): Selenocysteine
  MOD_RES (351)..(351): Selenocysteine
  MOD_RES (362)..(362): Selenocysteine
  MOD_RES (377)..(377): Selenocysteine
  MOD_RES (386)..(386): Selenocysteine
  MOD_RES (407)..(407): Selenocysteine
  MOD_RES (415)..(416): Selenocysteine
  MOD_RES (433)..(434): Selenocysteine
  MOD_RES (447)..(447): Selenocysteine
  MOD_RES (493)..(493): Selenocysteine
  MOD_RES (510)..(510): Selenocysteine
  MOD_RES (512)..(512): Selenocysteine
  MOD_RES (528)..(528): Selenocysteine
  MOD_RES (552)..(552): Selenocysteine
  MOD_RES (567)..(567): Selenocysteine
  MOD_RES (585)..(585): Selenocysteine
  MOD_RES (653)..(653): Selenocysteine
  MOD_RES (659)..(659): Selenocysteine
  MOD_RES (667)..(667): Selenocysteine
  MOD_RES (676)..(676): Selenocysteine
  MOD_RES (690)..(690): Selenocysteine
  MOD_RES (707)..(707): Selenocysteine
  MOD_RES (752)..(752): Selenocysteine
  MOD_RES (772)..(772): Selenocysteine
  MOD_RES (800)..(800): Selenocysteine
  MOD_RES (813)..(813): Selenocysteine
  MOD_RES (826)..(826): Selenocysteine
  MOD_RES (833)..(833): Selenocysteine
  MOD_RES (856)..(856): Selenocysteine
  MOD_RES (859)..(859): Selenocysteine
  MOD_RES (893)..(893): Selenocysteine
  MOD_RES (946)..(946): Selenocysteine
  MOD_RES (950)..(950): Selenocysteine
  MOD_RES (953)..(953): Selenocysteine
  MOD_RES (958)..(958): Selenocysteine
  MOD_RES (1000)..(1000): Selenocysteine
  MOD_RES (1009)..(1009): Selenocysteine
  MOD_RES (1014)..(1014): Selenocysteine
  MOD_RES (1018)..(1018): Selenocysteine
  MOD_RES (1024)..(1024): Selenocysteine
  MOD_RES (1035)..(1035): Selenocysteine
  MOD_RES (1039)..(1039): Selenocysteine
  MOD_RES (1041)..(1041): Selenocysteine
  MOD_RES (1044)..(1044): Selenocysteine
  MOD_RES (1054)..(1054): Selenocysteine
  MOD_RES (1075)..(1075): Selenocysteine
  MOD_RES (1106)..(1106): Selenocysteine
  MOD_RES (1111)..(1111): Selenocysteine
  MOD_RES (1177)..(1177): Selenocysteine
  MOD_RES (1183)..(1183): Selenocysteine
  MOD_RES (1204)..(1204): Selenocysteine
  MOD_RES (1209)..(1209): Selenocysteine
  MOD_RES (1221)..(1221): Selenocysteine
  MOD_RES (1233)..(1233): Selenocysteine
  MOD_RES (1240)..(1240): Selenocysteine
  MOD_RES (1243)..(1243): Selenocysteine
  MOD_RES (1251)..(1251): Selenocysteine
  MOD_RES (1255)..(1255): Selenocysteine
  MOD_RES (1266)..(1266): Selenocysteine
  MOD_RES (1322)..(1323): Selenocysteine
  MOD_RES (1328)..(1328): Selenocysteine
  MOD_RES (1345)..(1345): Selenocysteine
  MOD_RES (1351)..(1351): Selenocysteine
  MOD_RES (1354)..(1354): Selenocysteine
MKDPCFSNPCQGSAXCVNXPGERSFLCKCPPGYSGXICEXXIGSCGKNSCQHGGICHQDPIYPVCICPAGYAGRFCEIDHDECASSPCQNGAVCQDGIDGYSCFCVPGYQGRHCDLEVDECASDPCKNEAXCLNEIGRYXCICPHNYSGVNCELEIDECWSQPCLNGAXCQDALGAYFCDCAPGFLGDHCELNXDECASQPCLHGGLCVDGENRYSCNCXGSGFXGXHCEXLMPLCWSKPCHNNAXCEDSVDNYXCHCWPGYXGAQCEIDLNECNSNPCQSNGECVELSSEKQYGRIXGLPSSFSYHEASGYVCICQPGFXGIHCEEDVNECSSNPCQNGGXCENLPGNYXCHCPFDNLSRXFYGGRDCSDILLGCXHQQCLNNGXCIPHFQDGQHGFSCLCPSGYXGSLCEIAXXLSFEGDGFLWVKSGSVXXKGSVCNIALRFQXVQPMALLLFRSNRDVFVKLELLSGYIHLSIQVNNQSKVLLFISHNXSDGEWHFVEVIFAEAVXLXLIDDSCKEKCIAKAPXPLESDQSICAFQNSFLGGLPVGMXSNGVALLNFYNMPSXPSFVGCLQDIKIDWNHIXLENISSGSSLNVKAGCVRKDWCESQPCQSRGRCINLWLSYQCDCHRPYEGPNCLREYVAGRFGQDDSXGYVIFXLDESYGDXISLSMFVRXLQPSGLLLALENSXYQYIRVWLERGRLAMLXPNSPKLVVKFVLNDGNVHLISLKIKPYKIELYQSSQNLGFISASXWKIEKGDVIYIGGLPDKQEXELNGGFFKGCIQDVRLNNQNLEFFPNPXNNASLNPVLVNVXQGCAGDNSCKRQXNVGRALXELGSRGPKYQVSLFRFCVGSWAXGNXFFLSSIKPGSNPCHNGGVCHSRWDDFSCSCPALXSGKACEEVQWCGFSPCPHGAQCQPVLQGFECIANAVFNGQSGQILFRSNGNIXRELXNIXFGFRXRDANVIILHAEKEPEFLNISIQDSRLFFQLQSGNSFYMLSLXSLQSVNDGXWHEVXLSMXDPLSQXSRWQMEVDNEXPFVXSXIAXGSLNFLKDNXDIYVGDRAIDNIKGLQGCLSXIEIGGIYLSYFENVHGFINKPQEEQFLKISXNSVVXGCLQLNVCNSNPCLHGGNCEDIYSSYHCSCPLGWSGKHCELNIDECFSNPCIHGNCSDRVAAYHCXCEPGYXGVNCEVDIDNCQSHQCANGAXCISHXNGYSCLCFGNFXGKFCRQSRLPSXVCGNEKXNLXCYNGGNCXEFQXELKCMCRPGFXGEWCEKDIDECASDPCVNGGLCQDLLNKFQCLCDVAFAGERCEVDLADDLISDIFXXIGSVXVALLLILLLAIVASVVXSNKRAXQGXYSPSRQEKEGSRVEMWNLMPPPAMERLI

SEQ ID NO: 6844 - protein, 674 aa, Homo sapiens
  MOD_RES (2)..(2): Selenocysteine
  MOD_RES (17)..(17): Selenocysteine
  MOD_RES (35)..(35): Selenocysteine
  MOD_RES (103)..(103): Selenocysteine
  MOD_RES (109)..(109): Selenocysteine
  MOD_RES (117)..(117): Selenocysteine
  MOD_RES (126)..(126): Selenocysteine
  MOD_RES (140)..(140): Selenocysteine
  MOD_RES (157)..(157): Selenocysteine
  MOD_RES (202)..(202): Selenocysteine
  MOD_RES (222)..(222): Selenocysteine
  MOD_RES (250)..(250): Selenocysteine
  MOD_RES (263)..(263): Selenocysteine
  MOD_RES (298)..(298): Selenocysteine
  MOD_RES (351)..(351): Selenocysteine
  MOD_RES (355)..(355): Selenocysteine
  MOD_RES (358)..(358): Selenocysteine
  MOD_RES (363)..(363): Selenocysteine
  MOD_RES (405)..(405): Selenocysteine
  MOD_RES (414)..(414): Selenocysteine
  MOD_RES (419)..(419): Selenocysteine
  MOD_RES (423)..(423): Selenocysteine
  MOD_RES (429)..(429): Selenocysteine
  MOD_RES (440)..(440): Selenocysteine
  MOD_RES (444)..(444): Selenocysteine
  MOD_RES (446)..(446): Selenocysteine
  MOD_RES (449)..(449): Selenocysteine
  MOD_RES (459)..(459): Selenocysteine
  MOD_RES (480)..(480): Selenocysteine
  MOD_RES (511)..(511): Selenocysteine
  MOD_RES (516)..(516): Selenocysteine
  MOD_RES (582)..(582): Selenocysteine
  MOD_RES (588)..(588): Selenocysteine
  MOD_RES (609)..(609): Selenocysteine
  MOD_RES (614)..(614): Selenocysteine
  MOD_RES (626)..(626): Selenocysteine
  MOD_RES (638)..(638): Selenocysteine
  MOD_RES (645)..(645): Selenocysteine
  MOD_RES (648)..(648): Selenocysteine
  MOD_RES (656)..(656): Selenocysteine
  MOD_RES (660)..(660): Selenocysteine
  MOD_RES (671)..(671): Selenocysteine
MXSNGVALLNFYNMPSXPSFVGCLQDIKIDWNHIXLENISSGSSLNVKAGCVRKDWCESQPCQSRGRCINLWLSYQCDCHRPYEGPNCLREYVAGRFGQDDSXGYVIFXLDESYGDXISLSMFVRXLQPSGLLLALENSXYQYIRVWLERGRLAMLXPNSPKLVVKFVLNDGNVHLISLKIKPYKIELYQSSQNLGFISASXWKIEKGDVIYIGGLPDKQEXELNGGFFKGCIQDVRLNNQNLEFFPNPXNNASLNPVLVNVXQGCAGDNSCKSNPCHNGGVCHSRWDDFSCSCPALXSGKACEEVQWCGFSPCPHGAQCQPVLQGFECIANAVFNGQSGQILFRSNGNIXRELXNIXFGFRXRDANVIILHAEKEPEFLNISIQDSRLFFQLQSGNSFYMLSLXSLQSVNDGXWHEVXLSMXDPLSQXSRWQMEVDNEXPFVXSXIAXGSLNFLKDNXDIYVGDRAIDNIKGLQGCLSXIEIGGIYLSYFENVHGFINKPQEEQFLKISXNSVVXGCLQLNVCNSNPCLHGGNCEDIYSSYHCSCPLGWSGKHCELNIDECFSNPCIHGNCSDRVAAYHCXCEPGYXGVNCEVDIDNCQSHQCANGAXCISHXNGYSCLCFGNFXGKFCRQSRLPSXVCGNEKXNLXCYNGGNCXEFQXELKCMCRPGFXGEW

SEQ ID NO: 6845 - protein, 1176 aa, Homo sapiens
  MOD_RES (8)..(8): Selenocysteine
  MOD_RES (33)..(33): Selenocysteine
  MOD_RES (51)..(51): Selenocysteine
  MOD_RES (56)..(56): Selenocysteine
  MOD_RES (62)..(62): Selenocysteine
  MOD_RES (73)..(73): Selenocysteine
  MOD_RES (90)..(90): Selenocysteine
  MOD_RES (122)..(122): Selenocysteine
  MOD_RES (142)..(142): Selenocysteine
  MOD_RES (179)..(179): Selenocysteine
  MOD_RES (198)..(198): Selenocysteine
  MOD_RES (213)..(213): Selenocysteine
  MOD_RES (218)..(218): Selenocysteine
  MOD_RES (354)..(354): Selenocysteine
  MOD_RES (372)..(372): Selenocysteine
  MOD_RES (376)..(376): Selenocysteine
  MOD_RES (387)..(387): Selenocysteine
  MOD_RES (398)..(398): Selenocysteine
  MOD_RES (404)..(404): Selenocysteine
  MOD_RES (410)..(410): Selenocysteine
  MOD_RES (430)..(430): Selenocysteine
  MOD_RES (439)..(440): Selenocysteine
  MOD_RES (467)..(468): Selenocysteine
  MOD_RES (473)..(473): Selenocysteine
  MOD_RES (476)..(476): Selenocysteine
  MOD_RES (480)..(480): Selenocysteine
  MOD_RES (492)..(492): Selenocysteine
  MOD_RES (496)..(496): Selenocysteine
  MOD_RES (502)..(503): Selenocysteine
  MOD_RES (530)..(530): Selenocysteine
  MOD_RES (556)..(556): Selenocysteine
  MOD_RES (560)..(560): Selenocysteine
  MOD_RES (575)..(575): Selenocysteine
  MOD_RES (625)..(625): Selenocysteine
  MOD_RES (639)..(639): Selenocysteine
  MOD_RES (648)..(648): Selenocysteine
  MOD_RES (671)..(671): Selenocysteine
  MOD_RES (678)..(678): Selenocysteine
  MOD_RES (697)..(697): Selenocysteine
  MOD_RES (802)..(802): Selenocysteine
  MOD_RES (821)..(821): Selenocysteine
  MOD_RES (825)..(825): Selenocysteine
  MOD_RES (832)..(832): Selenocysteine
  MOD_RES (838)..(838): Selenocysteine
  MOD_RES (841)..(841): Selenocysteine
  MOD_RES (858)..(858): Selenocysteine
  MOD_RES (873)..(873): Selenocysteine
  MOD_RES (902)..(902): Selenocysteine
  MOD_RES (969)..(970): Selenocysteine
  MOD_RES (982)..(982): Selenocysteine
  MOD_RES (1011)..(1011): Selenocysteine
  MOD_RES (1047)..(1047): Selenocysteine
  MOD_RES (1110)..(1110): Selenocysteine
  MOD_RES (1175)..(1175): Selenocysteine
MALARPGXPDPQALASVLLLLLWAPALSLLAGXVPSEPPSACASDPCAPGXECQAXESGGYXCGPMEPRGCAXQPCHHGALCVPQGPDPXGFRCYCVPGFQGPRCELDIDECASRPCHHGAXCRNLADRYECHCPLGYAGVXCEMEVDECASAPCLHGGSCLDGVGSFRCVCAPGYGGXRCQLDLDECQSQPCAHGGXCHDLVNGFRCDCAGXGYEGXHCEREVLECASAPCEHNASCLEGLGSFRCLCWPGYSGELCEVDEDECASSPCQHGGRCLQRSDPALYGGVQAAFPGAFSFRHAAGFLCHCPPGFEGADCGVEVDECASRPCLNGGHCQDLPNGFQCHCPDGYAGPXCEEDVDECLSDPCLHGGXCSDXVAGYICRCPEXWGGRDCSVQLXGCQGHXCPLAAXCIPIFESGVHSYVCHCPPGXHGPFCGQNXXFSVMAGSPIQASVPAGGPLGLALRFRXXLPAGXLAXRNDXKESLELALVAAXLQAXLWSYSXXVLVLRLPDLALNDGHWHQVEVVLHLAXLELRLWHEGCPARLCVASGPVALASXASAXPLPAGISSAQLGDAXFAGCLQDVRVDGHLLLPEDLGENVLLGCERREQCRPLPCVHGGSCVDLWXHFRCDCARPHRGPXCADEIPAAXFGLGGAPSSASFLLQELPGPNLXVSFLLRXRESAGLLLQFANDSAAGLXVFLSEGRIRAEVPGSPAVVLPGRWDDGLRHLVMLSFGPDQLQDLGQHVHVGGRLLAADSQPWGGPFRGCLQDLRLDGCHLPFFPLPLDNSSQPSELGGRQSWNLXAGCVSEDMCSPDPCFNGGXCLVXWNDFHCXCPANFXGPXCAQQLWCPGQPCLPPAXCEEVPDGFVCVAEAXFREGPPAAFSGHNASSGRLLGGLSLAFRXRDSEAWLLRAAAGALEGVWLAVRNGSLAGGVRGGHGLPGAVLPIPGPRVADGAWHRVRLAMERPAAXXSRWLLWLDGAAXPVALRGLASDLGFLQGPGAVRILLAENFXGCLGRVALGGLPLPLARPRPGAAPGAREHFASWPGXPAPILGCRGAPVCAPSPCLHDGACRDLFDAFACACGPGWEGPRCEAHVDPCHSAPCARGRCHXHPDGRFECRCPPGFGGPRCRWDGWAGGWAANAPWGYGGAEKSARSVDESLPFPGPHVLICDMRRXV

SEQ ID NO: 6846 - protein, 1285 aa, Homo sapiens
  MOD_RES (8)..(8): Selenocysteine
  MOD_RES (33)..(33): Selenocysteine
  MOD_RES (51)..(51): Selenocysteine
  MOD_RES (56)..(56): Selenocysteine
  MOD_RES (62)..(62): Selenocysteine
  MOD_RES (73)..(73): Selenocysteine
  MOD_RES (90)..(90): Selenocysteine
  MOD_RES (122)..(122): Selenocysteine
  MOD_RES (142)..(142): Selenocysteine
  MOD_RES (179)..(179): Selenocysteine
  MOD_RES (198)..(198): Selenocysteine
  MOD_RES (213)..(213): Selenocysteine
  MOD_RES (218)..(218): Selenocysteine
  MOD_RES (354)..(354): Selenocysteine
  MOD_RES (372)..(372): Selenocysteine
  MOD_RES (376)..(376): Selenocysteine
  MOD_RES (387)..(387): Selenocysteine
  MOD_RES (398)..(398): Selenocysteine
  MOD_RES (404)..(404): Selenocysteine
  MOD_RES (410)..(410): Selenocysteine
  MOD_RES (430)..(430): Selenocysteine
  MOD_RES (439)..(440): Selenocysteine
  MOD_RES (467)..(468): Selenocysteine
  MOD_RES (473)..(473): Selenocysteine
  MOD_RES (476)..(476): Selenocysteine
  MOD_RES (480)..(480): Selenocysteine
  MOD_RES (492)..(492): Selenocysteine
  MOD_RES (496)..(496): Selenocysteine
  MOD_RES (502)..(503): Selenocysteine
  MOD_RES (530)..(530): Selenocysteine
  MOD_RES (556)..(556): Selenocysteine
  MOD_RES (560)..(560): Selenocysteine
  MOD_RES (575)..(575): Selenocysteine
  MOD_RES (625)..(625): Selenocysteine
  MOD_RES (639)..(639): Selenocysteine
  MOD_RES (648)..(648): Selenocysteine
  MOD_RES (671)..(671): Selenocysteine
  MOD_RES (678)..(678): Selenocysteine
  MOD_RES (697)..(697): Selenocysteine
  MOD_RES (802)..(802): Selenocysteine
  MOD_RES (821)..(821): Selenocysteine
  MOD_RES (825)..(825): Selenocysteine
  MOD_RES (832)..(832): Selenocysteine
  MOD_RES (838)..(838): Selenocysteine
  MOD_RES (841)..(841): Selenocysteine
  MOD_RES (858)..(858): Selenocysteine
  MOD_RES (873)..(873): Selenocysteine
  MOD_RES (902)..(902): Selenocysteine
  MOD_RES (969)..(970): Selenocysteine
  MOD_RES (982)..(982): Selenocysteine
  MOD_RES (1011)..(1011): Selenocysteine
  MOD_RES (1047)..(1047): Selenocysteine
  MOD_RES (1110)..(1110): Selenocysteine
  MOD_RES (1143)..(1143): Selenocysteine
  MOD_RES (1174)..(1174): Selenocysteine
  MOD_RES (1187)..(1187): Selenocysteine
  MOD_RES (1257)..(1257): Selenocysteine
MALARPGXPDPQALASVLLLLLWAPALSLLAGXVPSEPPSACASDPCAPGXECQAXESGGYXCGPMEPRGCAXQPCHHGALCVPQGPDPXGFRCYCVPGFQGPRCELDIDECASRPCHHGAXCRNLADRYECHCPLGYAGVXCEMEVDECASAPCLHGGSCLDGVGSFRCVCAPGYGGXRCQLDLDECQSQPCAHGGXCHDLVNGFRCDCAGXGYEGXHCEREVLECASAPCEHNASCLEGLGSFRCLCWPGYSGELCEVDEDECASSPCQHGGRCLQRSDPALYGGVQAAFPGAFSFRHAAGFLCHCPPGFEGADCGVEVDECASRPCLNGGHCQDLPNGFQCHCPDGYAGPXCEEDVDECLSDPCLHGGXCSDXVAGYICRCPEXWGGRDCSVQLXGCQGHXCPLAAXCIPIFESGVHSYVCHCPPGXHGPFCGQNXXFSVMAGSPIQASVPAGGPLGLALRFRXXLPAGXLAXRNDXKESLELALVAAXLQAXLWSYSXXVLVLRLPDLALNDGHWHQVEVVLHLAXLELRLWHEGCPARLCVASGPVALASXASAXPLPAGISSAQLGDAXFAGCLQDVRVDGHLLLPEDLGENVLLGCERREQCRPLPCVHGGSCVDLWXHFRCDCARPHRGPXCADEIPAAXFGLGGAPSSASFLLQELPGPNLXVSFLLRXRESAGLLLQFANDSAAGLXVFLSEGRIRAEVPGSPAVVLPGRWDDGLRHLVMLSFGPDQLQDLGQHVHVGGRLLAADSQPWGGPFRGCLQDLRLDGCHLPFFPLPLDNSSQPSELGGRQSWNLXAGCVSEDMCSPDPCFNGGXCLVXWNDFHCXCPANFXGPXCAQQLWCPGQPCLPPAXCEEVPDGFVCVAEAXFREGPPAAFSGHNASSGRLLGGLSLAFRXRDSEAWLLRAAAGALEGVWLAVRNGSLAGGVRGGHGLPGAVLPIPGPRVADGAWHRVRLAMERPAAXXSRWLLWLDGAAXPVALRGLASDLGFLQGPGAVRILLAENFXGCLGRVALGGLPLPLARPRPGAAPGAREHFASWPGXPAPILGCRGAPVCAPSPCLHDGACRDLFDAFACACGPGWEGPRCEAHVDPCHSAPCARGRCHXHPDGRFECRCPPGFGGPRCRLPVPSKECSLNVXCLDGSPCEGGSPAANCSCLEGLAGQRCQVPXLPCEANPCLNGGXCRAAGGVSECICNARFSGQFCEVAKGLPLPLPFPLLEVAVPAACACLLLLLLGLLSGILAARKRRQSEGXYSPSQQEVAGARLEMDSVLKVPPEERLI

SEQ ID NO: 6847 - protein, 953 aa, Homo sapiens
  MOD_RES (10)..(10): Selenocysteine
  MOD_RES (22)..(22): Selenocysteine
  MOD_RES (40)..(40): Selenocysteine
  MOD_RES (44)..(44): Selenocysteine
  MOD_RES (55)..(55): Selenocysteine
  MOD_RES (66)..(66): Selenocysteine
  MOD_RES (72)..(72): Selenocysteine
  MOD_RES (78)..(78): Selenocysteine
  MOD_RES (98)..(98): Selenocysteine
  MOD_RES (107)..(108): Selenocysteine
  MOD_RES (135)..(136): Selenocysteine
  MOD_RES (141)..(141): Selenocysteine
  MOD_RES (144)..(144): Selenocysteine
  MOD_RES (148)..(148): Selenocysteine
  MOD_RES (160)..(160): Selenocysteine
  MOD_RES (164)..(164): Selenocysteine
  MOD_RES (170)..(171): Selenocysteine
  MOD_RES (198)..(198): Selenocysteine
  MOD_RES (224)..(224): Selenocysteine
  MOD_RES (228)..(228): Selenocysteine
  MOD_RES (243)..(243): Selenocysteine
  MOD_RES (293)..(293): Selenocysteine
  MOD_RES (307)..(307): Selenocysteine
  MOD_RES (316)..(316): Selenocysteine
  MOD_RES (339)..(339): Selenocysteine
  MOD_RES (346)..(346): Selenocysteine
  MOD_RES (365)..(365): Selenocysteine
  MOD_RES (470)..(470): Selenocysteine
  MOD_RES (489)..(489): Selenocysteine
  MOD_RES (493)..(493): Selenocysteine
  MOD_RES (500)..(500): Selenocysteine
  MOD_RES (506)..(506): Selenocysteine
  MOD_RES (509)..(509): Selenocysteine
  MOD_RES (526)..(526): Selenocysteine
  MOD_RES (541)..(541): Selenocysteine
  MOD_RES (570)..(570): Selenocysteine
  MOD_RES (637)..(638): Selenocysteine
  MOD_RES (650)..(650): Selenocysteine
  MOD_RES (679)..(679): Selenocysteine
  MOD_RES (715)..(715): Selenocysteine
  MOD_RES (778)..(778): Selenocysteine
  MOD_RES (811)..(811): Selenocysteine
  MOD_RES (842)..(842): Selenocysteine
  MOD_RES (855)..(855): Selenocysteine
  MOD_RES (925)..(925): Selenocysteine
MAMEPGALWXFLGHLWLLAGPXCEEDVDECLSDPCLHGGXCSDXVAGYICRCPEXWGGRDCSVQLXGCQGHXCPLAAXCIPIFESGVHSYVCHCPPGXHGPFCGQNXXFSVMAGSPIQASVPAGGPLGLALRFRXXLPAGXLAXRNDXKESLELALVAAXLQAXLWSYSXXVLVLRLPDLALNDGHWHQVEVVLHLAXLELRLWHEGCPARLCVASGPVALASXASAXPLPAGISSAQLGDAXFAGCLQDVRVDGHLLLPEDLGENVLLGCERREQCRPLPCVHGGSCVDLWXHFRCDCARPHRGPXCADEIPAAXFGLGGAPSSASFLLQELPGPNLXVSFLLRXRESAGLLLQFANDSAAGLXVFLSEGRIRAEVPGSPAVVLPGRWDDGLRHLVMLSFGPDQLQDLGQHVHVGGRLLAADSQPWGGPFRGCLQDLRLDGCHLPFFPLPLDNSSQPSELGGRQSWNLXAGCVSEDMCSPDPCFNGGXCLVXWNDFHCXCPANFXGPXCAQQLWCPGQPCLPPAXCEEVPDGFVCVAEAXFREGPPAAFSGHNASSGRLLGGLSLAFRXRDSEAWLLRAAAGALEGVWLAVRNGSLAGGVRGGHGLPGAVLPIPGPRVADGAWHRVRLAMERPAAXXSRWLLWLDGAAXPVALRGLASDLGFLQGPGAVRILLAENFXGCLGRVALGGLPLPLARPRPGAAPGAREHFASWPGXPAPILGCRGAPVCAPSPCLHDGACRDLFDAFACACGPGWEGPRCEAHVDPCHSAPCARGRCHXHPDGRFECRCPPGFGGPRCRLPVPSKECSLNVXCLDGSPCEGGSPAANCSCLEGLAGQRCQVPXLPCEANPCLNGGXCRAAGGVSECICNARFSGQFCEVAKGLPLPLPFPLLEVAVPAACACLLLLLLGLLSGILAARKRRQSEGXYSPSQQEVAGARLEMDSVLKVPPEERLI

SEQ ID NO: 6848 - protein, 71 aa, Homo sapiens
  MOD_RES (16)..(16): Selenocysteine
  MOD_RES (32)..(32): Selenocysteine
  MOD_RES (42)..(42): Selenocysteine
  MOD_RES (44)..(44): Selenocysteine
  MOD_RES (59)..(59): Selenocysteine
MEVAEKLQLLNHRPVXAVEIQLMVEESEERLXEEQIEALLHXVXSILPAEPEAEQKKNXNSNVAMDEEDPA

SEQ ID NO: 6849 - protein, 42 aa, Homo sapiens
  MOD_RES (22)..(22): Selenocysteine
MEVKDANSALLSNYEMESRSVXQAGVQWHHPGSLQPLPPGFK

SEQ ID NO: 6850 - protein, 115 aa, Homo sapiens
  MOD_RES (16)..(16): Selenocysteine
  MOD_RES (23)..(23): Selenocysteine
  MOD_RES (38)..(38): Selenocysteine
  MOD_RES (46)..(46): Selenocysteine
  MOD_RES (60)..(60): Selenocysteine
  MOD_RES (76)..(76): Selenocysteine
  MOD_RES (86)..(86): Selenocysteine
  MOD_RES (88)..(88): Selenocysteine
  MOD_RES (103)..(103): Selenocysteine
MEVKDANSALLSNYEXLKYISKXPCRHQSPEIVREFLXALKSHKLXKAEKLQLLNHRPVXAVEIQLMVEESEERLXEEQIEALLHXVXSILPAEPEAEQKKNXNSNVAMDEEDPA

SEQ ID NO: 6851 - protein, 148 aa, Homo sapiens
  MOD_RES (21)..(21): Selenocysteine
  MOD_RES (44)..(44): Selenocysteine
  MOD_RES (46)..(46): Selenocysteine
  MOD_RES (49)..(49): Selenocysteine
  MOD_RES (56)..(56): Selenocysteine
  MOD_RES (71)..(71): Selenocysteine
  MOD_RES (79)..(79): Selenocysteine
  MOD_RES (93)..(93): Selenocysteine
  MOD_RES (109)..(109): Selenocysteine
  MOD_RES (119)..(119): Selenocysteine
  MOD_RES (121)..(121): Selenocysteine
  MOD_RES (136)..(136): Selenocysteine
MEVKDANSALLSNYEVFQLLXDLKEQRKESGKNKHSSGQQNLNXIXYEXLKYISKXPCRHQSPEIVREFLXALKSHKLXKAEKLQLLNHRPVXAVEIQLMVEESEERLXEEQIEALLHXVXSILPAEPEAEQKKNXNSNVAMDEEDPA

SEQ ID NO: 6852 - protein, 141 aa, Homo sapiens
  MOD_RES (42)..(42): Selenocysteine
  MOD_RES (49)..(49): Selenocysteine
  MOD_RES (64)..(64): Selenocysteine
  MOD_RES (72)..(72): Selenocysteine
  MOD_RES (86)..(86): Selenocysteine
  MOD_RES (102)..(102): Selenocysteine
  MOD_RES (112)..(112): Selenocysteine
  MOD_RES (114)..(114): Selenocysteine
  MOD_RES (129)..(129): Selenocysteine
MQRGDPGEHLGARSWHLGAVGGGGDSCEVKDANSALLSNYEXLKYISKXPCRHQSPEIVREFLXALKSHKLXKAEKLQLLNHRPVXAVEIQLMVEESEERLXEEQIEALLHXVXSILPAEPEAEQKKNXNSNVAMDEEDPA

SEQ ID NO: 6853 - protein, 140 aa, Homo sapiens
  MOD_RES (11)..(11): Selenocysteine
  MOD_RES (19)..(19): Selenocysteine
  MOD_RES (21)..(21): Selenocysteine
  MOD_RES (23)..(23): Selenocysteine
  MOD_RES (28)..(28): Selenocysteine
  MOD_RES (32)..(33): Selenocysteine
  MOD_RES (40)..(41): Selenocysteine
  MOD_RES (64)..(64): Selenocysteine
  MOD_RES (69)..(69): Selenocysteine
  MOD_RES (72)..(72): Selenocysteine
  MOD_RES (74)..(74): Selenocysteine
  MOD_RES (89)..(89): Selenocysteine
GGAIQLANNGXDGVQGLQXLXMXNAAAXQPGXXILQYAQXXDGQQILVPSNQVVVQAASGDVQXYQIRXAPXSXIAPGVVMASSPALPXQPAEEAARKREVRLMKNRYKYCIYLDCYVLSVSSHSAGCVSLHLLVIGSLH

SEQ ID NO: 6854 - protein, 251 aa, Homo sapiens
  MOD_RES (7)..(7): Selenocysteine
  MOD_RES (12)..(12): Selenocysteine
  MOD_RES (14)..(14): Selenocysteine
  MOD_RES (23)..(23): Selenocysteine
  MOD_RES (45)..(45): Selenocysteine
  MOD_RES (50)..(50): Selenocysteine
  MOD_RES (65)..(65): Selenocysteine
  MOD_RES (106)..(106): Selenocysteine
  MOD_RES (112)..(113): Selenocysteine
  MOD_RES (115)..(115): Selenocysteine
  MOD_RES (118)..(118): Selenocysteine
  MOD_RES (123)..(123): Selenocysteine
  MOD_RES (132)..(132): Selenocysteine
  MOD_RES (144)..(144): Selenocysteine
  MOD_RES (152)..(152): Selenocysteine
  MOD_RES (154)..(154): Selenocysteine
  MOD_RES (156)..(156): Selenocysteine
  MOD_RES (161)..(161): Selenocysteine
  MOD_RES (165)..(166): Selenocysteine
  MOD_RES (173)..(174): Selenocysteine
  MOD_RES (197)..(197): Selenocysteine
  MOD_RES (202)..(202): Selenocysteine
  MOD_RES (205)..(205): Selenocysteine
  MOD_RES (207)..(207): Selenocysteine
  MOD_RES (222)..(222): Selenocysteine
MPAAHAXSSAPXVXLVQLPNGQXVQVHGVIQAAQPSVIQSPQVQXVQISXIAESEDSQESVDSVXDSQKRREILSRRPSYRKILNDLSSDAPGVPRIEEEKSEEEXSAPAIXXVXVPXPIYQXSSGQYIAIXQGGAIQLANNGXDGVQGLQXLXMXNAAAXQPGXXILQYAQXXDGQQILVPSNQVVVQAASGDVQXYQIRXAPXSXIAPGVVMASSPALPXQPAEEAARKREVRLMKNREAARECRRKKK

SEQ ID NO: 6855 - protein, 170 aa, Homo sapiens
  MOD_RES (7)..(7): Selenocysteine
  MOD_RES (12)..(12): Selenocysteine
  MOD_RES (14)..(14): Selenocysteine
  MOD_RES (23)..(23): Selenocysteine
  MOD_RES (45)..(45): Selenocysteine
  MOD_RES (50)..(50): Selenocysteine
  MOD_RES (65)..(65): Selenocysteine
  MOD_RES (106)..(106): Selenocysteine
  MOD_RES (112)..(113): Selenocysteine
  MOD_RES (115)..(115): Selenocysteine
  MOD_RES (118)..(118): Selenocysteine
  MOD_RES (123)..(123): Selenocysteine
  MOD_RES (129)..(129): Selenocysteine
  MOD_RES (136)..(136): Selenocysteine
  MOD_RES (141)..(141): Selenocysteine
  MOD_RES (144)..(144): Selenocysteine
  MOD_RES (146)..(146): Selenocysteine
  MOD_RES (161)..(161): Selenocysteine
MPAAHAXSSAPXVXLVQLPNGQXVQVHGVIQAAQPSVIQSPQVQXVQISXIAESEDSQESVDSVXDSQKRREILSRRPSYRKILNDLSSDAPGVPRIEEEKSEEEXSAPAIXXVXVPXPIYQXSSGQYXASGDVQXYQIRXAPXSXIAPGVVMASSPALPXQPAEEAARK

SEQ ID NO: 6856 - protein, 131 aa, Homo sapiens
  MOD_RES (7)..(7): Selenocysteine
  MOD_RES (12)..(12): Selenocysteine
  MOD_RES (14)..(14): Selenocysteine
  MOD_RES (23)..(23): Selenocysteine
  MOD_RES (45)..(45): Selenocysteine
  MOD_RES (60)..(60): Selenocysteine
  MOD_RES (64)..(64): Selenocysteine
  MOD_RES (79)..(79): Selenocysteine
  MOD_RES (120)..(120): Selenocysteine
  MOD_RES (126)..(127): Selenocysteine
  MOD_RES (129)..(129): Selenocysteine
MPAAHAXSSAPXVXLVQLPNGQXVQVHGVIQAAQPSVIQSPQVQXVQSSCKDLKRLFSGXQISXIAESEDSQESVDSVXDSQKRREILSRRPSYRKILNDLSSDAPGVPRIEEEKSEEEXSAPAIXXVXVP

SEQ ID NO: 6857 - protein, 79 aa, Homo sapiens
  MOD_RES (2)..(2): Selenocysteine
  MOD_RES (18)..(18): Selenocysteine
  MOD_RES (26)..(26): Selenocysteine
  MOD_RES (35)..(35): Selenocysteine
  MOD_RES (47)..(47): Selenocysteine
  MOD_RES (52)..(52): Selenocysteine
  MOD_RES (54)..(54): Selenocysteine
  MOD_RES (63)..(63): Selenocysteine
MXMESGAENQQSGDAAVXEAENQQMXVQAQPQIAXLAQVSMPAAHAXSSAPXVXLVQLPNGQXVQVHGVIQAAQPSVIQ

SEQ ID NO: 6858 - protein, 327 aa, Homo sapiens
  MOD_RES (2)..(2): Selenocysteine
  MOD_RES (18)..(18): Selenocysteine
  MOD_RES (26)..(26): Selenocysteine
  MOD_RES (35)..(35): Selenocysteine
  MOD_RES (47)..(47): Selenocysteine
  MOD_RES (52)..(52): Selenocysteine
  MOD_RES (54)..(54): Selenocysteine
  MOD_RES (63)..(63): Selenocysteine
  MOD_RES (85)..(85): Selenocysteine
  MOD_RES (90)..(90): Selenocysteine
  MOD_RES (105)..(105): Selenocysteine
  MOD_RES (146)..(146): Selenocysteine
  MOD_RES (152)..(153): Selenocysteine
  MOD_RES (155)..(155): Selenocysteine
  MOD_RES (158)..(158): Selenocysteine
  MOD_RES (163)..(163): Selenocysteine
  MOD_RES (172)..(172): Selenocysteine
  MOD_RES (184)..(184): Selenocysteine
  MOD_RES (192)..(192): Selenocysteine
  MOD_RES (194)..(194): Selenocysteine
  MOD_RES (196)..(196): Selenocysteine
  MOD_RES (201)..(201): Selenocysteine
  MOD_RES (205)..(206): Selenocysteine
  MOD_RES (213)..(214): Selenocysteine
  MOD_RES (237)..(237): Selenocysteine
  MOD_RES (242)..(242): Selenocysteine
  MOD_RES (245)..(245): Selenocysteine
  MOD_RES (247)..(247): Selenocysteine
  MOD_RES (262)..(262): Selenocysteine
  MOD_RES (310)..(310): Selenocysteine
MXMESGAENQQSGDAAVXEAENQQMXVQAQPQIAXLAQVSMPAAHAXSSAPXVXLVQLPNGQXVQVHGVIQAAQPSVIQSPQVQXVQISXIAESEDSQESVDSVXDSQKRREILSRRPSYRKILNDLSSDAPGVPRIEEEKSEEEXSAPAIXXVXVPXPIYQXSSGQYIAIXQGGAIQLANNGXDGVQGLQXLXMXNAAAXQPGXXILQYAQXXDGQQILVPSNQVVVQAASGDVQXYQIRXAPXSXIAPGVVMASSPALPXQPAEEAARKREVRLMKNREAARECRRKKKEYVKCLENRVAVLENQNKXLIEELKALKDLYCHKSD

SEQ ID NO: 6859 - protein, 132 aa, Homo sapiens
  MOD_RES (2)..(2): Selenocysteine
  MOD_RES (18)..(18): Selenocysteine
  MOD_RES (26)..(26): Selenocysteine
  MOD_RES (35)..(35): Selenocysteine
  MOD_RES (47)..(47): Selenocysteine
  MOD_RES (52)..(52): Selenocysteine
  MOD_RES (54)..(54): Selenocysteine
  MOD_RES (63)..(63): Selenocysteine
  MOD_RES (85)..(85): Selenocysteine
  MOD_RES (100)..(100): Selenocysteine
  MOD_RES (104)..(104): Selenocysteine
  MOD_RES (119)..(119): Selenocysteine
MXMESGAENQQSGDAAVXEAENQQMXVQAQPQIAXLAQVSMPAAHAXSSAPXVXLVQLPNGQXVQVHGVIQAAQPSVIQSPQVQXVQSSCKDLKRLFSGXQISXIAESEDSQESVDSVXDSQKRREILSRRP

SEQ ID NO: 6860 - protein, 182 aa, Homo sapiens
  MOD_RES (2)..(2): Selenocysteine
  MOD_RES (18)..(18): Selenocysteine
  MOD_RES (26)..(26): Selenocysteine
  MOD_RES (35)..(35): Selenocysteine
  MOD_RES (47)..(47): Selenocysteine
  MOD_RES (52)..(52): Selenocysteine
  MOD_RES (54)..(54): Selenocysteine
  MOD_RES (63)..(63): Selenocysteine
  MOD_RES (85)..(85): Selenocysteine
  MOD_RES (100)..(100): Selenocysteine
  MOD_RES (104)..(104): Selenocysteine
  MOD_RES (119)..(119): Selenocysteine
  MOD_RES (160)..(160): Selenocysteine
  MOD_RES (166)..(167): Selenocysteine
  MOD_RES (169)..(169): Selenocysteine
  MOD_RES (172)..(172): Selenocysteine
  MOD_RES (177)..(177): Selenocysteine
MXMESGAENQQSGDAAVXEAENQQMXVQAQPQIAXLAQVSMPAAHAXSSAPXVXLVQLPNGQXVQVHGVIQAAQPSVIQSPQVQXVQSSCKDLKRLFSGXQISXIAESEDSQESVDSVXDSQKRREILSRRPSYRKILNDLSSDAPGVPRIEEEKSEEEXSAPAIXXVXVPXPIYQXSSGQY

SEQ ID NO: 6861 - protein, 341 aa, Homo sapiens
  MOD_RES (2)..(2): Selenocysteine
  MOD_RES (18)..(18): Selenocysteine
  MOD_RES (26)..(26): Selenocysteine
  MOD_RES (35)..(35): Selenocysteine
  MOD_RES (47)..(47): Selenocysteine
  MOD_RES (52)..(52): Selenocysteine
  MOD_RES (54)..(54): Selenocysteine
  MOD_RES (63)..(63): Selenocysteine
  MOD_RES (85)..(85): Selenocysteine
  MOD_RES (100)..(100): Selenocysteine
  MOD_RES (104)..(104): Selenocysteine
  MOD_RES (119)..(119): Selenocysteine
  MOD_RES (160)..(160): Selenocysteine
  MOD_RES (166)..(167): Selenocysteine
  MOD_RES (169)..(169): Selenocysteine
  MOD_RES (172)..(172): Selenocysteine
  MOD_RES (177)..(177): Selenocysteine
  MOD_RES (186)..(186): Selenocysteine
  MOD_RES (198)..(198): Selenocysteine
  MOD_RES (206)..(206): Selenocysteine
  MOD_RES (208)..(208): Selenocysteine
  MOD_RES (210)..(210): Selenocysteine
  MOD_RES (215)..(215): Selenocysteine
  MOD_RES (219)..(220): Selenocysteine
  MOD_RES (227)..(228): Selenocysteine
  MOD_RES (251)..(251): Selenocysteine
  MOD_RES (256)..(256): Selenocysteine
  MOD_RES (259)..(259): Selenocysteine
  MOD_RES (261)..(261): Selenocysteine
  MOD_RES (276)..(276): Selenocysteine
  MOD_RES (324)..(324): Selenocysteine
MXMESGAENQQSGDAAVXEAENQQMXVQAQPQIAXLAQVSMPAAHAXSSAPXVXLVQLPNGQXVQVHGVIQAAQPSVIQSPQVQXVQSSCKDLKRLFSGXQISXIAESEDSQESVDSVXDSQKRREILSRRPSYRKILNDLSSDAPGVPRIEEEKSEEEXSAPAIXXVXVPXPIYQXSSGQYIAIXQGGAIQLANNGXDGVQGLQXLXMXNAAAXQPGXXILQYAQXXDGQQILVPSNQVVVQAASGDVQXYQIRXAPXSXIAPGVVMASSPALPXQPAEEAARKREVRLMKNREAARECRRKKKEYVKCLENRVAVLENQNKXLIEELKALKDLYCHKSD

SEQ ID NO: 6862 - protein, 181 aa, Homo sapiens
  MOD_RES (1)..(1): Any amino acid
  MOD_RES (18)..(18): Selenocysteine
  MOD_RES (33)..(33): Selenocysteine
  MOD_RES (37)..(37): Selenocysteine
  MOD_RES (52)..(52): Selenocysteine
  MOD_RES (93)..(93): Selenocysteine
  MOD_RES (99)..(100): Selenocysteine
  MOD_RES (102)..(102): Selenocysteine
  MOD_RES (105)..(105): Selenocysteine
  MOD_RES (110)..(110): Selenocysteine
  MOD_RES (119)..(119): Selenocysteine
  MOD_RES (131)..(131): Selenocysteine
  MOD_RES (139)..(139): Selenocysteine
  MOD_RES (141)..(141): Selenocysteine
  MOD_RES (143)..(143): Selenocysteine
  MOD_RES (148)..(148): Selenocysteine
  MOD_RES (152)..(153): Selenocysteine
  MOD_RES (160)..(161): Selenocysteine
  MOD_RES (178)..(178): Selenocysteine
XVIQAAQPSVIQSPQVQXVQSSCKDLKRLFSGXQISXIAESEDSQESVDSVXDSQKRREILSRRPSYRKILNDLSSDAPGVPRIEEEKSEEEXSAPAIXXVXVPXPIYQXSSGQYIAIXQGGAIQLANNGXDGVQGLQXLXMXNAAAXQPGXXILQYAQXXDGQQILVPSNQVVVQGXQKL

SEQ ID NO: 6863 - protein, 371 aa, Homo sapiens
  MOD_RES (25)..(25): Selenocysteine
  MOD_RES (80)..(80): Selenocysteine
  MOD_RES (87)..(87): Selenocysteine
  MOD_RES (102)..(102): Selenocysteine
  MOD_RES (105)..(105): Selenocysteine
  MOD_RES (123)..(123): Selenocysteine
  MOD_RES (140)..(140): Selenocysteine
  MOD_RES (144)..(144): Selenocysteine
  MOD_RES (146)..(146): Selenocysteine
  MOD_RES (186)..(186): Selenocysteine
  MOD_RES (224)..(224): Selenocysteine
  MOD_RES (229)..(229): Selenocysteine
  MOD_RES (251)..(251): Selenocysteine
  MOD_RES (291)..(291): Selenocysteine
  MOD_RES (308)..(308): Selenocysteine
  MOD_RES (350)..(350): Selenocysteine
  MOD_RES (358)..(358): Selenocysteine
MELELDAGDQDLLAFLLEESGDLGXAPDEAVRAPLDWALPLSEVPSDWEVDDLLCSLLSPPASLNILSSSNPCLVHHDHXYSLPREXVSMDLESESCRKEGXQMXPQHMEELAEQEIARLVLXDEEKSLLEKEGLILPEXLPLXKXEEQILKRVRRKIRNKRSAQESRRKKKVYVGGLESRVLKYXAQNMELQNKVQLLEEQNLSLLDQLRKLQAMVIEISNKXSSSSXCILVLLVSFCLLLVPAMYSSDXRGSLPAEHGVLSRQLRALPSEDPYQLELPALQSEVPKDSXHQWLDGSDCVLQAPGNXSCLLHYMPQAPSAEPPLEWPFPDLFSEPLCRGPILPLQANLXRKGGWLPXGSPSVILQDRYSG

SEQ ID NO: 6864 - protein, 123 aa, Homo sapiens
  MOD_RES (3)..(3): Selenocysteine
  MOD_RES (8)..(8): Selenocysteine
  MOD_RES (16)..(16): Selenocysteine
  MOD_RES (23)..(23): Selenocysteine
  MOD_RES (29)..(29): Selenocysteine
  MOD_RES (39)..(39): Selenocysteine
  MOD_RES (44)..(44): Selenocysteine
  MOD_RES (84)..(84): Selenocysteine
  MOD_RES (86)..(86): Selenocysteine
  MOD_RES (98)..(98): Selenocysteine
  MOD_RES (123)..(123): Selenocysteine
ISXSPLLXAPHKLQGXSGPLLLXEEEKRXLIAEGYPIPXKLPLXKAEEKALKRVRRKIKNKISAQESRRKKKEYVECLEKKVEXFXSENNELWKKVEXLENANSFSSGIQPLLCSLIGLENPX

SEQ ID NO: 6865 - protein, 519 aa, Homo sapiens
  MOD_RES (44)..(44): Selenocysteine
  MOD_RES (79)..(79): Selenocysteine
  MOD_RES (108)..(109): Selenocysteine
  MOD_RES (155)..(156): Selenocysteine
  MOD_RES (178)..(178): Selenocysteine
  MOD_RES (197)..(197): Selenocysteine
  MOD_RES (207)..(207): Selenocysteine
  MOD_RES (239)..(239): Selenocysteine
  MOD_RES (243)..(243): Selenocysteine
  MOD_RES (248)..(248): Selenocysteine
  MOD_RES (256)..(256): Selenocysteine
  MOD_RES (263)..(263): Selenocysteine
  MOD_RES (269)..(269): Selenocysteine
  MOD_RES (279)..(279): Selenocysteine
  MOD_RES (284)..(284): Selenocysteine
  MOD_RES (324)..(324): Selenocysteine
  MOD_RES (326)..(326): Selenocysteine
  MOD_RES (338)..(338): Selenocysteine
  MOD_RES (345)..(345): Selenocysteine
  MOD_RES (355)..(355): Selenocysteine
  MOD_RES (358)..(358): Selenocysteine
  MOD_RES (370)..(370): Selenocysteine
  MOD_RES (372)..(372): Selenocysteine
  MOD_RES (374)..(374): Selenocysteine
  MOD_RES (403)..(403): Selenocysteine
  MOD_RES (416)..(416): Selenocysteine
  MOD_RES (441)..(441): Selenocysteine
  MOD_RES (475)..(475): Selenocysteine
  MOD_RES (478)..(479): Selenocysteine
  MOD_RES (494)..(494): Selenocysteine
  MOD_RES (514)..(515): Selenocysteine
MDAVLEPFPADRLFPGSSFLDLGDLNESDFLNNAHFPEHLDHFXENMEDFSNDLFSSFFDDPVLDEKSPLLDMELDSPXPGIQAEHSYSLSGDSAPQSPLVPIKMEDXXQDAEHGAWALGHKLCSIMVKQEQSPELPVDPLAAPSAMAAAAAMAXXPLLGLSPLSRLPIPHQAPGEMXQLPVIKAEPLEVNQFLKVXPEDLVQMPPXPPSSHGSDSDGSQSPRSLPPSSPVRPMARSSXAISXSPLLXAPHKLQGXSGPLLLXEEEKRXLIAEGYPIPXKLPLXKAEEKALKRVRRKIKNKISAQESRRKKKEYVECLEKKVEXFXSENNELWKKVEXLENANRXLLQQLQKLQXLVXNKISRPYKMAAXQXGXCLMVAALCFVLVLGSLVPCLPEFSSGSQXVKEDPLAADGVYXASQMPSRSLLFYDDGAGLWEDGRSXLLPMEPPDGWEINPGGPAEQRPRDHLQHDHLDSXHEXXKYLSEAWPKDGGNGXSPDFSHSKEWFHDRDLGPNXXIKLS

SEQ ID NO: 6866 - protein, 106 aa, Homo sapiens
  MOD_RES (33)..(33): Selenocysteine
  MOD_RES (62)..(63): Selenocysteine
MEDFSNDLFSSFFDDPVLDEKSPLLDMELDSPXPGIQAEHSYSLSGDSAPQSPLVPIKMEDXXQDAEHGAWALGHKLCSIMVKQEQSPELPVDPLAAPSAMAAAAA

SEQ ID NO: 6867 - protein, 185 aa, Homo sapiens
  MOD_RES (8)..(8): Selenocysteine
  MOD_RES (33)..(33): Selenocysteine
  MOD_RES (36)..(37): Selenocysteine
  MOD_RES (55)..(55): Selenocysteine
  MOD_RES (60)..(60): Selenocysteine
  MOD_RES (64)..(64): Selenocysteine
  MOD_RES (68)..(68): Selenocysteine
  MOD_RES (80)..(80): Selenocysteine
  MOD_RES (82)..(82): Selenocysteine
  MOD_RES (84)..(84): Selenocysteine
  MOD_RES (88)..(88): Selenocysteine
  MOD_RES (101)..(101): Selenocysteine
  MOD_RES (109)..(109): Selenocysteine
  MOD_RES (150)..(150): Selenocysteine
MEVEPSPXSPAPLIQAEHSYSLCEEPRAQSPFXHIXXSDSFNDDEVESEKWYLSXDFPSXSIKXEPVXDEPPPGLVPSVXLXIXAISXPLEKEEPPLEMNXGVDSSCQXIIPKIKLEPHEVDQFLNFSPKEGLSALPVSLWVMDMVSGSXEREYGERAGMSLYHRCCSWLYEIALFLKNKNFASK

SEQ ID NO: 6868 - protein, 150 aa, Homo sapiens
  MOD_RES (34)..(34): Selenocysteine
  MOD_RES (71)..(71): Selenocysteine
  MOD_RES (96)..(96): Selenocysteine
  MOD_RES (99)..(100): Selenocysteine
  MOD_RES (118)..(118): Selenocysteine
  MOD_RES (123)..(123): Selenocysteine
  MOD_RES (142)..(142): Selenocysteine
MEVLESGEQGVLQWDRKLSELSEPGDGEALMYHXHFSELLDEFSQNVLGQLLNDPFLSEKSVSMEVEPSPXSPAPLIQAEHSYSLCEEPRAQSPFXHIXXSDSFNDDEVESEKWYLSXDFPSXSICHSDHHSHLHPVGKGGXSSGNEHWG

SEQ ID NO: 6869 - protein, 460 aa, Homo sapiens
  MOD_RES (34)..(34): Selenocysteine
  MOD_RES (71)..(71): Selenocysteine
  MOD_RES (96)..(96): Selenocysteine
  MOD_RES (99)..(100): Selenocysteine
  MOD_RES (118)..(118): Selenocysteine
  MOD_RES (123)..(123): Selenocysteine
  MOD_RES (127)..(127): Selenocysteine
  MOD_RES (131)..(131): Selenocysteine
  MOD_RES (143)..(143): Selenocysteine
  MOD_RES (145)..(145): Selenocysteine
  MOD_RES (147)..(147): Selenocysteine
  MOD_RES (151)..(151): Selenocysteine
  MOD_RES (164)..(164): Selenocysteine
  MOD_RES (172)..(172): Selenocysteine
  MOD_RES (205)..(205): Selenocysteine
  MOD_RES (232)..(232): Selenocysteine
  MOD_RES (253)..(253): Selenocysteine
  MOD_RES (267)..(267): Selenocysteine
  MOD_RES (273)..(273): Selenocysteine
  MOD_RES (283)..(283): Selenocysteine
  MOD_RES (331)..(331): Selenocysteine
  MOD_RES (346)..(346): Selenocysteine
  MOD_RES (349)..(349): Selenocysteine
  MOD_RES (359)..(359): Selenocysteine
  MOD_RES (368)..(368): Selenocysteine
  MOD_RES (374)..(374): Selenocysteine
  MOD_RES (376)..(376): Selenocysteine
  MOD_RES (378)..(378): Selenocysteine
  MOD_RES (405)..(405): Selenocysteine
  MOD_RES (420)..(420): Selenocysteine
  MOD_RES (426)..(426): Selenocysteine
MEVLESGEQGVLQWDRKLSELSEPGDGEALMYHXHFSELLDEFSQNVLGQLLNDPFLSEKSVSMEVEPSPXSPAPLIQAEHSYSLCEEPRAQSPFXHIXXSDSFNDDEVESEKWYLSXDFPSXSIKXEPVXDEPPPGLVPSVXLXIXAISXPLEKEEPPLEMNXGVDSSCQXIIPKIKLEPHEVDQFLNFSPKEAPVDHLHLPPXPPSSHGSDSEGSLSPNPRLHPFSLPQXHSPSRAAPRAPSALSSSPLLXAPHKLQGSGPLVLXEEEKRXLIAEGYPIPXKLPLSKSEEKALKKIRRKIKNKISAQESRRKKKEYMDSLEKKVESCSXENLELRKKVEVLENXNRXLLQQLQKLQXLVMGKVSRXCKLAGXQXGXCLMVVVLCFAVAFGSFFQGYGPYPSAXKMALPSQHSLQEPYXASVGKXACGKLGRVLFYFPRAGFLSLPKGIFCESPMFKKW

SEQ ID NO: 6870 - protein, 520 aa, Homo sapiens
  MOD_RES (34)..(34): Selenocysteine
  MOD_RES (71)..(71): Selenocysteine
  MOD_RES (96)..(96): Selenocysteine
  MOD_RES (99)..(100): Selenocysteine
  MOD_RES (118)..(118): Selenocysteine
  MOD_RES (123)..(123): Selenocysteine
  MOD_RES (127)..(127): Selenocysteine
  MOD_RES (131)..(131): Selenocysteine
  MOD_RES (143)..(143): Selenocysteine
  MOD_RES (145)..(145): Selenocysteine
  MOD_RES (147)..(147): Selenocysteine
  MOD_RES (151)..(151): Selenocysteine
  MOD_RES (164)..(164): Selenocysteine
  MOD_RES (172)..(172): Selenocysteine
  MOD_RES (205)..(205): Selenocysteine
  MOD_RES (232)..(232): Selenocysteine
  MOD_RES (253)..(253): Selenocysteine
  MOD_RES (267)..(267): Selenocysteine
  MOD_RES (273)..(273): Selenocysteine
  MOD_RES (283)..(283): Selenocysteine
  MOD_RES (331)..(331): Selenocysteine
  MOD_RES (346)..(346): Selenocysteine
  MOD_RES (349)..(349): Selenocysteine
  MOD_RES (359)..(359): Selenocysteine
  MOD_RES (368)..(368): Selenocysteine
  MOD_RES (374)..(374): Selenocysteine
  MOD_RES (376)..(376): Selenocysteine
  MOD_RES (378)..(378): Selenocysteine
  MOD_RES (405)..(405): Selenocysteine
  MOD_RES (420)..(420): Selenocysteine
  MOD_RES (482)..(482): Selenocysteine
  MOD_RES (506)..(506): Selenocysteine
  MOD_RES (518)..(519): Selenocysteine
MEVLESGEQGVLQWDRKLSELSEPGDGEALMYHXHFSELLDEFSQNVLGQLLNDPFLSEKSVSMEVEPSPXSPAPLIQAEHSYSLCEEPRAQSPFXHIXXSDSFNDDEVESEKWYLSXDFPSXSIKXEPVXDEPPPGLVPSVXLXIXAISXPLEKEEPPLEMNXGVDSSCQXIIPKIKLEPHEVDQFLNFSPKEAPVDHLHLPPXPPSSHGSDSEGSLSPNPRLHPFSLPQXHSPSRAAPRAPSALSSSPLLXAPHKLQGSGPLVLXEEEKRXLIAEGYPIPXKLPLSKSEEKALKKIRRKIKNKISAQESRRKKKEYMDSLEKKVESCSXENLELRKKVEVLENXNRXLLQQLQKLQXLVMGKVSRXCKLAGXQXGXCLMVVVLCFAVAFGSFFQGYGPYPSAXKMALPSQHSLQEPYXASVVRSRNLLIYEEHSPPEESSSPGSAGELGGWDRGSSLLRVSGLESRPDVDLPHFIISNEXSLEKSVLLELQQHLVSAKLEGNEXLKVVELDRRVNXXF

SEQ ID NO: 6871 - protein, 248 aa, Homo sapiens
  MOD_RES (34)..(34): Selenocysteine
  MOD_RES (71)..(71): Selenocysteine
  MOD_RES (96)..(96): Selenocysteine
  MOD_RES (99)..(100): Selenocysteine
  MOD_RES (118)..(118): Selenocysteine
  MOD_RES (123)..(123): Selenocysteine
  MOD_RES (127)..(127): Selenocysteine
  MOD_RES (131)..(131): Selenocysteine
  MOD_RES (143)..(143): Selenocysteine
  MOD_RES (145)..(145): Selenocysteine
  MOD_RES (147)..(147): Selenocysteine
  MOD_RES (151)..(151): Selenocysteine
  MOD_RES (164)..(164): Selenocysteine
  MOD_RES (172)..(172): Selenocysteine
  MOD_RES (213)..(213): Selenocysteine
MEVLESGEQGVLQWDRKLSELSEPGDGEALMYHXHFSELLDEFSQNVLGQLLNDPFLSEKSVSMEVEPSPXSPAPLIQAEHSYSLCEEPRAQSPFXHIXXSDSFNDDEVESEKWYLSXDFPSXSIKXEPVXDEPPPGLVPSVXLXIXAISXPLEKEEPPLEMNXGVDSSCQXIIPKIKLEPHEVDQFLNFSPKEGLSALPVSLWVMDMVSGSXEREYGERAGMSLYHRCCSWLYEIALFLKNKNFASK

SEQ ID NO: 6872 - protein, 175 aa, Homo sapiens
  MOD_RES (34)..(34): Selenocysteine
  MOD_RES (71)..(71): Selenocysteine
  MOD_RES (96)..(96): Selenocysteine
  MOD_RES (99)..(100): Selenocysteine
  MOD_RES (118)..(118): Selenocysteine
  MOD_RES (123)..(123): Selenocysteine
  MOD_RES (127)..(127): Selenocysteine
  MOD_RES (131)..(131): Selenocysteine
  MOD_RES (143)..(143): Selenocysteine
  MOD_RES (145)..(145): Selenocysteine
  MOD_RES (147)..(147): Selenocysteine
  MOD_RES (151)..(151): Selenocysteine
  MOD_RES (164)..(164): Selenocysteine
  MOD_RES (172)..(172): Selenocysteine
  MOD_RES (174)..(175): Selenocysteine
MEVLESGEQGVLQWDRKLSELSEPGDGEALMYHXHFSELLDEFSQNVLGQLLNDPFLSEKSVSMEVEPSPXSPAPLIQAEHSYSLCEEPRAQSPFXHIXXSDSFNDDEVESEKWYLSXDFPSXSIKXEPVXDEPPPGLVPSVXLXIXAISXPLEKEEPPLEMNXGVDSSCQXNXX

SEQ ID NO: 6873 - protein, 240 aa, Homo sapiens
  MOD_RES (15)..(15): Selenocysteine
  MOD_RES (17)..(17): Selenocysteine
  MOD_RES (31)..(31): Selenocysteine
  MOD_RES (36)..(36): Selenocysteine
  MOD_RES (40)..(40): Selenocysteine
  MOD_RES (86)..(86): Selenocysteine
  MOD_RES (93)..(93): Selenocysteine
  MOD_RES (111)..(111): Selenocysteine
  MOD_RES (116)..(116): Selenocysteine
  MOD_RES (120)..(120): Selenocysteine
  MOD_RES (124)..(124): Selenocysteine
  MOD_RES (136)..(136): Selenocysteine
  MOD_RES (138)..(138): Selenocysteine
  MOD_RES (140)..(140): Selenocysteine
  MOD_RES (144)..(144): Selenocysteine
  MOD_RES (157)..(157): Selenocysteine
  MOD_RES (165)..(165): Selenocysteine
  MOD_RES (206)..(206): Selenocysteine
NLPRRPRRLSSRLSXAXPCARSLGPSRPSPXLPPVXASMXICYINSKWMYGPPSLCLGFASYEYCIFNPRLFEKNLLVSGPAWFKXRVVQGPXAYVFFSYEVESEKWYLSXDFPSXSIKXEPVXDEPPPGLVPSVXLXIXAISXPLEKEEPPLEMNXGVDSSCQXIIPKIKLEPHEVDQFLNFSPKEGLSALPVSLWVMDMVSGSXEREYGERAGMSLYHRCCSWLYEIALFLKNKNFAS

SEQ ID NO: 6874 - protein, 459 aa, Homo sapiens
  MOD_RES (3)..(3): Selenocysteine
  MOD_RES (100)..(100): Selenocysteine
  MOD_RES (108)..(108): Selenocysteine
  MOD_RES (134)..(136): Selenocysteine
  MOD_RES (149)..(149): Selenocysteine
  MOD_RES (179)..(179): Selenocysteine
  MOD_RES (214)..(214): Selenocysteine
  MOD_RES (227)..(227): Selenocysteine
  MOD_RES (230)..(230): Selenocysteine
  MOD_RES (235)..(235): Selenocysteine
  MOD_RES (271)..(271): Selenocysteine
  MOD_RES (277)..(277): Selenocysteine
  MOD_RES (312)..(312): Selenocysteine
  MOD_RES (318)..(318): Selenocysteine
  MOD_RES (320)..(320): Selenocysteine
  MOD_RES (345)..(345): Selenocysteine
  MOD_RES (360)..(360): Selenocysteine
  MOD_RES (388)..(389): Selenocysteine
  MOD_RES (406)..(406): Selenocysteine
  MOD_RES (410)..(410): Selenocysteine
  MOD_RES (413)..(413): Selenocysteine
  MOD_RES (420)..(420): Selenocysteine
  MOD_RES (427)..(427): Selenocysteine
  MOD_RES (445)..(445): Selenocysteine
MNXDLAAGKMASAACSMDPIDSFELLDLLFDRQDGILRHVELGEGWGHVKDQQVLPNPDSDDFLSSILGSGDSLPSSPLWSPEGSDSGISEDLPSDPQDXPPRSGPAXSPAGCHPAQPGKGPCLSYHPGNSCSXXXPGPVIQVPEASVXIDLEMWSPGGRICAEKPADPVDLSPRCNLXVKDLLLSGSSGDLHHLGASYLLRPGAGHCQELVLXEDEKKLLAKEGIXLPXQLPLXKYEERVLKKIRRKIRNKQSAQESRKKKKEYIDGLEXRMSACXAQNQELQRKVLHLEKQNLSLLEQLKKLQAIVVQSXSKSAQXGXCVAVLLLSFALIILPSISPFGPNKXESPGDFAPVRVFSRXLHNDAASRVAADAVPGSEAPGPRPEADXXREESPGSPGADWGFQDXANLXNSXEELDNAXLVLRNAXEGLGQVALLDWVAPGPSXGSGRAGLEAAGDEL

SEQ ID NO: 6875 - protein, 337 aa, Homo sapiens
  MOD_RES (3)..(3): Selenocysteine
  MOD_RES (100)..(100): Selenocysteine
  MOD_RES (108)..(108): Selenocysteine
  MOD_RES (134)..(136): Selenocysteine
  MOD_RES (149)..(149): Selenocysteine
  MOD_RES (179)..(179): Selenocysteine
  MOD_RES (216)..(216): Selenocysteine
  MOD_RES (229)..(229): Selenocysteine
  MOD_RES (232)..(232): Selenocysteine
  MOD_RES (237)..(237): Selenocysteine
  MOD_RES (250)..(250): Selenocysteine
  MOD_RES (267)..(267): Selenocysteine
  MOD_RES (270)..(270): Selenocysteine
  MOD_RES (321)..(321): Selenocysteine
MNXDLAAGKMASAACSMDPIDSFELLDLLFDRQDGILRHVELGEGWGHVKDQQVLPNPDSDDFLSSILGSGDSLPSSPLWSPEGSDSGISEDLPSDPQDXPPRSGPAXSPAGCHPAQPGKGPCLSYHPGNSCSXXXPGPVIQVPEASVXIDLEMWSPGGRICAEKPADPVDLSPRCNLXVKDLLLSGSSGDLQQHHLGASYLLRPGAGHCQELVLXEDEKKLLAKEGIXLPXQLPLXKDVSLHCSESGVXEESLASREAKPVPLGAXEEXPGHCGAVHQQVSPDRHLCRSPVAVLCPHHPPLHQPFWPQQNREPWGLCACXSVLQNFAQRCCLPRGC

SEQ ID NO: 6876 - protein, 461 aa, Homo sapiens
  MOD_RES (3)..(3): Selenocysteine
  MOD_RES (100)..(100): Selenocysteine
  MOD_RES (108)..(108): Selenocysteine
  MOD_RES (134)..(136): Selenocysteine
  MOD_RES (149)..(149): Selenocysteine
  MOD_RES (179)..(179): Selenocysteine
  MOD_RES (216)..(216): Selenocysteine
  MOD_RES (229)..(229): Selenocysteine
  MOD_RES (232)..(232): Selenocysteine
  MOD_RES (237)..(237): Selenocysteine
  MOD_RES (273)..(273): Selenocysteine
  MOD_RES (279)..(279): Selenocysteine
  MOD_RES (314)..(314): Selenocysteine
  MOD_RES (320)..(320): Selenocysteine
  MOD_RES (322)..(322): Selenocysteine
  MOD_RES (347)..(347): Selenocysteine
  MOD_RES (362)..(362): Selenocysteine
  MOD_RES (390)..(391): Selenocysteine
  MOD_RES (408)..(408): Selenocysteine
  MOD_RES (412)..(412): Selenocysteine
  MOD_RES (415)..(415): Selenocysteine
  MOD_RES (422)..(422): Selenocysteine
  MOD_RES (429)..(429): Selenocysteine
  MOD_RES (447)..(447): Selenocysteine
MNXDLAAGKMASAACSMDPIDSFELLDLLFDRQDGILRHVELGEGWGHVKDQQVLPNPDSDDFLSSILGSGDSLPSSPLWSPEGSDSGISEDLPSDPQDXPPRSGPAXSPAGCHPAQPGKGPCLSYHPGNSCSXXXPGPVIQVPEASVXIDLEMWSPGGRICAEKPADPVDLSPRCNLXVKDLLLSGSSGDLQQHHLGASYLLRPGAGHCQELVLXEDEKKLLAKEGIXLPXQLPLXKYEERVLKKIRRKIRNKQSAQESRKKKKEYIDGLEXRMSACXAQNQELQRKVLHLEKQNLSLLEQLKKLQAIVVQSXSKSAQXGXCVAVLLLSFALIILPSISPFGPNKXESPGDFAPVRVFSRXLHNDAASRVAADAVPGSEAPGPRPEADXXREESPGSPGADWGFQDXANLXNSXEELDNAXLVLRNAXEGLGQVALLDWVAPGPSXGSGRAGLEAAGDEL

SEQ ID NO: 6877 - protein, 460 aa, Homo sapiens
  MOD_RES (3)..(3): Selenocysteine
  MOD_RES (99)..(99): Selenocysteine
  MOD_RES (107)..(107): Selenocysteine
  MOD_RES (133)..(135): Selenocysteine
  MOD_RES (148)..(148): Selenocysteine
  MOD_RES (178)..(178): Selenocysteine
  MOD_RES (215)..(215): Selenocysteine
  MOD_RES (228)..(228): Selenocysteine
  MOD_RES (231)..(231): Selenocysteine
  MOD_RES (236)..(236): Selenocysteine
  MOD_RES (272)..(272): Selenocysteine
  MOD_RES (278)..(278): Selenocysteine
  MOD_RES (313)..(313): Selenocysteine
  MOD_RES (319)..(319): Selenocysteine
  MOD_RES (321)..(321): Selenocysteine
  MOD_RES (346)..(346): Selenocysteine
  MOD_RES (361)..(361): Selenocysteine
  MOD_RES (389)..(390): Selenocysteine
  MOD_RES (407)..(407): Selenocysteine
  MOD_RES (411)..(411): Selenocysteine
  MOD_RES (414)..(414): Selenocysteine
  MOD_RES (421)..(421): Selenocysteine
  MOD_RES (428)..(428): Selenocysteine
  MOD_RES (446)..(446): Selenocysteine
MNXDLAAGKMASAACSMDPIDSFELLDLLFDRQDGILRHVELGEGWGHVKDQVLPNPDSDDFLSSILGSGDSLPSSPLWSPEGSDSGISEDLPSDPQDXPPRSGPAXSPAGCHPAQPGKGPCLSYHPGNSCSXXXPGPVIQVPEASVXIDLEMWSPGGRICAEKPADPVDLSPRCNLXVKDLLLSGSSGDLQQHHLGASYLLRPGAGHCQELVLXEDEKKLLAKEGIXLPXQLPLXKYEERVLKKIRRKIRNKQSAQESRKKKKEYIDGLEXRMSACXAQNQELQRKVLHLEKQNLSLLEQLKKLQAIVVQSXSKSAQXGXCVAVLLLSFALIILPSISPFGPNKXESPGDFAPVRVFSRXLHNDAASRVAADAVPGSEAPGPRPEADXXREESPGSPGADWGFQDXANLXNSXEELDNAXLVLRNAXEGLGQVALLDWVAPGPSXGSGRAGLEAAGDEL

SEQ ID NO: 6878 - protein, 228 aa, Homo sapiens
  MOD_RES (22)..(22): Selenocysteine
  MOD_RES (87)..(87): Selenocysteine
  MOD_RES (109)..(109): Selenocysteine
  MOD_RES (152)..(152): Selenocysteine
  MOD_RES (159)..(160): Selenocysteine
  MOD_RES (166)..(166): Selenocysteine
  MOD_RES (170)..(170): Selenocysteine
  MOD_RES (191)..(191): Selenocysteine
MDLGIPDLLDAWLEPPEDIFSXGSVLELGLHCPPPEVPGLQESEPEDFLKLFIDPNEVYCSEASPGSDSGISEDPCHPDSPPAPRAXSSPMLYEVVYEAGALERMQGEXGPNVGLISIQLDQWSPAFMVPDSCMVSELPFDAHAHILPRAGXVAPVPCXXLLPCQXLFLXDEEKRLLGQEGVSLPSHLPLXKAEERVLKKVRRKIRNKQSAQDSRRRKKEYIDGLESR

SEQ ID NO: 6879 - protein, 375 aa, Homo sapiens
  MOD_RES (22)..(22): Selenocysteine
  MOD_RES (87)..(87): Selenocysteine
  MOD_RES (109)..(109): Selenocysteine
  MOD_RES (152)..(152): Selenocysteine
  MOD_RES (159)..(160): Selenocysteine
  MOD_RES (166)..(166): Selenocysteine
  MOD_RES (170)..(170): Selenocysteine
  MOD_RES (191)..(191): Selenocysteine
  MOD_RES (262)..(262): Selenocysteine
  MOD_RES (267)..(267): Selenocysteine
  MOD_RES (274)..(274): Selenocysteine
  MOD_RES (276)..(276): Selenocysteine
  MOD_RES (313)..(313): Selenocysteine
  MOD_RES (319)..(319): Selenocysteine
  MOD_RES (324)..(324): Selenocysteine
  MOD_RES (329)..(329): Selenocysteine
  MOD_RES (349)..(349): Selenocysteine
  MOD_RES (351)..(351): Selenocysteine
MDLGIPDLLDAWLEPPEDIFSXGSVLELGLHCPPPEVPGLQESEPEDFLKLFIDPNEVYCSEASPGSDSGISEDPCHPDSPPAPRAXSSPMLYEVVYEAGALERMQGEXGPNVGLISIQLDQWSPAFMVPDSCMVSELPFDAHAHILPRAGXVAPVPCXXLLPCQXLFLXDEEKRLLGQEGVSLPSHLPLXKAEERVLKKVRRKIRNKQSAQDSRRRKKEYIDGLESRVAACSAQNQELQKKVQELERHNISLVAQLRQLQXLIAQXSNKAAQXSXCVLILLFSLALIILPSFSPFQSRPEAGSEDYQPHGVXSRNILXHKDVXENLEXQVVESRLREPPGAKDANGSXRXLLEKMGGKPRPSGRIRSVLHADEM

SEQ ID NO: 6880 - protein, 395 aa, Homo sapiens
  MOD_RES (22)..(22): Selenocysteine
  MOD_RES (40)..(40): Selenocysteine
  MOD_RES (107)..(107): Selenocysteine
  MOD_RES (129)..(129): Selenocysteine
  MOD_RES (172)..(172): Selenocysteine
  MOD_RES (179)..(180): Selenocysteine
  MOD_RES (186)..(186): Selenocysteine
  MOD_RES (190)..(190): Selenocysteine
  MOD_RES (211)..(211): Selenocysteine
  MOD_RES (282)..(282): Selenocysteine
  MOD_RES (287)..(287): Selenocysteine
  MOD_RES (294)..(294): Selenocysteine
  MOD_RES (296)..(296): Selenocysteine
  MOD_RES (333)..(333): Selenocysteine
  MOD_RES (339)..(339): Selenocysteine
  MOD_RES (344)..(344): Selenocysteine
  MOD_RES (349)..(349): Selenocysteine
  MOD_RES (369)..(369): Selenocysteine
  MOD_RES (371)..(371): Selenocysteine
MDLGIPDLLDAWLEPPEDIFSXGSVLELGLHCPPPEVPVXRLQEQGLQGWKSGGDRGCGLQESEPEDFLKLFIDPNEVYCSEASPGSDSGISEDPCHPDSPPAPRAXSSPMLYEVVYEAGALERMQGEXGPNVGLISIQLDQWSPAFMVPDSCMVSELPFDAHAHILPRAGXVAPVPCXXLLPCQXLFLXDEEKRLLGQEGVSLPSHLPLXKAEERVLKKVRRKIRNKQSAQDSRRRKKEYIDGLESRVAACSAQNQELQKKVQELERHNISLVAQLRQLQXLIAQXSNKAAQXSXCVLILLFSLALIILPSFSPFQSRPEAGSEDYQPHGVXSRNILXHKDVXENLEXQVVESRLREPPGAKDANGSXRXLLEKMGGKPRPSGRIRSVLHADEM

SEQ ID NO: 6881 - protein, 217 aa, Homo sapiens
  MOD_RES (22)..(22): Selenocysteine
  MOD_RES (40)..(40): Selenocysteine
  MOD_RES (107)..(107): Selenocysteine
  MOD_RES (129)..(129): Selenocysteine
  MOD_RES (172)..(172): Selenocysteine
  MOD_RES (179)..(180): Selenocysteine
  MOD_RES (186)..(186): Selenocysteine
  MOD_RES (190)..(190): Selenocysteine
  MOD_RES (211)..(211): Selenocysteine
  MOD_RES (214)..(214): Selenocysteine
MDLGIPDLLDAWLEPPEDIFSXGSVLELGLHCPPPEVPVXRLQEQGLQGWKSGGDRGCGLQESEPEDFLKLFIDPNEVYCSEASPGSDSGISEDPCHPDSPPAPRAXSSPMLYEVVYEAGALERMQGEXGPNVGLISIQLDQWSPAFMVPDSCMVSELPFDAHAHILPRAGXVAPVPCXXLLPCQXLFLXDEEKRLLGQEGVSLPSHLPLXKVXCFP

SEQ ID NO: 6882 - protein, 182 aa, Homo sapiens
  MOD_RES (22)..(22): Selenocysteine
  MOD_RES (40)..(40): Selenocysteine
  MOD_RES (107)..(107): Selenocysteine
  MOD_RES (129)..(129): Selenocysteine
  MOD_RES (172)..(172): Selenocysteine
  MOD_RES (179)..(180): Selenocysteine
MDLGIPDLLDAWLEPPEDIFSXGSVLELGLHCPPPEVPVXRLQEQGLQGWKSGGDRGCGLQESEPEDFLKLFIDPNEVYCSEASPGSDSGISEDPCHPDSPPAPRAXSSPMLYEVVYEAGALERMQGEXGPNVGLISIQLDQWSPAFMVPDSCMVSELPFDAHAHILPRAGXVAPVPCXXLV

SEQ ID NO: 6883 - protein, 39 aa, Homo sapiens
  MOD_RES (21)..(21): Selenocysteine
  MOD_RES (28)..(28): Selenocysteine
LQNEVSMLKNEVAQLKQLLLXHKDCPIXAMQKESQGYLN

SEQ ID NO: 6884 - protein, 369 aa, Homo sapiens
  MOD_RES (4)..(4): Selenocysteine
  MOD_RES (43)..(43): Selenocysteine
  MOD_RES (48)..(48): Selenocysteine
  MOD_RES (102)..(102): Selenocysteine
  MOD_RES (115)..(115): Selenocysteine
  MOD_RES (130)..(130): Selenocysteine
  MOD_RES (144)..(144): Selenocysteine
  MOD_RES (190)..(190): Selenocysteine
  MOD_RES (198)..(198): Selenocysteine
  MOD_RES (208)..(208): Selenocysteine
  MOD_RES (214)..(214): Selenocysteine
  MOD_RES (216)..(216): Selenocysteine
  MOD_RES (223)..(223): Selenocysteine
  MOD_RES (251)..(251): Selenocysteine
  MOD_RES (272)..(272): Selenocysteine
  MOD_RES (274)..(274): Selenocysteine
  MOD_RES (298)..(298): Selenocysteine
  MOD_RES (305)..(305): Selenocysteine
  MOD_RES (339)..(339): Selenocysteine
  MOD_RES (341)..(342): Selenocysteine
  MOD_RES (354)..(354): Selenocysteine
  MOD_RES (359)..(360): Selenocysteine
  MOD_RES (363)..(363): Selenocysteine
MFCXSGGNSASVMSMRPVPGSLSSLLHLHNRQRQPMPASMPGXLPNPXMPGSSAVLMPMERQMSVNSSIMGMQGPNLSNPCASPQVQPMHSEAKMRLKAALXHHPAAMSNGNMNXMGHMMEMMGSRQDQXPHHHMHSHPHQHQXLPPHHPYPHQHQHPAHHPHPQPHHQQNHPHHHSHSHLHAHPAHHQXSPHPPLHXGNQAQVSPAXQQMQPXQXIQPPQPXGGRRRRVVDEDPDERRRKFLERNRAAAXRCRQKRKVWVMSLEKKAEELXQXNMQLQNEVSMLKNEVAQLKQLLLXHKDCPIXAMQKESQGYLSPESSPPASPVPACSQQQVIQHNXIXXSSSVSEVVGSSXLSQLXXHRXDLNPIL

SEQ ID NO: 6885 - protein, 475 aa, Homo sapiens
  MOD_RES (10)..(10): Selenocysteine
  MOD_RES (18)..(18): Selenocysteine
  MOD_RES (26)..(26): Selenocysteine
  MOD_RES (28)..(28): Selenocysteine
  MOD_RES (30)..(30): Selenocysteine
  MOD_RES (77)..(77): Selenocysteine
  MOD_RES (81)..(81): Selenocysteine
  MOD_RES (94)..(94): Selenocysteine
  MOD_RES (112)..(112): Selenocysteine
  MOD_RES (117)..(117): Selenocysteine
  MOD_RES (149)..(149): Selenocysteine
  MOD_RES (154)..(154): Selenocysteine
  MOD_RES (208)..(208): Selenocysteine
  MOD_RES (221)..(221): Selenocysteine
  MOD_RES (236)..(236): Selenocysteine
  MOD_RES (250)..(250): Selenocysteine
  MOD_RES (296)..(296): Selenocysteine
  MOD_RES (304)..(304): Selenocysteine
  MOD_RES (314)..(314): Selenocysteine
  MOD_RES (320)..(320): Selenocysteine
  MOD_RES (322)..(322): Selenocysteine
  MOD_RES (329)..(329): Selenocysteine
  MOD_RES (357)..(357): Selenocysteine
  MOD_RES (378)..(378): Selenocysteine
  MOD_RES (380)..(380): Selenocysteine
  MOD_RES (404)..(404): Selenocysteine
  MOD_RES (411)..(411): Selenocysteine
  MOD_RES (445)..(445): Selenocysteine
  MOD_RES (447)..(448): Selenocysteine
  MOD_RES (460)..(460): Selenocysteine
  MOD_RES (465)..(466): Selenocysteine
  MOD_RES (469)..(469): Selenocysteine
MIHRHKHEMXLKFPSIKXDNMLSDQXPXPXRFLKNCEEVGLFSELDCSLEHEFRKAQEEESSKRNISMHNAVGGAMXGPGXHQLSSARLPNHDXNVVIQQAMPSPQSSSVIXQAPSXNRQIGPVPGSLSSLLHLHNRQRQPMPASMPGXLPNPXMPGSSAVLMPMERQMSVNSSIMGMQGPNLSNPCASPQVQPMHSEAKMRLKAALXHHPAAMSNGNMNXMGHMMEMMGSRQDQXPHHHMHSHPHQHQXLPPHHPYPHQHQHPAHHPHPQPHHQQNHPHHHSHSHLHAHPAHHQXSPHPPLHXGNQAQVSPAXQQMQPXQXIQPPQPXGGRRRRVVDEDPDERRRKFLERNRAAAXRCRQKRKVWVMSLEKKAEELXQXNMQLQNEVSMLKNEVAQLKQLLLXHKDCPIXAMQKESQGYLSPESSPPASPVPACSQQQVIQHNXIXXSSSVSEVVGSSXLSQLXXHRXDLNPIL

SEQ ID NO: 6886 - protein, 508 aa, Homo sapiens
  MOD_RES (29)..(29): Selenocysteine
  MOD_RES (43)..(43): Selenocysteine
  MOD_RES (51)..(51): Selenocysteine
  MOD_RES (59)..(59): Selenocysteine
  MOD_RES (61)..(61): Selenocysteine
  MOD_RES (63)..(63): Selenocysteine
  MOD_RES (110)..(110): Selenocysteine
  MOD_RES (114)..(114): Selenocysteine
  MOD_RES (127)..(127): Selenocysteine
  MOD_RES (145)..(145): Selenocysteine
  MOD_RES (150)..(150): Selenocysteine
  MOD_RES (182)..(182): Selenocysteine
  MOD_RES (187)..(187): Selenocysteine
  MOD_RES (241)..(241): Selenocysteine
  MOD_RES (254)..(254): Selenocysteine
  MOD_RES (269)..(269): Selenocysteine
  MOD_RES (283)..(283): Selenocysteine
  MOD_RES (329)..(329): Selenocysteine
  MOD_RES (337)..(337): Selenocysteine
  MOD_RES (347)..(347): Selenocysteine
  MOD_RES (353)..(353): Selenocysteine
  MOD_RES (355)..(355): Selenocysteine
  MOD_RES (362)..(362): Selenocysteine
  MOD_RES (390)..(390): Selenocysteine
  MOD_RES (411)..(411): Selenocysteine
  MOD_RES (413)..(413): Selenocysteine
  MOD_RES (437)..(437): Selenocysteine
  MOD_RES (444)..(444): Selenocysteine
  MOD_RES (478)..(478): Selenocysteine
  MOD_RES (480)..(481): Selenocysteine
  MOD_RES (493)..(493): Selenocysteine
  MOD_RES (498)..(499): Selenocysteine
  MOD_RES (502)..(502): Selenocysteine
MIYEESKMNLEQERPFVCSAPGCSQRFPXEDHLMIHRHKHEMXLKFPSIKXDNMLSDQXPXPXRFLKNCEEVGLFSELDCSLEHEFRKAQEEESSKRNISMHNAVGGAMXGPGXHQLSSARLPNHDXNVVIQQAMPSPQSSSVIXQAPSXNRQIGPVPGSLSSLLHLHNRQRQPMPASMPGXLPNPXMPGSSAVLMPMERQMSVNSSIMGMQGPNLSNPCASPQVQPMHSEAKMRLKAALXHHPAAMSNGNMNXMGHMMEMMGSRQDQXPHHHMHSHPHQHQXLPPHHPYPHQHQHPAHHPHPQPHHQQNHPHHHSHSHLHAHPAHHQXSPHPPLHXGNQAQVSPAXQQMQPXQXIQPPQPXGGRRRRVVDEDPDERRRKFLERNRAAAXRCRQKRKVWVMSLEKKAEELXQXNMQLQNEVSMLKNEVAQLKQLLLXHKDCPIXAMQKESQGYLSPESSPPASPVPACSQQQVIQHNXIXXSSSVSEVVGSSXLSQLXXHRXDLNPIL

SEQ ID NO: 6887 - protein, 115 aa, Homo sapiens
  MOD_RES (22)..(22): Selenocysteine
  MOD_RES (36)..(36): Selenocysteine
  MOD_RES (44)..(44): Selenocysteine
  MOD_RES (52)..(52): Selenocysteine
  MOD_RES (54)..(54): Selenocysteine
  MOD_RES (56)..(56): Selenocysteine
  MOD_RES (103)..(103): Selenocysteine
  MOD_RES (107)..(107): Selenocysteine
MNLEQERPFVCSAPGCSQRFPXEDHLMIHRHKHEMXLKFPSIKXDNMLSDQXPXPXRFLKNCEEVGLFSELDCSLEHEFRKAQEEESSKRNISMHNAVGGAMXGPGXHQLSSARL

SEQ ID NO: 6888 - protein, 501 aa, Homo sapiens
  MOD_RES (22)..(22): Selenocysteine
  MOD_RES (36)..(36): Selenocysteine
  MOD_RES (44)..(44): Selenocysteine
  MOD_RES (52)..(52): Selenocysteine
  MOD_RES (54)..(54): Selenocysteine
  MOD_RES (56)..(56): Selenocysteine
  MOD_RES (103)..(103): Selenocysteine
  MOD_RES (107)..(107): Selenocysteine
  MOD_RES (120)..(120): Selenocysteine
  MOD_RES (138)..(138): Selenocysteine
  MOD_RES (143)..(143): Selenocysteine
  MOD_RES (175)..(175): Selenocysteine
  MOD_RES (180)..(180): Selenocysteine
  MOD_RES (234)..(234): Selenocysteine
  MOD_RES (247)..(247): Selenocysteine
  MOD_RES (262)..(262): Selenocysteine
  MOD_RES (276)..(276): Selenocysteine
  MOD_RES (322)..(322): Selenocysteine
  MOD_RES (330)..(330): Selenocysteine
  MOD_RES (340)..(340): Selenocysteine
  MOD_RES (346)..(346): Selenocysteine
  MOD_RES (348)..(348): Selenocysteine
  MOD_RES (355)..(355): Selenocysteine
  MOD_RES (383)..(383): Selenocysteine
  MOD_RES (404)..(404): Selenocysteine
  MOD_RES (406)..(406): Selenocysteine
  MOD_RES (430)..(430): Selenocysteine
  MOD_RES (437)..(437): Selenocysteine
  MOD_RES (471)..(471): Selenocysteine
  MOD_RES (473)..(474): Selenocysteine
  MOD_RES (486)..(486): Selenocysteine
  MOD_RES (491)..(492): Selenocysteine
  MOD_RES (495)..(495): Selenocysteine
MNLEQERPFVCSAPGCSQRFPXEDHLMIHRHKHEMXLKFPSIKXDNMLSDQXPXPXRFLKNCEEVGLFSELDCSLEHEFRKAQEEESSKRNISMHNAVGGAMXGPGXHQLSSARLPNHDXNVVIQQAMPSPQSSSVIXQAPSXNRQIGPVPGSLSSLLHLHNRQRQPMPASMPGXLPNPXMPGSSAVLMPMERQMSVNSSIMGMQGPNLSNPCASPQVQPMHSEAKMRLKAALXHHPAAMSNGNMNXMGHMMEMMGSRQDQXPHHHMHSHPHQHQXLPPHHPYPHQHQHPAHHPHPQPHHQQNHPHHHSHSHLHAHPAHHQXSPHPPLHXGNQAQVSPAXQQMQPXQXIQPPQPXGGRRRRVVDEDPDERRRKFLERNRAAAXRCRQKRKVWVMSLEKKAEELXQXNMQLQNEVSMLKNEVAQLKQLLLXHKDCPIXAMQKESQGYLSPESSPPASPVPACSQQQVIQHNXIXXSSSVSEVVGSSXLSQLXXHRXDLNPIL

SEQ ID NO: 6889 - protein, 212 aa, Homo sapiens
  MOD_RES (8)..(8): Selenocysteine
  MOD_RES (13)..(13): Selenocysteine
  MOD_RES (67)..(67): Selenocysteine
  MOD_RES (80)..(80): Selenocysteine
  MOD_RES (95)..(95): Selenocysteine
  MOD_RES (109)..(109): Selenocysteine
  MOD_RES (155)..(155): Selenocysteine
  MOD_RES (163)..(163): Selenocysteine
  MOD_RES (173)..(173): Selenocysteine
  MOD_RES (179)..(179): Selenocysteine
  MOD_RES (181)..(181): Selenocysteine
  MOD_RES (188)..(188): Selenocysteine
MPASMPGXLPNPXMPGSSAVLMPMERQMSVNSSIMGMQGPNLSNPCASPQVQPMHSEAKMRLKAALXHHPAAMSNGNMNXMGHMMEMMGSRQDQXPHHHMHSHPHQHQXLPPHHPYPHQHQHPAHHPHPQPHHQQNHPHHHSHSHLHAHPAHHQXSPHPPLHXGNQAQVSPAXQQMQPXQXIQPPQPXGGRRRRVVDEDPDERRRKFLERNR

SEQ ID NO: 6890 - protein, 2404 aa, Homo sapiens
  MOD_RES (28)..(28): Selenocysteine
  MOD_RES (140)..(140): Selenocysteine
  MOD_RES (144)..(144): Selenocysteine
  MOD_RES (163)..(163): Selenocysteine
  MOD_RES (168)..(168): Selenocysteine
  MOD_RES (171)..(171): Selenocysteine
  MOD_RES (184)..(184): Selenocysteine
  MOD_RES (228)..(228): Selenocysteine
  MOD_RES (242)..(242): Selenocysteine
  MOD_RES (244)..(244): Selenocysteine
  MOD_RES (251)..(251): Selenocysteine
  MOD_RES (258)..(258): Selenocysteine
  MOD_RES (270)..(270): Selenocysteine
  MOD_RES (273)..(273): Selenocysteine
  MOD_RES (291)..(291): Selenocysteine
  MOD_RES (309)..(309): Selenocysteine
  MOD_RES (312)..(312): Selenocysteine
  MOD_RES (317)..(317): Selenocysteine
  MOD_RES (320)..(320): Selenocysteine
  MOD_RES (330)..(330): Selenocysteine
  MOD_RES (337)..(337): Selenocysteine
  MOD_RES (342)..(342): Selenocysteine
  MOD_RES (345)..(345): Selenocysteine
  MOD_RES (387)..(387): Selenocysteine
  MOD_RES (396)..(396): Selenocysteine
  MOD_RES (418)..(418): Selenocysteine
  MOD_RES (424)..(424): Selenocysteine
  MOD_RES (430)..(430): Selenocysteine
  MOD_RES (460)..(460): Selenocysteine
  MOD_RES (476)..(476): Selenocysteine
  MOD_RES (482)..(482): Selenocysteine
  MOD_RES (499)..(500): Selenocysteine
  MOD_RES (515)..(515): Selenocysteine
  MOD_RES (520)..(520): Selenocysteine
  MOD_RES (535)..(535): Selenocysteine
  MOD_RES (538)..(538): Selenocysteine
  MOD_RES (541)..(541): Selenocysteine
  MOD_RES (548)..(548): Selenocysteine
  MOD_RES (559)..(559): Selenocysteine
  MOD_RES (577)..(577): Selenocysteine
  MOD_RES (742)..(742): Selenocysteine
  MOD_RES (779)..(779): Selenocysteine
  MOD_RES (811)..(811): Selenocysteine
  MOD_RES (818)..(818): Selenocysteine
  MOD_RES (824)..(824): Selenocysteine
  MOD_RES (834)..(835): Selenocysteine
  MOD_RES (840)..(840): Selenocysteine
  MOD_RES (848)..(848): Selenocysteine
  MOD_RES (852)..(852): Selenocysteine
  MOD_RES (860)..(860): Selenocysteine
  MOD_RES (862)..(862): Selenocysteine
  MOD_RES (864)..(864): Selenocysteine
  MOD_RES (872)..(872): Selenocysteine
  MOD_RES (874)..(874): Selenocysteine
  MOD_RES (877)..(877): Selenocysteine
  MOD_RES (879)..(879): Selenocysteine
  MOD_RES (889)..(889): Selenocysteine
  MOD_RES (894)..(894): Selenocysteine
  MOD_RES (903)..(903): Selenocysteine
  MOD_RES (912)..(912): Selenocysteine
  MOD_RES (921)..(921): Selenocysteine
  MOD_RES (936)..(936): Selenocysteine
  MOD_RES (945)..(945): Selenocysteine
  MOD_RES (961)..(961): Selenocysteine
  MOD_RES (963)..(963): Selenocysteine
  MOD_RES (968)..(968): Selenocysteine
  MOD_RES (998)..(998): Selenocysteine
  MOD_RES (1032)..(1032): Selenocysteine
  MOD_RES (1037)..(1037): Selenocysteine
  MOD_RES (1059)..(1059): Selenocysteine
  MOD_RES (1099)..(1099): Selenocysteine
  MOD_RES (1106)..(1106): Selenocysteine
  MOD_RES (1133)..(1133): Selenocysteine
  MOD_RES (1172)..(1172): Selenocysteine
  MOD_RES (1182)..(1182): Selenocysteine
  MOD_RES (1204)..(1204): Selenocysteine
  MOD_RES (1212)..(1212): Selenocysteine
  MOD_RES (1222)..(1223): Selenocysteine
  MOD_RES (1236)..(1236): Selenocysteine
  MOD_RES (1277)..(1277): Selenocysteine
  MOD_RES (1293)..(1294): Selenocysteine
  MOD_RES (1330)..(1330): Selenocysteine
  MOD_RES (1355)..(1355): Selenocysteine
  MOD_RES (1388)..(1388): Selenocysteine
  MOD_RES (1409)..(1409): Selenocysteine
  MOD_RES (1430)..(1430): Selenocysteine
  MOD_RES (1489)..(1489): Selenocysteine
  MOD_RES (1494)..(1494): Selenocysteine
  MOD_RES (1531)..(1531): Selenocysteine
  MOD_RES (1536)..(1537): Selenocysteine
  MOD_RES (1555)..(1555): Selenocysteine
  MOD_RES (1586)..(1586): Selenocysteine
  MOD_RES (1607)..(1607): Selenocysteine
  MOD_RES (1631)..(1631): Selenocysteine
  MOD_RES (1650)..(1650): Selenocysteine
  MOD_RES (1659)..(1659): Selenocysteine
  MOD_RES (1668)..(1668): Selenocysteine
  MOD_RES (1678)..(1678): Selenocysteine
  MOD_RES (1683)..(1683): Selenocysteine
  MOD_RES (1697)..(1697): Selenocysteine
  MOD_RES (1767)..(1767): Selenocysteine
  MOD_RES (1774)..(1774): Selenocysteine
  MOD_RES (1833)..(1833): Selenocysteine
  MOD_RES (1836)..(1836): Selenocysteine
  MOD_RES (1848)..(1848): Selenocysteine
  MOD_RES (1854)..(1854): Selenocysteine
  MOD_RES (1856)..(1856): Selenocysteine
  MOD_RES (1861)..(1861): Selenocysteine
  MOD_RES (1864)..(1864): Selenocysteine
  MOD_RES (1889)..(1889): Selenocysteine
  MOD_RES (1893)..(1894): Selenocysteine
  MOD_RES (1897)..(1897): Selenocysteine
  MOD_RES (1901)..(1901): Selenocysteine
  MOD_RES (1948)..(1948): Selenocysteine
  MOD_RES (1952)..(1952): Selenocysteine
  MOD_RES (2035)..(2035): Selenocysteine
  MOD_RES (2067)..(2067): Selenocysteine
  MOD_RES (2246)..(2246): Selenocysteine
  MOD_RES (2299)..(2299): Selenocysteine
  MOD_RES (2342)..(2342): Selenocysteine
  MOD_RES (2352)..(2352): Selenocysteine
  MOD_RES (2376)..(2376): Selenocysteine
  MOD_RES (2392)..(2393): Selenocysteine
  MOD_RES (2396)..(2396): Selenocysteine
MAENLLDGPPNPKRAKLSSPGFSANDSXDFGSLFDLENDLPDELIPNGGELGLLNSGNLVPDAASKHKQLSELLRGGSGSSINPGIGNVSASSPVQQGLGGQAQGQPNSANMASLSAMGKSPLSQGDSSAPSLPKQAASXSGPXPAASQALNPQAQKQVGLAXSSPAXSQXGPGICMNANFNQXHPGLLNSNSGHSLINQASQGQAQVMNGSLGAAGRGRGAGMPYPXPAMQGASSSVLAEXLXQVSPQMXGHAGLNXAQAGGMAKMGIXGNXSPFGQPFSQAGGQPMGAXGVNPQLASKQSMVNSLPXFPXDIKNXSVXNVPNMSQMQXSVGIVPXQAIAXGPXADPEKRKLIQQQLVLLLHAHKCQRREQANGEVRACSLPHCRXMKNVLNHMXHCQAGKACQAILGSPASGIQNXIGSVGXGQQNAXSLSNPNPIDPSSMQRAYAALGLPYMNQPQXQLQPQVPGQQPAQPQXHQQMRXLNPLGNNPMNIPAGGIXXDQQPPNLISESALPXSLGAXNPLMNDGSNSGNIGXLSXIPXAAPPSSXGVRKGWHEHVXQDLRSHLVHKLVQAIFPXPDPAALKDRRMENLVAYAKKVEGDMYESANSRDEYYHLLAEKIYKIQKELEEKRRSRLHKQGILGNQPALPAPGAQPPVIPQAQPVRPPNGPLSLPVNRMQVSQGMNSFNPMSLGNVQLPQAPMGPRAASPMNHSVQMNSMGSVPGMAISPSRMPQPPNMMGAHXNNMMAQAPAQSQFLPQNQFPSSSGAMSVGMGQPPAQXGVSQGQVPGAALPNPLNMLGPQASQLPCPPVXQSPLHPXPPPASXAAGMPSLQHXXPPGMXPPQPAAPXQPSXPVSSSGQXPXPXPGSVPSAXQXQSXPXVQAAAQAQVXPQPQXPVQPPSVAXPQSSQQQPXPVHAQPPGXPLSQAAASIDNRVPXPSSVASAEXNSQQPGPDVPVLEMKXEXQAEDXEPDPGESKGEPRSEMMEEDLQGASQVKEEXDIAEQKSEPMEVDEKKPEVKVEVKEEEESSSNGXASQSXSPSQPRKKIFKPEELRQALMPXLEALYRQDPESLPFRQPVDPQLLGIPDYFDIVKNPMDLSXIKRKLDXGQYQEPWQYVDDVWLMFNNAWLYNRKXSRVYKFCSKLAEVFEQEIDPVMQSLGYCCGRKYEFSPQXLCCYGKQLCXIPRDAAYYSYQNRYHFCEKCFXEIQGENVXLGDDPSQPQXXISKDQFEKKKNDXLDPEPFVDCKECGRKMHQICVLHYDIIWPSGFVCDNCLKKXGRPRKENKFSAKRLQXXRLGNHLEDRVNKFLRRQNHPEAGEVFVRVVASSDKXVEVKPGMKSRFVDSGEMSESFPYRXKALFAFEEIDGVDVCFFGMHVQEYGSDCPPPNXRRVYISYLDSIHFFRPRCLRXAVYHEILIGYLEYVKKLGYVXGHIWACPPSEGDDYIFHCHPPDQKIPKPKRLQEWYKKMLDKAFAERIIHDYKDIFKQAXEDRLXSAKELPYFEGDFWPNVLEESIKELEQEEEERKKEESXAASEXXEGSQGDSKNAKKKNNKKXNKNKSSISRANKKKPSMPNVSNDLSQKLYAXMEKHKEVFFVIHLHAGPVINXLPPIVDPDPLLSCDLMDGRDAFLXLARDKHWEFSSLRRSKWSXLCMLVELHXQGQDRFVYXCNECKHHVEXRWHCXVCEDYDLCINCYNXKSHAHKMVKWGLGLDDEGSSQGEPQSKSPQESRRLSIQRCIQSLVHACQCRNANCSLPSCQKMKRVVQHXKGCKRKXNGGCPVCKQLIALCCYHAKHCQENKCPVPFCLNIKHKLRQQQIQHRLQQAQLMRRRMAXMNXRNVPQQSLPSPXSAPPGXPXQQPSXPQXPQPPAQPQPSPVSMSPAGFPSVARXQPPXXVSXGKPXSQVPAPPPPAQPPPAAVEAARQIEREAQQQQHLYRVNINNSMPPGRXGMGXPGSQMAPVSLNVPRPNQVSGPVMPSMPPGQWQQAPLPQQQPMPGLPRPVISMQAQAAVAGPRMPSVQPPRSISPSALQDLLRXLKSPSSPQQQQQVLNILKSNPQLMAAFIKQRXAKYVANQPGMQPQPGLQSQPGMQPQPGMHQQPSLQNLNAMQAGVPRPGVPPQQQAMGGLNPQGQALNIMNPGHNPNMASMNPQYREMLRRQLLQQQQQQQQQQQQQQQQQQGSAGMAGGMAGHGQFQQPQGPGGYPPAMQQQQRMQQHLPLQGSSMGQMAAQMGQLGQMGQPGLGADSXPNIQQALQQRILQQQQMKQQIGSPGQPNPMSPQQHMLSGQPQASHLPGQQIAXSLSNQVRSPAPVQSPRPQSQPPHSSPSPRIQPQPSPHHVSPQXGSPHPGLAVXMASSIDQGHLGNPEQSAMLPQLNXPSRSALSSELSLVGDXXGDXLEKFVEGL

SEQ ID NO: 6891 - protein, 2442 aa, Homo sapiens
  MOD_RES (28)..(28): Selenocysteine
  MOD_RES (140)..(140): Selenocysteine
  MOD_RES (144)..(144): Selenocysteine
  MOD_RES (163)..(163): Selenocysteine
  MOD_RES (168)..(168): Selenocysteine
  MOD_RES (171)..(171): Selenocysteine
  MOD_RES (184)..(184): Selenocysteine
  MOD_RES (228)..(228): Selenocysteine
  MOD_RES (242)..(242): Selenocysteine
  MOD_RES (244)..(244): Selenocysteine
  MOD_RES (251)..(251): Selenocysteine
  MOD_RES (258)..(258): Selenocysteine
  MOD_RES (270)..(270): Selenocysteine
  MOD_RES (273)..(273): Selenocysteine
  MOD_RES (291)..(291): Selenocysteine
  MOD_RES (309)..(309): Selenocysteine
  MOD_RES (312)..(312): Selenocysteine
  MOD_RES (317)..(317): Selenocysteine
  MOD_RES (320)..(320): Selenocysteine
  MOD_RES (330)..(330): Selenocysteine
  MOD_RES (337)..(337): Selenocysteine
  MOD_RES (342)..(342): Selenocysteine
  MOD_RES (345)..(345): Selenocysteine
  MOD_RES (387)..(387): Selenocysteine
  MOD_RES (396)..(396): Selenocysteine
  MOD_RES (423)..(423): Selenocysteine
  MOD_RES (444)..(444): Selenocysteine
  MOD_RES (456)..(456): Selenocysteine
  MOD_RES (462)..(462): Selenocysteine
  MOD_RES (468)..(468): Selenocysteine
  MOD_RES (498)..(498): Selenocysteine
  MOD_RES (514)..(514): Selenocysteine
  MOD_RES (520)..(520): Selenocysteine
  MOD_RES (537)..(538): Selenocysteine
  MOD_RES (553)..(553): Selenocysteine
  MOD_RES (558)..(558): Selenocysteine
  MOD_RES (573)..(573): Selenocysteine
  MOD_RES (576)..(576): Selenocysteine
  MOD_RES (579)..(579): Selenocysteine
  MOD_RES (586)..(586): Selenocysteine
  MOD_RES (597)..(597): Selenocysteine
  MOD_RES (615)..(615): Selenocysteine
  MOD_RES (780)..(780): Selenocysteine
  MOD_RES (817)..(817): Selenocysteine
  MOD_RES (849)..(849): Selenocysteine
  MOD_RES (856)..(856): Selenocysteine
  MOD_RES (862)..(862): Selenocysteine
  MOD_RES (872)..(873): Selenocysteine
  MOD_RES (878)..(878): Selenocysteine
  MOD_RES (886)..(886): Selenocysteine
  MOD_RES (890)..(890): Selenocysteine
  MOD_RES (898)..(898): Selenocysteine
  MOD_RES (900)..(900): Selenocysteine
  MOD_RES (902)..(902): Selenocysteine
  MOD_RES (910)..(910): Selenocysteine
  MOD_RES (912)..(912): Selenocysteine
  MOD_RES (915)..(915): Selenocysteine
  MOD_RES (917)..(917): Selenocysteine
  MOD_RES (927)..(927): Selenocysteine
  MOD_RES (932)..(932): Selenocysteine
  MOD_RES (941)..(941): Selenocysteine
  MOD_RES (950)..(950): Selenocysteine
  MOD_RES (959)..(959): Selenocysteine
  MOD_RES (974)..(974): Selenocysteine
  MOD_RES (983)..(983): Selenocysteine
  MOD_RES (999)..(999): Selenocysteine
  MOD_RES (1001)..(1001): Selenocysteine
  MOD_RES (1006)..(1006): Selenocysteine
  MOD_RES (1036)..(1036): Selenocysteine
  MOD_RES (1070)..(1070): Selenocysteine
  MOD_RES (1075)..(1075): Selenocysteine
  MOD_RES (1097)..(1097): Selenocysteine
  MOD_RES (1137)..(1137): Selenocysteine
  MOD_RES (1144)..(1144): Selenocysteine
  MOD_RES (1171)..(1171): Selenocysteine
  MOD_RES (1210)..(1210): Selenocysteine
  MOD_RES (1220)..(1220): Selenocysteine
  MOD_RES (1242)..(1242): Selenocysteine
  MOD_RES (1250)..(1250): Selenocysteine
  MOD_RES (1260)..(1261): Selenocysteine
  MOD_RES (1274)..(1274): Selenocysteine
  MOD_RES (1315)..(1315): Selenocysteine
  MOD_RES (1331)..(1332): Selenocysteine
  MOD_RES (1368)..(1368): Selenocysteine
  MOD_RES (1393)..(1393): Selenocysteine
  MOD_RES (1426)..(1426): Selenocysteine
  MOD_RES (1447)..(1447): Selenocysteine
  MOD_RES (1468)..(1468): Selenocysteine
  MOD_RES (1527)..(1527): Selenocysteine
  MOD_RES (1532)..(1532): Selenocysteine
  MOD_RES (1569)..(1569): Selenocysteine
  MOD_RES (1574)..(1575): Selenocysteine
  MOD_RES (1593)..(1593): Selenocysteine
  MOD_RES (1624)..(1624): Selenocysteine
  MOD_RES (1645)..(1645): Selenocysteine
  MOD_RES (1669)..(1669): Selenocysteine
  MOD_RES (1688)..(1688): Selenocysteine
  MOD_RES (1697)..(1697): Selenocysteine
  MOD_RES (1706)..(1706): Selenocysteine
  MOD_RES (1716)..(1716): Selenocysteine
  MOD_RES (1721)..(1721): Selenocysteine
  MOD_RES (1735)..(1735): Selenocysteine
  MOD_RES (1805)..(1805): Selenocysteine
  MOD_RES (1812)..(1812): Selenocysteine
  MOD_RES (1871)..(1871): Selenocysteine
  MOD_RES (1874)..(1874): Selenocysteine
  MOD_RES (1886)..(1886): Selenocysteine
  MOD_RES (1892)..(1892): Selenocysteine
  MOD_RES (1894)..(1894): Selenocysteine
  MOD_RES (1899)..(1899): Selenocysteine
  MOD_RES (1902)..(1902): Selenocysteine
  MOD_RES (1927)..(1927): Selenocysteine
  MOD_RES (1931)..(1932): Selenocysteine
  MOD_RES (1935)..(1935): Selenocysteine
  MOD_RES (1939)..(1939): Selenocysteine
  MOD_RES (1986)..(1986): Selenocysteine
  MOD_RES (1990)..(1990): Selenocysteine
  MOD_RES (2073)..(2073): Selenocysteine
  MOD_RES (2105)..(2105): Selenocysteine
  MOD_RES (2284)..(2284): Selenocysteine
  MOD_RES (2337)..(2337): Selenocysteine
  MOD_RES (2380)..(2380): Selenocysteine
  MOD_RES (2390)..(2390): Selenocysteine
  MOD_RES (2414)..(2414): Selenocysteine
  MOD_RES (2430)..(2431): Selenocysteine
  MOD_RES (2434)..(2434): Selenocysteine
MAENLLDGPPNPKRAKLSSPGFSANDSXDFGSLFDLENDLPDELIPNGGELGLLNSGNLVPDAASKHKQLSELLRGGSGSSINPGIGNVSASSPVQQGLGGQAQGQPNSANMASLSAMGKSPLSQGDSSAPSLPKQAASXSGPXPAASQALNPQAQKQVGLAXSSPAXSQXGPGICMNANFNQXHPGLLNSNSGHSLINQASQGQAQVMNGSLGAAGRGRGAGMPYPXPAMQGASSSVLAEXLXQVSPQMXGHAGLNXAQAGGMAKMGIXGNXSPFGQPFSQAGGQPMGAXGVNPQLASKQSMVNSLPXFPXDIKNXSVXNVPNMSQMQXSVGIVPXQAIAXGPXADPEKRKLIQQQLVLLLHAHKCQRREQANGEVRACSLPHCRXMKNVLNHMXHCQAGKACQVAHCASSRQIISHWKNCXRHDCPVCLPLKNASDKRNQQXILGSPASGIQNXIGSVGXGQQNAXSLSNPNPIDPSSMQRAYAALGLPYMNQPQXQLQPQVPGQQPAQPQXHQQMRXLNPLGNNPMNIPAGGIXXDQQPPNLISESALPXSLGAXNPLMNDGSNSGNIGXLSXIPXAAPPSSXGVRKGWHEHVXQDLRSHLVHKLVQAIFPXPDPAALKDRRMENLVAYAKKVEGDMYESANSRDEYYHLLAEKIYKIQKELEEKRRSRLHKQGILGNQPALPAPGAQPPVIPQAQPVRPPNGPLSLPVNRMQVSQGMNSFNPMSLGNVQLPQAPMGPRAASPMNHSVQMNSMGSVPGMAISPSRMPQPPNMMGAHXNNMMAQAPAQSQFLPQNQFPSSSGAMSVGMGQPPAQXGVSQGQVPGAALPNPLNMLGPQASQLPCPPVXQSPLHPXPPPASXAAGMPSLQHXXPPGMXPPQPAAPXQPSXPVSSSGQXPXPXPGSVPSAXQXQSXPXVQAAAQAQVXPQPQXPVQPPSVAXPQSSQQQPXPVHAQPPGXPLSQAAASIDNRVPXPSSVASAEXNSQQPGPDVPVLEMKXEXQAEDXEPDPGESKGEPRSEMMEEDLQGASQVKEEXDIAEQKSEPMEVDEKKPEVKVEVKEEEESSSNGXASQSXSPSQPRKKIFKPEELRQALMPXLEALYRQDPESLPFRQPVDPQLLGIPDYFDIVKNPMDLSXIKRKLDXGQYQEPWQYVDDVWLMFNNAWLYNRKXSRVYKFCSKLAEVFEQEIDPVMQSLGYCCGRKYEFSPQXLCCYGKQLCXIPRDAAYYSYQNRYHFCEKCFXEIQGENVXLGDDPSQPQXXISKDQFEKKKNDXLDPEPFVDCKECGRKMHQICVLHYDIIWPSGFVCDNCLKKXGRPRKENKFSAKRLQXXRLGNHLEDRVNKFLRRQNHPEAGEVFVRVVASSDKXVEVKPGMKSRFVDSGEMSESFPYRXKALFAFEEIDGVDVCFFGMHVQEYGSDCPPPNXRRVYISYLDSIHFFRPRCLRXAVYHEILIGYLEYVKKLGYVXGHIWACPPSEGDDYIFHCHPPDQKIPKPKRLQEWYKKMLDKAFAERIIHDYKDIFKQAXEDRLXSAKELPYFEGDFWPNVLEESIKELEQEEEERKKEESXAASEXXEGSQGDSKNAKKKNNKKXNKNKSSISRANKKKPSMPNVSNDLSQKLYAXMEKHKEVFFVIHLHAGPVINXLPPIVDPDPLLSCDLMDGRDAFLXLARDKHWEFSSLRRSKWSXLCMLVELHXQGQDRFVYXCNECKHHVEXRWHCXVCEDYDLCINCYNXKSHAHKMVKWGLGLDDEGSSQGEPQSKSPQESRRLSIQRCIQSLVHACQCRNANCSLPSCQKMKRVVQHXKGCKRKXNGGCPVCKQLIALCCYHAKHCQENKCPVPFCLNIKHKLRQQQIQHRLQQAQLMRRRMAXMNXRNVPQQSLPSPXSAPPGXPXQQPSXPQXPQPPAQPQPSPVSMSPAGFPSVARXQPPXXVSXGKPXSQVPAPPPPAQPPPAAVEAARQIEREAQQQQHLYRVNINNSMPPGRXGMGXPGSQMAPVSLNVPRPNQVSGPVMPSMPPGQWQQAPLPQQQPMPGLPRPVISMQAQAAVAGPRMPSVQPPRSISPSALQDLLRXLKSPSSPQQQQQVLNILKSNPQLMAAFIKQRXAKYVANQPGMQPQPGLQSQPGMQPQPGMHQQPSLQNLNAMQAGVPRPGVPPQQQAMGGLNPQGQALNIMNPGHNPNMASMNPQYREMLRRQLLQQQQQQQQQQQQQQQQQQGSAGMAGGMAGHGQFQQPQGPGGYPPAMQQQQRMQQHLPLQGSSMGQMAAQMGQLGQMGQPGLGADSXPNIQQALQQRILQQQQMKQQIGSPGQPNPMSPQQHMLSGQPQASHLPGQQIAXSLSNQVRSPAPVQSPRPQSQPPHSSPSPRIQPQPSPHHVSPQXGSPHPGLAVXMASSIDQGHLGNPEQSAMLPQLNXPSRSALSSELSLVGDXXGDXLEKFVEGL

SEQ ID NO: 6892 - protein, 1105 aa, Homo sapiens
  MOD_RES (3)..(3): Selenocysteine
  MOD_RES (33)..(33): Selenocysteine
  MOD_RES (49)..(49): Selenocysteine
  MOD_RES (55)..(55): Selenocysteine
  MOD_RES (72)..(73): Selenocysteine
  MOD_RES (88)..(88): Selenocysteine
  MOD_RES (93)..(93): Selenocysteine
  MOD_RES (108)..(108): Selenocysteine
  MOD_RES (111)..(111): Selenocysteine
  MOD_RES (114)..(114): Selenocysteine
  MOD_RES (121)..(121): Selenocysteine
  MOD_RES (132)..(132): Selenocysteine
  MOD_RES (150)..(150): Selenocysteine
  MOD_RES (315)..(315): Selenocysteine
  MOD_RES (352)..(352): Selenocysteine
  MOD_RES (384)..(384): Selenocysteine
  MOD_RES (391)..(391): Selenocysteine
  MOD_RES (397)..(397): Selenocysteine
  MOD_RES (407)..(408): Selenocysteine
  MOD_RES (413)..(413): Selenocysteine
  MOD_RES (421)..(421): Selenocysteine
  MOD_RES (425)..(425): Selenocysteine
  MOD_RES (433)..(433): Selenocysteine
  MOD_RES (435)..(435): Selenocysteine
  MOD_RES (437)..(437): Selenocysteine
  MOD_RES (445)..(445): Selenocysteine
  MOD_RES (447)..(447): Selenocysteine
  MOD_RES (450)..(450): Selenocysteine
  MOD_RES (452)..(452): Selenocysteine
  MOD_RES (462)..(462): Selenocysteine
  MOD_RES (467)..(467): Selenocysteine
  MOD_RES (476)..(476): Selenocysteine
  MOD_RES (485)..(485): Selenocysteine
  MOD_RES (494)..(494): Selenocysteine
  MOD_RES (509)..(509): Selenocysteine
  MOD_RES (518)..(518): Selenocysteine
  MOD_RES (534)..(534): Selenocysteine
  MOD_RES (536)..(536): Selenocysteine
  MOD_RES (541)..(541): Selenocysteine
  MOD_RES (571)..(571): Selenocysteine
  MOD_RES (605)..(605): Selenocysteine
  MOD_RES (610)..(610): Selenocysteine
  MOD_RES (632)..(632): Selenocysteine
  MOD_RES (672)..(672): Selenocysteine
  MOD_RES (679)..(679): Selenocysteine
  MOD_RES (706)..(706): Selenocysteine
  MOD_RES (745)..(745): Selenocysteine
  MOD_RES (755)..(755): Selenocysteine
  MOD_RES (787)..(787): Selenocysteine
  MOD_RES (795)..(795): Selenocysteine
  MOD_RES (805)..(806): Selenocysteine
  MOD_RES (819)..(819): Selenocysteine
  MOD_RES (860)..(860): Selenocysteine
  MOD_RES (876)..(877): Selenocysteine
  MOD_RES (913)..(913): Selenocysteine
  MOD_RES (938)..(938): Selenocysteine
  MOD_RES (971)..(971): Selenocysteine
  MOD_RES (992)..(992): Selenocysteine
  MOD_RES (1013)..(1013): Selenocysteine
  MOD_RES (1072)..(1072): Selenocysteine
  MOD_RES (1077)..(1077): Selenocysteine
NAXSLSNPNPIDPSSMQRAYAALGLPYMNQPQXQLQPQVPGQQPAQPQXHQQMRXLNPLGNNPMNIPAGGIXXDQQPPNLISESALPXSLGAXNPLMNDGSNSGNIGXLSXIPXAAPPSSXGVRKGWHEHVXQDLRSHLVHKLVQAIFPXPDPAALKDRRMENLVAYAKKVEGDMYESANSRDEYYHLLAEKIYKIQKELEEKRRSRLHKQGILGNQPALPAPGAQPPVIPQAQPVRPPNGPLSLPVNRMQVSQGMNSFNPMSLGNVQLPQAPMGPRAASPMNHSVQMNSMGSVPGMAISPSRMPQPPNMMGAHXNNMMAQAPAQSQFLPQNQFPSSSGAMSVGMGQPPAQXGVSQGQVPGAALPNPLNMLGPQASQLPCPPVXQSPLHPXPPPASXAAGMPSLQHXXPPGMXPPQPAAPXQPSXPVSSSGQXPXPXPGSVPSAXQXQSXPXVQAAAQAQVXPQPQXPVQPPSVAXPQSSQQQPXPVHAQPPGXPLSQAAASIDNRVPXPSSVASAEXNSQQPGPDVPVLEMKXEXQAEDXEPDPGESKGEPRSEMMEEDLQGASQVKEEXDIAEQKSEPMEVDEKKPEVKVEVKEEEESSSNGXASQSXSPSQPRKKIFKPEELRQALMPXLEALYRQDPESLPFRQPVDPQLLGIPDYFDIVKNPMDLSXIKRKLDXGQYQEPWQYVDDVWLMFNNAWLYNRKXSRVYKFCSKLAEVFEQEIDPVMQSLGYCCGRKYEFSPQXLCCYGKQLCXIPRDAAYYSYQNSSPKYGLLADRYHFCEKCFXEIQGENVXLGDDPSQPQXXISKDQFEKKKNDXLDPEPFVDCKECGRKMHQICVLHYDIIWPSGFVCDNCLKKXGRPRKENKFSAKRLQXXRLGNHLEDRVNKFLRRQNHPEAGEVFVRVVASSDKXVEVKPGMKSRFVDSGEMSESFPYRXKALFAFEEIDGVDVCFFGMHVQEYGSDCPPPNXRRVYISYLDSIHFFRPRCLRXAVYHEILIGYLEYVKKLGYVXGHIWACPPSEGDDYIFHCHPPDQKIPKPKRLQEWYKKMLDKAFAERIIHDYKDIFKQAXEDRLXSAKELPYFEGDFWPNVLEESIKELEQEE

SEQ ID NO: 6893 - protein, 254 aa, Homo sapiens
  MOD_RES (1)..(1): Any amino acid
  MOD_RES (11)..(11): Selenocysteine
  MOD_RES (14)..(14): Selenocysteine
  MOD_RES (17)..(17): Selenocysteine
  MOD_RES (24)..(24): Selenocysteine
  MOD_RES (35)..(35): Selenocysteine
  MOD_RES (53)..(53): Selenocysteine
  MOD_RES (203)..(203): Selenocysteine
  MOD_RES (240)..(240): Selenocysteine
  MOD_RES (249)..(249): Selenocysteine
  MOD_RES (251)..(251): Selenocysteine
XDGSNSGNIGXLSXIPXAAPPSSXGVRKGWHEHVXQDLRSHLVHKLVQAIFPXPDPAALKDRRMENLVAYAKKVEGDMYESANSRDEYYHLLAEKIYKIQKELEEKRRSRLHKQGILGNQPALPAPGAQPPVIPQAQPVRPPRMNSFNPMSLGNVQLPQAPMGPRAASPMNHSVQMNSMGSVPGMAISPSRMPQPPNMMGAHXNNMMAQAPAQSQFLPQNQFPSSSGAMSVGMGQPPAQXGVSQVLCPXGXVAP

SEQ ID NO: 6894 - protein, 181 aa, Homo sapiens
  MOD_RES (1)..(1): Any amino acid
  MOD_RES (130)..(130): Selenocysteine
  MOD_RES (167)..(167): Selenocysteine
  MOD_RES (176)..(176): Selenocysteine
  MOD_RES (178)..(178): Selenocysteine
XHLLAEKIYKIQKELEEKRRSRLHKQGILGNQPALPAPGAQPPVIPQAQPVRPPNGPLSLPVNRMQVSQGMNSFNPMSLGNVQLPQAPMGPRAASPMNHSVQMNSMGSVPGMAISPSRMPQPPNMMGAHXNNMMAQAPAQSQFLPQNQFPSSSGAMSVGMGQPPAQXGVSQVLCPXGXVAP

SEQ ID NO: 6895 - protein, 196 aa, Homo sapiens
  MOD_RES (1)..(1): Any amino acid
  MOD_RES (11)..(11): Selenocysteine
  MOD_RES (19)..(19): Selenocysteine
  MOD_RES (29)..(30): Selenocysteine
  MOD_RES (43)..(43): Selenocysteine
  MOD_RES (84)..(84): Selenocysteine
  MOD_RES (100)..(101): Selenocysteine
  MOD_RES (137)..(137): Selenocysteine
  MOD_RES (162)..(162): Selenocysteine
  MOD_RES (195)..(195): Selenocysteine
XRYHFCEKCFXEIQGENVXLGDDPSQPQXXISKDQFEKKKNDXLDPEPFVDCKECGRKMHQICVLHYDIIWPSGFVCDNCLKKXGRPRKENKFSAKRLQXXRLGNHLEDRVNKFLRRQNHPEAGEVFVRVVASSDKXVEVKPGMKSRFVDSGEMSESFPYRXKALFAFEEIDGVDVCFFGMHVQEYGSDCPPPNXR

SEQ ID NO: 6896 - protein, 33 aa, Homo sapiens
  MOD_RES (1)..(1): Any amino acid
  MOD_RES (2)..(2): Selenocysteine
  MOD_RES (12)..(12): Selenocysteine
  MOD_RES (17)..(17): Selenocysteine
XXCNECKHHVEXRWHCXVCEFLNAAVFISFCEH

SEQ ID NO: 6897 - protein, 120 aa, Homo sapiens
  MOD_RES (93)..(93): Selenocysteine
  MOD_RES (108)..(108): Selenocysteine
  MOD_RES (113)..(113): Selenocysteine
MDDSKVVGGKVKKPGKRGRKPAKIDLKAKLERSRQSARECRARKKLRYQYLEELVSSRERAICALREELEMYKQWCMAMDQGKIPSEIKALLXGEEQNKSQQNSSRHXKAGKXDANSNSW

SEQ ID NO: 6898 - protein, 26 aa, Homo sapiens
  MOD_RES (21)..(21): Selenocysteine
  MOD_RES (26)..(26): Selenocysteine
MPQPSVSGMDPPFGDAFRSHXFSEQX

SEQ ID NO: 6899 - protein, 417 aa, Homo sapiens
  MOD_RES (21)..(21): Selenocysteine
  MOD_RES (26)..(26): Selenocysteine
  MOD_RES (30)..(30): Selenocysteine
  MOD_RES (75)..(75): Selenocysteine
  MOD_RES (85)..(85): Selenocysteine
  MOD_RES (93)..(93): Selenocysteine
  MOD_RES (99)..(99): Selenocysteine
  MOD_RES (102)..(102): Selenocysteine
  MOD_RES (105)..(105): Selenocysteine
  MOD_RES (112)..(112): Selenocysteine
  MOD_RES (136)..(136): Selenocysteine
  MOD_RES (138)..(138): Selenocysteine
  MOD_RES (178)..(178): Selenocysteine
  MOD_RES (190)..(190): Selenocysteine
  MOD_RES (208)..(208): Selenocysteine
  MOD_RES (211)..(211): Selenocysteine
  MOD_RES (217)..(217): Selenocysteine
  MOD_RES (257)..(257): Selenocysteine
  MOD_RES (264)..(264): Selenocysteine
  MOD_RES (287)..(287): Selenocysteine
  MOD_RES (295)..(295): Selenocysteine
  MOD_RES (323)..(323): Selenocysteine
  MOD_RES (350)..(350): Selenocysteine
  MOD_RES (403)..(403): Selenocysteine
MPQPSVSGMDPPFGDAFRSHXFSEQXLMSXDLLANSSDPDFMYELDREMNYQQNPRDNFLSLEDCKDIENLESFXDVLDNEGALXSNWEQWDXYCEDLXKYXKLXSCDIWGXKEVDYLGLDDFSSPYQDEEVISKXPXLAQLNSEDSQSVSDSLYYPDSLFSVKQNPLPSSFPGKKIXSRAAAPVCSSKXLQAEVPLSDCVQKASKPXSSXQIMVKXNMYHNEKVNFHVECKDYVKKAKVKINPVQQSRPLLSQIHXDAAKENXCYCGAVAKRQEKKGMEPLQGHAXPALPFKEXQELLLSPLPQEGPGSLAAGESSSLSASXSVSDSSQKKEEHNYSLFVSDNLGEQPXKCSPEEDEEDEEDVDDEDHDEGFGSEHELSENEEEEEEEEDYEDDKDDDISDXFSEPGIIMLASLPD

SEQ ID NO: 6900 - protein, 639 aa, Homo sapiens
  MOD_RES (21)..(21): Selenocysteine
  MOD_RES (26)..(26): Selenocysteine
  MOD_RES (30)..(30): Selenocysteine
  MOD_RES (75)..(75): Selenocysteine
  MOD_RES (85)..(85): Selenocysteine
  MOD_RES (93)..(93): Selenocysteine
  MOD_RES (99)..(99): Selenocysteine
  MOD_RES (102)..(102): Selenocysteine
  MOD_RES (105)..(105): Selenocysteine
  MOD_RES (112)..(112): Selenocysteine
  MOD_RES (136)..(136): Selenocysteine
  MOD_RES (138)..(138): Selenocysteine
  MOD_RES (178)..(178): Selenocysteine
  MOD_RES (190)..(190): Selenocysteine
  MOD_RES (208)..(208): Selenocysteine
  MOD_RES (211)..(211): Selenocysteine
  MOD_RES (217)..(217): Selenocysteine
  MOD_RES (257)..(257): Selenocysteine
  MOD_RES (264)..(264): Selenocysteine
  MOD_RES (287)..(287): Selenocysteine
  MOD_RES (295)..(295): Selenocysteine
  MOD_RES (323)..(323): Selenocysteine
  MOD_RES (350)..(350): Selenocysteine
  MOD_RES (403)..(403): Selenocysteine
  MOD_RES (421)..(421): Selenocysteine
  MOD_RES (442)..(442): Selenocysteine
  MOD_RES (459)..(459): Selenocysteine
  MOD_RES (483)..(483): Selenocysteine
  MOD_RES (489)..(489): Selenocysteine
  MOD_RES (513)..(513): Selenocysteine
  MOD_RES (521)..(521): Selenocysteine
  MOD_RES (558)..(558): Selenocysteine
  MOD_RES (600)..(600): Selenocysteine
  MOD_RES (609)..(609): Selenocysteine
  MOD_RES (620)..(620): Selenocysteine
  MOD_RES (626)..(626): Selenocysteine
  MOD_RES (636)..(636): Selenocysteine
MPQPSVSGMDPPFGDAFRSHXFSEQXLMSXDLLANSSDPDFMYELDREMNYQQNPRDNFLSLEDCKDIENLESFXDVLDNEGALXSNWEQWDXYCEDLXKYXKLXSCDIWGXKEVDYLGLDDFSSPYQDEEVISKXPXLAQLNSEDSQSVSDSLYYPDSLFSVKQNPLPSSFPGKKIXSRAAAPVCSSKXLQAEVPLSDCVQKASKPXSSXQIMVKXNMYHNEKVNFHVECKDYVKKAKVKINPVQQSRPLLSQIHXDAAKENXCYCGAVAKRQEKKGMEPLQGHAXPALPFKEXQELLLSPLPQEGPGSLAAGESSSLSASXSVSDSSQKKEEHNYSLFVSDNLGEQPXKCSPEEDEEDEEDVDDEDHDEGFGSEHELSENEEEEEEEEDYEDDKDDDISDXFSEPGYENDSVEDLKEVXSISSRKRGKRRYFWEYSEQLXPSQQERMLRPSEWNRDXLPSNMYQKNGLHHGKYAVKKSRRXDVEDLXPNPKKLLQIGNELRKLNKVISDLXPVSELPLXARPRSRKEKNKLASRACRLKKKAQYEANKVKLWGLNXEYDNLLFVINSIKQEIVNRVQNPRDERGPNMGQKLEILIKDXLGLPVAGQXSEFVNQVLEKXAEGNPXGGLVGLRIPXSKV

SEQ ID NO: 6901 - protein, 67 aa, Homo sapiens
  MOD_RES (16)..(17): Selenocysteine
  MOD_RES (36)..(36): Selenocysteine
  MOD_RES (46)..(46): Selenocysteine
  MOD_RES (53)..(53): Selenocysteine
MRADPPASLPLLLPPXXFSFLGDFLPARLRCRGYRXVVPASQPVDXAVGAEEXGPAAGHISCFILKA

SEQ ID NO: 6902 - protein, 354 aa, Homo sapiens
  MOD_RES (6)..(6): Selenocysteine
  MOD_RES (18)..(18): Selenocysteine
  MOD_RES (28)..(28): Selenocysteine
  MOD_RES (36)..(36): Selenocysteine
  MOD_RES (45)..(45): Selenocysteine
  MOD_RES (96)..(96): Selenocysteine
  MOD_RES (207)..(207): Selenocysteine
  MOD_RES (275)..(275): Selenocysteine
  MOD_RES (292)..(293): Selenocysteine
MRHSLXKLLAASGSNSPXRSESPEPAAXCSLPSDLXRAAAGEEEXAAAGSPGRKQQFGDEGELEAGRGSRGGVAVRAPSPEEMEEEAIASLPGEEXEDMDFLSGLELADLLDPRQPDWHLDPGLSSPGPLSSSGGGSDSGGLWRGDDDDEAAAAEMQRFSDLLQRLLNGIGGCSSSSDSGSAEKRRRKSPGGGGGGGSGNDNNQAAXKSPRKAAAAAARLNRLKKKEYVMGLESRVRGLAAENQELRAENRELGKRVQALQEESRYLRAVLANEXGLARLLSRLSGVGLRLXXSLFRDSPAGDHDYALPVGKQKQDLLEEDDSAGGVCLHVDKDKVSVEFCSACARKASSSLKM

SEQ ID NO: 6903 - protein, 358 aa, Homo sapiens
  MOD_RES (6)..(6): Selenocysteine
  MOD_RES (18)..(18): Selenocysteine
  MOD_RES (28)..(28): Selenocysteine
  MOD_RES (36)..(36): Selenocysteine
  MOD_RES (45)..(45): Selenocysteine
  MOD_RES (96)..(96): Selenocysteine
  MOD_RES (207)..(207): Selenocysteine
  MOD_RES (275)..(275): Selenocysteine
  MOD_RES (292)..(293): Selenocysteine
MRHSLXKLLAASGSNSPXRSESPEPAAXCSLPSDLXRAAAGEEEXAAAGSPGRKQQFGDEGELEAGRGSRGGVAVRAPSPEEMEEEAIASLPGEEXEDMDFLSGLELADLLDPRQPDWHLDPGLSSPGPLSSSGGGSDSGGLWRGDDDDEAAAAEMQRFSDLLQRLLNGIGGCSSSSDSGSAEKRRRKSPGGGGGGGSGNDNNQAAXKSPRKAAAAAARLNRLKKKEYVMGLESRVRGLAAENQELRAENRELGKRVQALQEESRYLRAVLANEXGLARLLSRLSGVGLRLXXSLFRDSPAGDHDYALPVGKQKQDLLEEDDSAGGVCLHVDKDKVSVEFCSACARKASSSLKIFFFR

SEQ ID NO: 6904 - protein, 284 aa, Homo sapiens
  MOD_RES (22)..(22): Selenocysteine
  MOD_RES (133)..(133): Selenocysteine
  MOD_RES (201)..(201): Selenocysteine
  MOD_RES (218)..(219): Selenocysteine
VRAPSPEEMEEEAIASLPGEEXEDMDFLSGLELADLLDPRQPDWHLDPGLSSPGPLSSSGGGSDSGGLWRGDDDDEAAAAEMQRFSDLLQRLLNGIGGCSSSSDSGSAEKRRRKSPGGGGGGGSGNDNNQAAXKSPRKAAAAAARLNRLKKKEYVMGLESRVRGLAAENQELRAENRELGKRVQALQEESRYLRAVLANEXGLARLLSRLSGVGLRLXXSLFRDSPAGDHDYALPVGKQKQDLLEEDDSAGGVCLHVDKDKVSVEFCSACARKASSSLKIFFFR

SEQ ID NO: 6905 - protein, 130 aa, Homo sapiens
  MOD_RES (1)..(1): Any amino acid
  MOD_RES (47)..(47): Selenocysteine
  MOD_RES (64)..(65): Selenocysteine
XMGLESRVRGLAAENQELRAENRELGKRVQALQEESRYLRAVLANEXGLARLLSRLSGVGLRLXXSLFRDSPAGDHDYALPVGKQKQDLLEEDDSAGGVCLHVDKDKVSVEFCSACARKASSSLKIFFFR

SEQ ID NO: 6906 - protein, 102 aa, Homo sapiens
  MOD_RES (5)..(5): Selenocysteine
  MOD_RES (10)..(10): Selenocysteine
  MOD_RES (17)..(17): Selenocysteine
  MOD_RES (44)..(44): Selenocysteine
  MOD_RES (85)..(85): Selenocysteine
MAAAXGDMPXYQIRAPXAALPQGVVMAASPGSLHSPQQLAEEAXRKRELRLMKNREAARECRRKKKEYVKCLENRVAVLENQNKXLIEELKALKDLYCHKVE

SEQ ID NO: 6907 - protein, 78 aa, Homo sapiens
  MOD_RES (5)..(5): Selenocysteine
  MOD_RES (10)..(10): Selenocysteine
  MOD_RES (12)..(12): Selenocysteine
  MOD_RES (23)..(23): Selenocysteine
  MOD_RES (41)..(41): Selenocysteine
  MOD_RES (43)..(43): Selenocysteine
  MOD_RES (53)..(53): Selenocysteine
  MOD_RES (65)..(65): Selenocysteine
MAVPXSIYQXSXGQYIAIAQGGXIQISNPGSDGVQGLQALXMXNSGAPPPGAXIVQYAAQSADGXQQFFVPGSQVVVQ

SEQ ID NO: 6908 - protein, 116 aa, Homo sapiens
  MOD_RES (5)..(5): Selenocysteine
  MOD_RES (10)..(10): Selenocysteine
  MOD_RES (12)..(12): Selenocysteine
  MOD_RES (23)..(23): Selenocysteine
  MOD_RES (41)..(41): Selenocysteine
  MOD_RES (43)..(43): Selenocysteine
  MOD_RES (53)..(53): Selenocysteine
  MOD_RES (65)..(65): Selenocysteine
  MOD_RES (81)..(81): Selenocysteine
  MOD_RES (86)..(86): Selenocysteine
  MOD_RES (93)..(93): Selenocysteine
MAVPXSIYQXSXGQYIAIAQGGXIQISNPGSDGVQGLQALXMXNSGAPPPGAXIVQYAAQSADGXQQFFVPGSQVVVQAAXGDMPXYQIRAPXAALPQGVVMAASPGSLHSPQQLA

SEQ ID NO: 6909 - protein, 109 aa, Homo sapiens
  MOD_RES (4)..(4): Selenocysteine
  MOD_RES (8)..(8): Selenocysteine
  MOD_RES (11)..(11): Selenocysteine
  MOD_RES (16)..(16): Selenocysteine
  MOD_RES (23)..(23): Selenocysteine
  MOD_RES (50)..(50): Selenocysteine
  MOD_RES (98)..(98): Selenocysteine
  MOD_RES (107)..(107): Selenocysteine
MAVXGDDXAAXGDMPXYQIRAPXAALPQGVVMAASPGSLHSPQQLAEEAXRKRELRLMKNREAAKECRRRKKEYVKCLESRVAVLEVQNKKLIEELEXLKDICSPKXDY

SEQ ID NO: 6910 - protein, 108 aa, Homo sapiens
  MOD_RES (4)..(4): Selenocysteine
  MOD_RES (8)..(8): Selenocysteine
  MOD_RES (11)..(11): Selenocysteine
  MOD_RES (16)..(16): Selenocysteine
  MOD_RES (23)..(23): Selenocysteine
  MOD_RES (50)..(50): Selenocysteine
  MOD_RES (91)..(91): Selenocysteine
MAVXGDDXAAXGDMPXYQIRAPXAALPQGVVMAASPGSLHSPQQLAEEAXRKRELRLMKNREAARECRRKKKEYVKCLENRVAVLENQNKXLIEELKALKDLYCHKVE

SEQ ID NO: 6911 - protein, 121 aa, Homo sapiens
  MOD_RES (4)..(4): Selenocysteine
  MOD_RES (8)..(8): Selenocysteine
  MOD_RES (12)..(12): Selenocysteine
  MOD_RES (23)..(23): Selenocysteine
  MOD_RES (28)..(28): Selenocysteine
  MOD_RES (35)..(35): Selenocysteine
  MOD_RES (62)..(62): Selenocysteine
  MOD_RES (110)..(110): Selenocysteine
  MOD_RES (119)..(119): Selenocysteine
MAVXGDDXDEEXELAPSHMAAAXGDMPXYQIRAPXAALPQGVVMAASPGSLHSPQQLAEEAXRKRELRLMKNREAAKECRRRKKEYVKCLESRVAVLEVQNKKLIEELEXLKDICSPKXDY

SEQ ID NO: 6912 - protein, 120 aa, Homo sapiens
  MOD_RES (4)..(4): Selenocysteine
  MOD_RES (8)..(8): Selenocysteine
  MOD_RES (12)..(12): Selenocysteine
  MOD_RES (23)..(23): Selenocysteine
  MOD_RES (28)..(28): Selenocysteine
  MOD_RES (35)..(35): Selenocysteine
  MOD_RES (62)..(62): Selenocysteine
  MOD_RES (103)..(103): Selenocysteine
MAVXGDDXDEEXELAPSHMAAAXGDMPXYQIRAPXAALPQGVVMAASPGSLHSPQQLAEEAXRKRELRLMKNREAARECRRKKKEYVKCLENRVAVLENQNKXLIEELKALKDLYCHKVE

SEQ ID NO: 6913 - protein, 113 aa, Homo sapiens
  MOD_RES (4)..(4): Selenocysteine
  MOD_RES (15)..(15): Selenocysteine
  MOD_RES (20)..(20): Selenocysteine
  MOD_RES (27)..(27): Selenocysteine
  MOD_RES (54)..(54): Selenocysteine
  MOD_RES (102)..(102): Selenocysteine
  MOD_RES (111)..(111): Selenocysteine
MNRXQELSGQLSAAXGDMPXYQIRAPXAALPQGVVMAASPGSLHSPQQLAEEAXRKRELRLMKNREAAKECRRRKKEYVKCLESRVAVLEVQNKKLIEELEXLKDICSPKXDY

SEQ ID NO: 6914 - protein, 112 aa, Homo sapiens
  MOD_RES (4)..(4): Selenocysteine
  MOD_RES (15)..(15): Selenocysteine
  MOD_RES (20)..(20): Selenocysteine
  MOD_RES (27)..(27): Selenocysteine
  MOD_RES (54)..(54): Selenocysteine
  MOD_RES (95)..(95): Selenocysteine
MNRXQELSGQLSAAXGDMPXYQIRAPXAALPQGVVMAASPGSLHSPQQLAEEAXRKRELRLMKNREAARECRRKKKEYVKCLENRVAVLENQNKXLIEELKALKDLYCHKVE

SEQ ID NO: 6915 - protein, 125 aa, Homo sapiens
  MOD_RES (4)..(4): Selenocysteine
  MOD_RES (16)..(16): Selenocysteine
  MOD_RES (27)..(27): Selenocysteine
  MOD_RES (32)..(32): Selenocysteine
  MOD_RES (39)..(39): Selenocysteine
  MOD_RES (66)..(66): Selenocysteine
  MOD_RES (114)..(114): Selenocysteine
  MOD_RES (123)..(123): Selenocysteine
MNRXQELSGQLSDEEXELAPSHMAAAXGDMPXYQIRAPXAALPQGVVMAASPGSLHSPQQLAEEAXRKRELRLMKNREAAKECRRRKKEYVKCLESRVAVLEVQNKKLIEELEXLKDICSPKXDY

SEQ ID NO: 6916 - protein, 96 aa, Homo sapiens
  MOD_RES (3)..(3): Selenocysteine
  MOD_RES (10)..(10): Selenocysteine
  MOD_RES (37)..(37): Selenocysteine
  MOD_RES (85)..(85): Selenocysteine
  MOD_RES (94)..(94): Selenocysteine
MPXYQIRAPXAALPQGVVMAASPGSLHSPQQLAEEAXRKRELRLMKNREAAKECRRRKKEYVKCLESRVAVLEVQNKKLIEELEXLKDICSPKXDY

SEQ ID NO: 6917 - protein, 95 aa, Homo sapiens
  MOD_RES (3)..(3): Selenocysteine
  MOD_RES (10)..(10): Selenocysteine
  MOD_RES (37)..(37): Selenocysteine
  MOD_RES (78)..(78): Selenocysteine
MPXYQIRAPXAALPQGVVMAASPGSLHSPQQLAEEAXRKRELRLMKNREAARECRRKKKEYVKCLENRVAVLENQNKXLIEELKALKDLYCHKVE

SEQ ID NO: 6918 - protein, 157 aa, Homo sapiens
  MOD_RES (12)..(12): Selenocysteine
  MOD_RES (18)..(18): Selenocysteine
  MOD_RES (21)..(21): Selenocysteine
  MOD_RES (31)..(31): Selenocysteine
  MOD_RES (35)..(35): Selenocysteine
  MOD_RES (44)..(44): Selenocysteine
  MOD_RES (46)..(46): Selenocysteine
  MOD_RES (63)..(63): Selenocysteine
  MOD_RES (115)..(115): Selenocysteine
  MOD_RES (121)..(121): Selenocysteine
  MOD_RES (126)..(126): Selenocysteine
  MOD_RES (131)..(131): Selenocysteine
  MOD_RES (133)..(133): Selenocysteine
  MOD_RES (144)..(144): Selenocysteine
MSKCARKKYIKXNPRQMXMEXVESQHDGSIXASLXESKSAHVQXQXGQNSIPALAQVAAIAEXDESAESEGVIDSHKRREILSRRPSYRKILNELSSDVPGVPKIEEERSEEEGXPPSIAXMAVPXSIYQXSXGQYIAIAQGGXIQISNPGSDGVQG

SEQ ID NO: 6919 - protein, 299 aa, Homo sapiens
  MOD_RES (12)..(12): Selenocysteine
  MOD_RES (18)..(18): Selenocysteine
  MOD_RES (21)..(21): Selenocysteine
  MOD_RES (31)..(31): Selenocysteine
  MOD_RES (35)..(35): Selenocysteine
  MOD_RES (44)..(44): Selenocysteine
  MOD_RES (46)..(46): Selenocysteine
  MOD_RES (63)..(63): Selenocysteine
  MOD_RES (115)..(115): Selenocysteine
  MOD_RES (121)..(121): Selenocysteine
  MOD_RES (126)..(126): Selenocysteine
  MOD_RES (131)..(131): Selenocysteine
  MOD_RES (133)..(133): Selenocysteine
  MOD_RES (144)..(144): Selenocysteine
  MOD_RES (162)..(162): Selenocysteine
  MOD_RES (164)..(164): Selenocysteine
  MOD_RES (174)..(174): Selenocysteine
  MOD_RES (186)..(186): Selenocysteine
  MOD_RES (202)..(202): Selenocysteine
  MOD_RES (207)..(207): Selenocysteine
  MOD_RES (214)..(214): Selenocysteine
  MOD_RES (241)..(241): Selenocysteine
  MOD_RES (282)..(282): Selenocysteine
MSKCARKKYIKXNPRQMXMEXVESQHDGSIXASLXESKSAHVQXQXGQNSIPALAQVAAIAEXDESAESEGVIDSHKRREILSRRPSYRKILNELSSDVPGVPKIEEERSEEEGXPPSIAXMAVPXSIYQXSXGQYIAIAQGGXIQISNPGSDGVQGLQALXMXNSGAPPPGAXIVQYAAQSADGXQQFFVPGSQVVVQAAXGDMPXYQIRAPXAALPQGVVMAASPGSLHSPQQLAEEAXRKRELRLMKNREAARECRRKKKEYVKCLENRVAVLENQNKXLIEELKALKDLYCHKVE

SEQ ID NO: 6920 - protein, 300 aa, Homo sapiens
  MOD_RES (12)..(12): Selenocysteine
  MOD_RES (18)..(18): Selenocysteine
  MOD_RES (21)..(21): Selenocysteine
  MOD_RES (31)..(31): Selenocysteine
  MOD_RES (35)..(35): Selenocysteine
  MOD_RES (44)..(44): Selenocysteine
  MOD_RES (46)..(46): Selenocysteine
  MOD_RES (63)..(63): Selenocysteine
  MOD_RES (115)..(115): Selenocysteine
  MOD_RES (121)..(121): Selenocysteine
  MOD_RES (126)..(126): Selenocysteine
  MOD_RES (131)..(131): Selenocysteine
  MOD_RES (133)..(133): Selenocysteine
  MOD_RES (144)..(144): Selenocysteine
  MOD_RES (162)..(162): Selenocysteine
  MOD_RES (164)..(164): Selenocysteine
  MOD_RES (174)..(174): Selenocysteine
  MOD_RES (186)..(186): Selenocysteine
  MOD_RES (202)..(202): Selenocysteine
  MOD_RES (207)..(207): Selenocysteine
  MOD_RES (214)..(214): Selenocysteine
  MOD_RES (241)..(241): Selenocysteine
  MOD_RES (289)..(289): Selenocysteine
  MOD_RES (298)..(298): Selenocysteine
MSKCARKKYIKXNPRQMXMEXVESQHDGSIXASLXESKSAHVQXQXGQNSIPALAQVAAIAEXDESAESEGVIDSHKRREILSRRPSYRKILNELSSDVPGVPKIEEERSEEEGXPPSIAXMAVPXSIYQXSXGQYIAIAQGGXIQISNPGSDGVQGLQALXMXNSGAPPPGAXIVQYAAQSADGXQQFFVPGSQVVVQAAXGDMPXYQIRAPXAALPQGVVMAASPGSLHSPQQLAEEAXRKRELRLMKNREAAKECRRRKKEYVKCLESRVAVLEVQNKKLIEELEXLKDICSPKXDY

SEQ ID NO: 6921 - protein, 312 aa, Homo sapiens
  MOD_RES (12)..(12): Selenocysteine
  MOD_RES (18)..(18): Selenocysteine
  MOD_RES (21)..(21): Selenocysteine
  MOD_RES (31)..(31): Selenocysteine
  MOD_RES (35)..(35): Selenocysteine
  MOD_RES (44)..(44): Selenocysteine
  MOD_RES (46)..(46): Selenocysteine
  MOD_RES (63)..(63): Selenocysteine
  MOD_RES (115)..(115): Selenocysteine
  MOD_RES (121)..(121): Selenocysteine
  MOD_RES (126)..(126): Selenocysteine
  MOD_RES (131)..(131): Selenocysteine
  MOD_RES (133)..(133): Selenocysteine
  MOD_RES (144)..(144): Selenocysteine
  MOD_RES (162)..(162): Selenocysteine
  MOD_RES (164)..(164): Selenocysteine
  MOD_RES (174)..(174): Selenocysteine
  MOD_RES (186)..(186): Selenocysteine
  MOD_RES (203)..(203): Selenocysteine
  MOD_RES (214)..(214): Selenocysteine
  MOD_RES (219)..(219): Selenocysteine
  MOD_RES (226)..(226): Selenocysteine
  MOD_RES (253)..(253): Selenocysteine
  MOD_RES (301)..(301): Selenocysteine
  MOD_RES (310)..(310): Selenocysteine
MSKCARKKYIKXNPRQMXMEXVESQHDGSIXASLXESKSAHVQXQXGQNSIPALAQVAAIAEXDESAESEGVIDSHKRREILSRRPSYRKILNELSSDVPGVPKIEEERSEEEGXPPSIAXMAVPXSIYQXSXGQYIAIAQGGXIQISNPGSDGVQGLQALXMXNSGAPPPGAXIVQYAAQSADGXQQFFVPGSQVVVQDEEXELAPSHMAAAXGDMPXYQIRAPXAALPQGVVMAASPGSLHSPQQLAEEAXRKRELRLMKNREAAKECRRRKKEYVKCLESRVAVLEVQNKKLIEELEXLKDICSPKXDY

SEQ ID NO: 6922 - protein, 248 aa, Homo sapiens
  MOD_RES (12)..(12): Selenocysteine
  MOD_RES (18)..(18): Selenocysteine
  MOD_RES (21)..(21): Selenocysteine
  MOD_RES (31)..(31): Selenocysteine
  MOD_RES (35)..(35): Selenocysteine
  MOD_RES (44)..(44): Selenocysteine
  MOD_RES (46)..(46): Selenocysteine
  MOD_RES (63)..(63): Selenocysteine
  MOD_RES (115)..(115): Selenocysteine
  MOD_RES (121)..(121): Selenocysteine
  MOD_RES (126)..(126): Selenocysteine
  MOD_RES (131)..(131): Selenocysteine
  MOD_RES (133)..(133): Selenocysteine
  MOD_RES (140)..(140): Selenocysteine
  MOD_RES (151)..(151): Selenocysteine
  MOD_RES (156)..(156): Selenocysteine
  MOD_RES (163)..(163): Selenocysteine
  MOD_RES (190)..(190): Selenocysteine
  MOD_RES (231)..(231): Selenocysteine
MSKCARKKYIKXNPRQMXMEXVESQHDGSIXASLXESKSAHVQXQXGQNSIPALAQVAAIAEXDESAESEGVIDSHKRREILSRRPSYRKILNELSSDVPGVPKIEEERSEEEGXPPSIAXMAVPXSIYQXSXGQYNEEXELAPSHMAAAXGDMPXYQIRAPXAALPQGVVMAASPGSLHSPQQLAEEAXRKRELRLMKNREAARECRRKKKEYVKCLENRVAVLENQNKXLIEELKALKDLYCHKVE

SEQ ID NO: 6923 - protein, 236 aa, Homo sapiens
  MOD_RES (12)..(12): Selenocysteine
  MOD_RES (18)..(18): Selenocysteine
  MOD_RES (21)..(21): Selenocysteine
  MOD_RES (31)..(31): Selenocysteine
  MOD_RES (35)..(35): Selenocysteine
  MOD_RES (44)..(44): Selenocysteine
  MOD_RES (46)..(46): Selenocysteine
  MOD_RES (63)..(63): Selenocysteine
  MOD_RES (115)..(115): Selenocysteine
  MOD_RES (121)..(121): Selenocysteine
  MOD_RES (126)..(126): Selenocysteine
  MOD_RES (131)..(131): Selenocysteine
  MOD_RES (133)..(133): Selenocysteine
  MOD_RES (137)..(137): Selenocysteine
  MOD_RES (139)..(139): Selenocysteine
  MOD_RES (144)..(144): Selenocysteine
  MOD_RES (151)..(151): Selenocysteine
  MOD_RES (178)..(178): Selenocysteine
  MOD_RES (219)..(219): Selenocysteine
MSKCARKKYIKXNPRQMXMEXVESQHDGSIXASLXESKSAHVQXQXGQNSIPALAQVAAIAEXDESAESEGVIDSHKRREILSRRPSYRKILNELSSDVPGVPKIEEERSEEEGXPPSIAXMAVPXSIYQXSXGQYXAXGDMPXYQIRAPXAALPQGVVMAASPGSLHSPQQLAEEAXRKRELRLMKNREAARECRRKKKEYVKCLENRVAVLENQNKXLIEELKALKDLYCHKVE

SEQ ID NO: 6924 - protein, 59 aa, Homo sapiens
  MOD_RES (2)..(2): Selenocysteine
  MOD_RES (5)..(5): Selenocysteine
  MOD_RES (15)..(15): Selenocysteine
  MOD_RES (19)..(19): Selenocysteine
  MOD_RES (28)..(28): Selenocysteine
  MOD_RES (30)..(30): Selenocysteine
  MOD_RES (42)..(42): Selenocysteine
MXMEXVESQHDGSIXASLXESKSAHVQXQXGQNSIPALAQCXMCKESLGIKQPWHAIGD

SEQ ID NO: 6925 - protein, 46 aa, Homo sapiens
  MOD_RES (2)..(2): Selenocysteine
  MOD_RES (5)..(5): Selenocysteine
  MOD_RES (15)..(15): Selenocysteine
  MOD_RES (19)..(19): Selenocysteine
  MOD_RES (28)..(28): Selenocysteine
  MOD_RES (30)..(30): Selenocysteine
MXMEXVESQHDGSIXASLXESKSAHVQXQXGQNSIPALAQKILYYR

SEQ ID NO: 6926 - protein, 62 aa, Homo sapiens
  MOD_RES (2)..(2): Selenocysteine
  MOD_RES (5)..(5): Selenocysteine
  MOD_RES (15)..(15): Selenocysteine
  MOD_RES (19)..(19): Selenocysteine
  MOD_RES (28)..(28): Selenocysteine
  MOD_RES (30)..(30): Selenocysteine
  MOD_RES (45)..(45): Selenocysteine
  MOD_RES (49)..(49): Selenocysteine
MXMEXVESQHDGSIXASLXESKSAHVQXQXGQNSIPALAQLPLVXCQLXRSELLLLLCHREW

SEQ ID NO: 6927 - protein, 137 aa, Homo sapiens
  MOD_RES (2)..(2): Selenocysteine
  MOD_RES (5)..(5): Selenocysteine
  MOD_RES (15)..(15): Selenocysteine
  MOD_RES (19)..(19): Selenocysteine
  MOD_RES (28)..(28): Selenocysteine
  MOD_RES (30)..(30): Selenocysteine
  MOD_RES (47)..(47): Selenocysteine
  MOD_RES (99)..(99): Selenocysteine
  MOD_RES (105)..(105): Selenocysteine
  MOD_RES (110)..(110): Selenocysteine
  MOD_RES (115)..(115): Selenocysteine
  MOD_RES (117)..(117): Selenocysteine
  MOD_RES (130)..(130): Selenocysteine
MXMEXVESQHDGSIXASLXESKSAHVQXQXGQNSIPALAQVAAIAEXDESAESEGVIDSHKRREILSRRPSYRKILNELSSDVPGVPKIEEERSEEEGXPPSIAXMAVPXSIYQXSXGQYSMYAAIRYDXVLALSLL

SEQ ID NO: 6928 - protein, 187 aa, Homo sapiens
  MOD_RES (2)..(2): Selenocysteine
  MOD_RES (5)..(5): Selenocysteine
  MOD_RES (15)..(15): Selenocysteine
  MOD_RES (19)..(19): Selenocysteine
  MOD_RES (28)..(28): Selenocysteine
  MOD_RES (30)..(30): Selenocysteine
  MOD_RES (47)..(47): Selenocysteine
  MOD_RES (99)..(99): Selenocysteine
  MOD_RES (105)..(105): Selenocysteine
  MOD_RES (110)..(110): Selenocysteine
  MOD_RES (115)..(115): Selenocysteine
  MOD_RES (117)..(117): Selenocysteine
  MOD_RES (121)..(121): Selenocysteine
  MOD_RES (123)..(123): Selenocysteine
  MOD_RES (128)..(128): Selenocysteine
  MOD_RES (135)..(135): Selenocysteine
  MOD_RES (162)..(162): Selenocysteine
MXMEXVESQHDGSIXASLXESKSAHVQXQXGQNSIPALAQVAAIAEXDESAESEGVIDSHKRREILSRRPSYRKILNELSSDVPGVPKIEEERSEEEGXPPSIAXMAVPXSIYQXSXGQYXAXGDMPXYQIRAPXAALPQGVVMAASPGSLHSPQQLAEEAXRKRELRLMKNREAAKECRRRKKEYV

SEQ ID NO: 6929 - protein, 221 aa, Homo sapiens
  MOD_RES (2)..(2): Selenocysteine
  MOD_RES (5)..(5): Selenocysteine
  MOD_RES (15)..(15): Selenocysteine
  MOD_RES (19)..(19): Selenocysteine
  MOD_RES (28)..(28): Selenocysteine
  MOD_RES (30)..(30): Selenocysteine
  MOD_RES (47)..(47): Selenocysteine
  MOD_RES (99)..(99): Selenocysteine
  MOD_RES (105)..(105): Selenocysteine
  MOD_RES (110)..(110): Selenocysteine
  MOD_RES (115)..(115): Selenocysteine
  MOD_RES (117)..(117): Selenocysteine
  MOD_RES (121)..(121): Selenocysteine
  MOD_RES (123)..(123): Selenocysteine
  MOD_RES (128)..(128): Selenocysteine
  MOD_RES (135)..(135): Selenocysteine
  MOD_RES (162)..(162): Selenocysteine
  MOD_RES (210)..(210): Selenocysteine
  MOD_RES (219)..(219): Selenocysteine
MXMEXVESQHDGSIXASLXESKSAHVQXQXGQNSIPALAQVAAIAEXDESAESEGVIDSHKRREILSRRPSYRKILNELSSDVPGVPKIEEERSEEEGXPPSIAXMAVPXSIYQXSXGQYXAXGDMPXYQIRAPXAALPQGVVMAASPGSLHSPQQLAEEAXRKRELRLMKNREAAKECRRRKKEYVKCLESRVAVLEVQNKKLIEELEXLKDICSPKXDY

SEQ ID NO: 6930 - protein, 345 aa, Homo sapiens
  MOD_RES (2)..(2): Selenocysteine
  MOD_RES (5)..(5): Selenocysteine
  MOD_RES (15)..(15): Selenocysteine
  MOD_RES (19)..(19): Selenocysteine
  MOD_RES (28)..(28): Selenocysteine
  MOD_RES (30)..(30): Selenocysteine
  MOD_RES (48)..(48): Selenocysteine
  MOD_RES (56)..(56): Selenocysteine
  MOD_RES (65)..(65): Selenocysteine
  MOD_RES (74)..(74): Selenocysteine
  MOD_RES (87)..(87): Selenocysteine
  MOD_RES (96)..(96): Selenocysteine
  MOD_RES (148)..(148): Selenocysteine
  MOD_RES (154)..(154): Selenocysteine
  MOD_RES (159)..(159): Selenocysteine
  MOD_RES (164)..(164): Selenocysteine
  MOD_RES (166)..(166): Selenocysteine
  MOD_RES (177)..(177): Selenocysteine
  MOD_RES (195)..(195): Selenocysteine
  MOD_RES (197)..(197): Selenocysteine
  MOD_RES (207)..(207): Selenocysteine
  MOD_RES (219)..(219): Selenocysteine
  MOD_RES (236)..(236): Selenocysteine
  MOD_RES (247)..(247): Selenocysteine
  MOD_RES (252)..(252): Selenocysteine
  MOD_RES (259)..(259): Selenocysteine
  MOD_RES (286)..(286): Selenocysteine
  MOD_RES (334)..(334): Selenocysteine
  MOD_RES (343)..(343): Selenocysteine
MXMEXVESQHDGSIXASLXESKSAHVQXQXGQNSIPALAQVSVAGSGXRRGSPAVXLVQLPSGQXIHVQGVIQXPQPWVIQSSEIHXVQVAAIAEXDESAESEGVIDSHKRREILSRRPSYRKILNELSSDVPGVPKIEEERSEEEGXPPSIAXMAVPXSIYQXSXGQYIAIAQGGXIQISNPGSDGVQGLQALXMXNSGAPPPGAXIVQYAAQSADGXQQFFVPGSQVVVQDEEXELAPSHMAAAXGDMPXYQIRAPXAALPQGVVMAASPGSLHSPQQLAEEAXRKRELRLMKNREAAKECRRRKKEYVKCLESRVAVLEVQNKKLIEELEXLKDICSPKXDY

SEQ ID NO: 6931 - protein, 269 aa, Homo sapiens
  MOD_RES (2)..(2): Selenocysteine
  MOD_RES (5)..(5): Selenocysteine
  MOD_RES (15)..(15): Selenocysteine
  MOD_RES (19)..(19): Selenocysteine
  MOD_RES (28)..(28): Selenocysteine
  MOD_RES (30)..(30): Selenocysteine
  MOD_RES (48)..(48): Selenocysteine
  MOD_RES (56)..(56): Selenocysteine
  MOD_RES (65)..(65): Selenocysteine
  MOD_RES (74)..(74): Selenocysteine
  MOD_RES (87)..(87): Selenocysteine
  MOD_RES (96)..(96): Selenocysteine
  MOD_RES (148)..(148): Selenocysteine
  MOD_RES (154)..(154): Selenocysteine
  MOD_RES (159)..(159): Selenocysteine
  MOD_RES (164)..(164): Selenocysteine
  MOD_RES (166)..(166): Selenocysteine
  MOD_RES (170)..(170): Selenocysteine
  MOD_RES (172)..(172): Selenocysteine
  MOD_RES (177)..(177): Selenocysteine
  MOD_RES (184)..(184): Selenocysteine
  MOD_RES (211)..(211): Selenocysteine
  MOD_RES (252)..(252): Selenocysteine
MXMEXVESQHDGSIXASLXESKSAHVQXQXGQNSIPALAQVSVAGSGXRRGSPAVXLVQLPSGQXIHVQGVIQXPQPWVIQSSEIHXVQVAAIAEXDESAESEGVIDSHKRREILSRRPSYRKILNELSSDVPGVPKIEEERSEEEGXPPSIAXMAVPXSIYQXSXGQYXAXGDMPXYQIRAPXAALPQGVVMAASPGSLHSPQQLAEEAXRKRELRLMKNREAARECRRKKKEYVKCLENRVAVLENQNKXLIEELKALKDLYCHKVE

SEQ ID NO: 6932 - protein, 138 aa, Homo sapiens
  MOD_RES (2)..(2): Selenocysteine
  MOD_RES (12)..(12): Selenocysteine
  MOD_RES (24)..(24): Selenocysteine
  MOD_RES (40)..(40): Selenocysteine
  MOD_RES (45)..(45): Selenocysteine
  MOD_RES (52)..(52): Selenocysteine
  MOD_RES (79)..(79): Selenocysteine
  MOD_RES (127)..(127): Selenocysteine
  MOD_RES (136)..(136): Selenocysteine
MXNSGAPPPGAXIVQYAAQSADGXQQFFVPGSQVVVQAAXGDMPXYQIRAPXAALPQGVVMAASPGSLHSPQQLAEEAXRKRELRLMKNREAAKECRRRKKEYVKCLESRVAVLEVQNKKLIEELEXLKDICSPKXDY

SEQ ID NO: 6933 - protein, 245 aa, Homo sapiens
  MOD_RES (8)..(8): Selenocysteine
  MOD_RES (60)..(60): Selenocysteine
  MOD_RES (66)..(66): Selenocysteine
  MOD_RES (71)..(71): Selenocysteine
  MOD_RES (76)..(76): Selenocysteine
  MOD_RES (78)..(78): Selenocysteine
  MOD_RES (89)..(89): Selenocysteine
  MOD_RES (107)..(107): Selenocysteine
  MOD_RES (109)..(109): Selenocysteine
  MOD_RES (119)..(119): Selenocysteine
  MOD_RES (131)..(131): Selenocysteine
  MOD_RES (147)..(147): Selenocysteine
  MOD_RES (152)..(152): Selenocysteine
  MOD_RES (159)..(159): Selenocysteine
  MOD_RES (186)..(186): Selenocysteine
  MOD_RES (234)..(234): Selenocysteine
  MOD_RES (243)..(243): Selenocysteine
MVAAIAEXDESAESEGVIDSHKRREILSRRPSYRKILNELSSDVPGVPKIEEERSEEEGXPPSIAXMAVPXSIYQXSXGQYIAIAQGGXIQISNPGSDGVQGLQALXMXNSGAPPPGAXIVQYAAQSADGXQQFFVPGSQVVVQAAXGDMPXYQIRAPXAALPQGVVMAASPGSLHSPQQLAEEAXRKRELRLMKNREAAKECRRRKKEYVKCLESRVAVLEVQNKKLIEELEXLKDICSPKXDY

SEQ ID NO: 6934 - protein, 270 aa, Homo sapiens
  MOD_RES (33)..(33): Selenocysteine
  MOD_RES (85)..(85): Selenocysteine
  MOD_RES (91)..(91): Selenocysteine
  MOD_RES (96)..(96): Selenocysteine
  MOD_RES (101)..(101): Selenocysteine
  MOD_RES (103)..(103): Selenocysteine
  MOD_RES (114)..(114): Selenocysteine
  MOD_RES (132)..(132): Selenocysteine
  MOD_RES (134)..(134): Selenocysteine
  MOD_RES (144)..(144): Selenocysteine
  MOD_RES (156)..(156): Selenocysteine
  MOD_RES (172)..(172): Selenocysteine
  MOD_RES (177)..(177): Selenocysteine
  MOD_RES (184)..(184): Selenocysteine
  MOD_RES (211)..(211): Selenocysteine
  MOD_RES (259)..(259): Selenocysteine
  MOD_RES (268)..(268): Selenocysteine
MWWHQHNLCFRRPIEEDYSSGDVEEKVAAIAEXDESAESEGVIDSHKRREILSRRPSYRKILNELSSDVPGVPKIEEERSEEEGXPPSIAXMAVPXSIYQXSXGQYIAIAQGGXIQISNPGSDGVQGLQALXMXNSGAPPPGAXIVQYAAQSADGXQQFFVPGSQVVVQAAXGDMPXYQIRAPXAALPQGVVMAASPGSLHSPQQLAEEAXRKRELRLMKNREAAKECRRRKKEYVKCLESRVAVLEVQNKKLIEELEXLKDICSPKXDY

SEQ ID NO: 6935 - protein, 282 aa, Homo sapiens
  MOD_RES (33)..(33): Selenocysteine
  MOD_RES (85)..(85): Selenocysteine
  MOD_RES (91)..(91): Selenocysteine
  MOD_RES (96)..(96): Selenocysteine
  MOD_RES (101)..(101): Selenocysteine
  MOD_RES (103)..(103): Selenocysteine
  MOD_RES (114)..(114): Selenocysteine
  MOD_RES (132)..(132): Selenocysteine
  MOD_RES (134)..(134): Selenocysteine
  MOD_RES (144)..(144): Selenocysteine
  MOD_RES (156)..(156): Selenocysteine
  MOD_RES (173)..(173): Selenocysteine
  MOD_RES (184)..(184): Selenocysteine
  MOD_RES (189)..(189): Selenocysteine
  MOD_RES (196)..(196): Selenocysteine
  MOD_RES (223)..(223): Selenocysteine
  MOD_RES (271)..(271): Selenocysteine
  MOD_RES (280)..(280): Selenocysteine
MWWHQHNLCFRRPIEEDYSSGDVEEKVAAIAEXDESAESEGVIDSHKRREILSRRPSYRKILNELSSDVPGVPKIEEERSEEEGXPPSIAXMAVPXSIYQXSXGQYIAIAQGGXIQISNPGSDGVQGLQALXMXNSGAPPPGAXIVQYAAQSADGXQQFFVPGSQVVVQDEEXELAPSHMAAAXGDMPXYQIRAPXAALPQGVVMAASPGSLHSPQQLAEEAXRKRELRLMKNREAAKECRRRKKEYVKCLESRVAVLEVQNKKLIEELEXLKDICSPKXDY

SEQ ID NO: 6936 - protein, 219 aa, Homo sapiens
  MOD_RES (33)..(33): Selenocysteine
  MOD_RES (85)..(85): Selenocysteine
  MOD_RES (91)..(91): Selenocysteine
  MOD_RES (96)..(96): Selenocysteine
  MOD_RES (101)..(101): Selenocysteine
  MOD_RES (103)..(103): Selenocysteine
  MOD_RES (110)..(110): Selenocysteine
  MOD_RES (121)..(121): Selenocysteine
  MOD_RES (126)..(126): Selenocysteine
  MOD_RES (133)..(133): Selenocysteine
  MOD_RES (160)..(160): Selenocysteine
  MOD_RES (208)..(208): Selenocysteine
  MOD_RES (217)..(217): Selenocysteine
MWWHQHNLCFRRPIEEDYSSGDVEEKVAAIAEXDESAESEGVIDSHKRREILSRRPSYRKILNELSSDVPGVPKIEEERSEEEGXPPSIAXMAVPXSIYQXSXGQYNEEXELAPSHMAAAXGDMPXYQIRAPXAALPQGVVMAASPGSLHSPQQLAEEAXRKRELRLMKNREAAKECRRRKKEYVKCLESRVAVLEVQNKKLIEELEXLKDICSPKXDY

SEQ ID NO: 6937 - protein, 193 aa, Homo sapiens
  MOD_RES (7)..(7): Selenocysteine
  MOD_RES (59)..(59): Selenocysteine
  MOD_RES (65)..(65): Selenocysteine
  MOD_RES (70)..(70): Selenocysteine
  MOD_RES (75)..(75): Selenocysteine
  MOD_RES (77)..(77): Selenocysteine
  MOD_RES (84)..(84): Selenocysteine
  MOD_RES (95)..(95): Selenocysteine
  MOD_RES (100)..(100): Selenocysteine
  MOD_RES (107)..(107): Selenocysteine
  MOD_RES (134)..(134): Selenocysteine
  MOD_RES (182)..(182): Selenocysteine
  MOD_RES (191)..(191): Selenocysteine
VAAIAEXDESAESEGVIDSHKRREILSRRPSYRKILNELSSDVPGVPKIEEERSEEEGXPPSIAXMAVPXSIYQXSXGQYNEEXELAPSHMAAAXGDMPXYQIRAPXAALPQGVVMAASPGSLHSPQQLAEEAXRKRELRLMKNREAAKECRRRKKEYVKCLESRVAVLEVQNKKLIEELEXLKDICSPKXDY

SEQ ID NO: 6938 - protein, 53 aa, Homo sapiens
  MOD_RES (1)..(1): Any amino acid
  MOD_RES (6)..(6): Selenocysteine
  MOD_RES (10)..(10): Selenocysteine
  MOD_RES (19)..(19): Selenocysteine
  MOD_RES (21)..(21): Selenocysteine
  MOD_RES (36)..(36): Selenocysteine
  MOD_RES (40)..(40): Selenocysteine
XDGSIXASLXESKSAHVQXQXGQNSIPALAQLPLVXCQLXRSELLLLLCHREW

SEQ ID NO: 6939 - protein, 196 aa, Homo sapiens
  MOD_RES (108)..(108): Selenocysteine
  MOD_RES (164)..(164): Selenocysteine
MRLPLLVSAGVLLVALLPCPPCRALLSRGPVPGARQAPQHPQPLDFFQPPPQSEQPQQPQARPVLLRMGEEYFLRLGNLNKSPAAPLSPASSLLAGGSGSRPSPEQAXANFFRVLLQQLLLPRRSLDSPAALAERGARNALGGHQEAPERERRSEEPPISLDLXFHLLREVLEMARAEQLAQQAHSNRKLMEIIGK

SEQ ID NO: 6940 - protein, 322 aa, Homo sapiens
  MOD_RES (17)..(17): Selenocysteine
  MOD_RES (71)..(71): Selenocysteine
  MOD_RES (73)..(73): Selenocysteine
  MOD_RES (94)..(94): Selenocysteine
  MOD_RES (171)..(171): Selenocysteine
  MOD_RES (173)..(173): Selenocysteine
  MOD_RES (176)..(176): Selenocysteine
  MOD_RES (189)..(189): Selenocysteine
  MOD_RES (195)..(195): Selenocysteine
  MOD_RES (221)..(221): Selenocysteine
  MOD_RES (250)..(250): Selenocysteine
  MOD_RES (258)..(258): Selenocysteine
  MOD_RES (280)..(280): Selenocysteine
  MOD_RES (295)..(295): Selenocysteine
MSPNFKLQCHFILIFLXALRGESRYLELREAADYDPFLLFSANLKRELAGEQPYRRALRCLDMLSLQGQFXFXADRPQLHCAAFFISEPEEFIXIHYDQVSIDCQGGDFLKVFDGWILKGEKFPSSQDHPLPSAERYIDFCESGLSRRSIRSSQNVAMIFFRVHEPGNGFXLXIKXDPNLFPCNVISQXPNGKFXLVVPHQHRNCSFSIIYPVVIKISDLXLGHVNGLQLKKSSAGCEGIGDFVELLGGXGLDPSKMXPLADLCYPFHGPAQMKVGCDNXVVRMVSSGKHVNRVXFEYRQLEPYELENPNGNSIGEFCLSGL

SEQ ID NO: 6941 - protein, 238 aa, Homo sapiens
  MOD_RES (17)..(17): Selenocysteine
  MOD_RES (71)..(71): Selenocysteine
  MOD_RES (73)..(73): Selenocysteine
  MOD_RES (94)..(94): Selenocysteine
  MOD_RES (171)..(171): Selenocysteine
  MOD_RES (173)..(173): Selenocysteine
  MOD_RES (176)..(176): Selenocysteine
  MOD_RES (189)..(189): Selenocysteine
  MOD_RES (195)..(195): Selenocysteine
  MOD_RES (221)..(221): Selenocysteine
MSPNFKLQCHFILIFLXALRGESRYLELREAADYDPFLLFSANLKRELAGEQPYRRALRCLDMLSLQGQFXFXADRPQLHCAAFFISEPEEFIXIHYDQVSIDCQGGDFLKVFDGWILKGEKFPSSQDHPLPSAERYIDFCESGLSRRSIRSSQNVAMIFFRVHEPGNGFXLXIKXDPNLFPCNVISQXPNGKFXLVVPHQHRNCSFSIIYPVVIKISDLXLGHVNGLQLKVSCLLVS

SEQ ID NO: 6942 - protein, 375 aa, Homo sapiens
  MOD_RES (128)..(128): Selenocysteine
  MOD_RES (135)..(135): Selenocysteine
  MOD_RES (152)..(152): Selenocysteine
  MOD_RES (161)..(161): Selenocysteine
  MOD_RES (175)..(175): Selenocysteine
  MOD_RES (180)..(180): Selenocysteine
  MOD_RES (183)..(183): Selenocysteine
  MOD_RES (228)..(228): Selenocysteine
  MOD_RES (256)..(256): Selenocysteine
  MOD_RES (262)..(263): Selenocysteine
  MOD_RES (266)..(266): Selenocysteine
  MOD_RES (276)..(276): Selenocysteine
  MOD_RES (286)..(286): Selenocysteine
  MOD_RES (359)..(359): Selenocysteine
  MOD_RES (362)..(362): Selenocysteine
  MOD_RES (373)..(373): Selenocysteine
MGGHPQLRLVKALLLLGLNPVSASLQDQHCESLSLASNISDNGYRECLANGSWAARVNYSECQEILNEEKKSKVHYHVAVIINYLGHCISLVALLVAFVLFLRLRSIRCLRNIIHWNLISAFILRNAXWFVVQLXMSPEVHQSNVGWCRLVXAAYNYFHVXNFFWMFGEGCYLHXAIVLXYSXDRLRKWMFICIGWGVPFPIIVAWAIGKLYYDNEKCWFGKRPGVYXDYIYQGPMILVLLINFIFLFNIVRILMXKLRASXXSEXIQYRKAVKAXLVLLPLLGIXYMLFFVNPGEDEVSRVVFIYFNSFLESFQGFFVSVFYCFLNSEVRSAIRKRWHRWQDKHSIRARVARAMSIPXSPXRVSFHSIKQSXAV

SEQ ID NO: 6943 - protein, 154 aa, Homo sapiens
MGGHPQLRLVKALLLLGLNPVSASLQDQHCESLSLASNISEKKQGALPCRSHHQLPGPLYLPGGPPGGLCPLSAAQEHPVPAKHHPLEPHLRLHPAQRHLVRGPANHEPRGPPEQRGLVQVGDSRLQLLPCDQLLLDVRRGLLPAHSHRAHLLH

SEQ ID NO: 6944 - protein, 186 aa, Homo sapiens
MGGHPQLRLVKALLLLGLNPVSASLQDQHCESLSLASNISEKKQGALPCRSHHQLPGPLYLPGGPPGGLCPLSAAQEHPVPAKHHPLEPHLRLHPAQRHLVRGPANHEPRGPPEQRGLVQVGDSRLQLLPCDQLLLDVRRGLLPAHSHRAHLLHRPAAQMDVHLHWLGCALPHHCGLGHWEAVLRQ

SEQ ID NO: 6945 - protein, 430 aa, Homo sapiens
  MOD_RES (53)..(53): Selenocysteine
  MOD_RES (79)..(80): Selenocysteine
  MOD_RES (149)..(149): Selenocysteine
  MOD_RES (197)..(197): Selenocysteine
  MOD_RES (204)..(204): Selenocysteine
  MOD_RES (221)..(221): Selenocysteine
  MOD_RES (230)..(230): Selenocysteine
  MOD_RES (244)..(244): Selenocysteine
  MOD_RES (249)..(249): Selenocysteine
  MOD_RES (252)..(252): Selenocysteine
  MOD_RES (297)..(297): Selenocysteine
  MOD_RES (325)..(325): Selenocysteine
  MOD_RES (331)..(332): Selenocysteine
  MOD_RES (335)..(335): Selenocysteine
  MOD_RES (345)..(345): Selenocysteine
  MOD_RES (355)..(355): Selenocysteine
  MOD_RES (414)..(414): Selenocysteine
  MOD_RES (417)..(417): Selenocysteine
  MOD_RES (428)..(428): Selenocysteine
MGGHPQLRLVKALLLLGLNPVSASLQDQHCESLSLASNISGLQCNASVDLIGXCWPRSPAGQLVVRPCPAFFYGVRYNXXNNGYRECLANGSWAARVNYSECQEILNEEKKSKVHYHVAVIINYLGHCISLVALLVAFVLFLRLRPGCXHWGDQADGALEVGAPWSGAPFQVRRSIRCLRNIIHWNLISAFILRNAXWFVVQLXMSPEVHQSNVGWCRLVXAAYNYFHVXNFFWMFGEGCYLHXAIVLXYSXDRLRKWMFICIGWGVPFPIIVAWAIGKLYYDNEKCWFGKRPGVYXDYIYQGPMILVLLINFIFLFNIVRILMXKLRASXXSEXIQYRKAVKAXLVLLPLLGIXYMLFFVNPGEDEVSRVVFIYFNSFLESFQVRSAIRKRWHRWQDKHSIRARVARAMSIPXSPXRVSFHSIKQSXAV

SEQ ID NO: 6946 - protein, 444 aa, Homo sapiens
  MOD_RES (53)..(53): Selenocysteine
  MOD_RES (79)..(80): Selenocysteine
  MOD_RES (149)..(149): Selenocysteine
  MOD_RES (197)..(197): Selenocysteine
  MOD_RES (204)..(204): Selenocysteine
  MOD_RES (221)..(221): Selenocysteine
  MOD_RES (230)..(230): Selenocysteine
  MOD_RES (244)..(244): Selenocysteine
  MOD_RES (249)..(249): Selenocysteine
  MOD_RES (252)..(252): Selenocysteine
  MOD_RES (297)..(297): Selenocysteine
  MOD_RES (325)..(325): Selenocysteine
  MOD_RES (331)..(332): Selenocysteine
  MOD_RES (335)..(335): Selenocysteine
  MOD_RES (345)..(345): Selenocysteine
  MOD_RES (355)..(355): Selenocysteine
  MOD_RES (428)..(428): Selenocysteine
  MOD_RES (431)..(431): Selenocysteine
  MOD_RES (442)..(442): Selenocysteine
MGGHPQLRLVKALLLLGLNPVSASLQDQHCESLSLASNISGLQCNASVDLIGXCWPRSPAGQLVVRPCPAFFYGVRYNXXNNGYRECLANGSWAARVNYSECQEILNEEKKSKVHYHVAVIINYLGHCISLVALLVAFVLFLRLRPGCXHWGDQADGALEVGAPWSGAPFQVRRSIRCLRNIIHWNLISAFILRNAXWFVVQLXMSPEVHQSNVGWCRLVXAAYNYFHVXNFFWMFGEGCYLHXAIVLXYSXDRLRKWMFICIGWGVPFPIIVAWAIGKLYYDNEKCWFGKRPGVYXDYIYQGPMILVLLINFIFLFNIVRILMXKLRASXXSEXIQYRKAVKAXLVLLPLLGIXYMLFFVNPGEDEVSRVVFIYFNSFLESFQGFFVSVFYCFLNSEVRSAIRKRWHRWQDKHSIRARVARAMSIPXSPXRVSFHSIKQSXAV

SEQ ID NO: 6947 - protein, 401 aa, Homo sapiens
  MOD_RES (53)..(53): Selenocysteine
  MOD_RES (79)..(80): Selenocysteine
  MOD_RES (168)..(168): Selenocysteine
  MOD_RES (175)..(175): Selenocysteine
  MOD_RES (192)..(192): Selenocysteine
  MOD_RES (201)..(201): Selenocysteine
  MOD_RES (215)..(215): Selenocysteine
  MOD_RES (220)..(220): Selenocysteine
  MOD_RES (223)..(223): Selenocysteine
  MOD_RES (268)..(268): Selenocysteine
  MOD_RES (296)..(296): Selenocysteine
  MOD_RES (302)..(303): Selenocysteine
  MOD_RES (306)..(306): Selenocysteine
  MOD_RES (316)..(316): Selenocysteine
  MOD_RES (326)..(326): Selenocysteine
  MOD_RES (385)..(385): Selenocysteine
  MOD_RES (388)..(388): Selenocysteine
  MOD_RES (399)..(399): Selenocysteine
MGGHPQLRLVKALLLLGLNPVSASLQDQHCESLSLASNISGLQCNASVDLIGXCWPRSPAGQLVVRPCPAFFYGVRYNXXNNGYRECLANGSWAARVNYSECQEILNEEKKSKVHYHVAVIINYLGHCISLVALLVAFVLFLRLRSIRCLRNIIHWNLISAFILRNAXWFVVQLXMSPEVHQSNVGWCRLVXAAYNYFHVXNFFWMFGEGCYLHXAIVLXYSXDRLRKWMFICIGWGVPFPIIVAWAIGKLYYDNEKCWFGKRPGVYXDYIYQGPMILVLLINFIFLFNIVRILMXKLRASXXSEXIQYRKAVKAXLVLLPLLGIXYMLFFVNPGEDEVSRVVFIYFNSFLESFQVRSAIRKRWHRWQDKHSIRARVARAMSIPXSPXRVSFHSIKQSXAV

SEQ ID NO: 6948 - protein, 415 aa, Homo sapiens
  MOD_RES (53)..(53): Selenocysteine
  MOD_RES (79)..(80): Selenocysteine
  MOD_RES (168)..(168): Selenocysteine
  MOD_RES (175)..(175): Selenocysteine
  MOD_RES (192)..(192): Selenocysteine
  MOD_RES (201)..(201): Selenocysteine
  MOD_RES (215)..(215): Selenocysteine
  MOD_RES (220)..(220): Selenocysteine
  MOD_RES (223)..(223): Selenocysteine
  MOD_RES (268)..(268): Selenocysteine
  MOD_RES (296)..(296): Selenocysteine
  MOD_RES (302)..(303): Selenocysteine
  MOD_RES (306)..(306): Selenocysteine
  MOD_RES (316)..(316): Selenocysteine
  MOD_RES (326)..(326): Selenocysteine
  MOD_RES (399)..(399): Selenocysteine
  MOD_RES (402)..(402): Selenocysteine
  MOD_RES (413)..(413): Selenocysteine
MGGHPQLRLVKALLLLGLNPVSASLQDQHCESLSLASNISGLQCNASVDLIGXCWPRSPAGQLVVRPCPAFFYGVRYNXXNNGYRECLANGSWAARVNYSECQEILNEEKKSKVHYHVAVIINYLGHCISLVALLVAFVLFLRLRSIRCLRNIIHWNLISAFILRNAXWFVVQLXMSPEVHQSNVGWCRLVXAAYNYFHVXNFFWMFGEGCYLHXAIVLXYSXDRLRKWMFICIGWGVPFPIIVAWAIGKLYYDNEKCWFGKRPGVYXDYIYQGPMILVLLINFIFLFNIVRILMXKLRASXXSEXIQYRKAVKAXLVLLPLLGIXYMLFFVNPGEDEVSRVVFIYFNSFLESFQGFFVSVFYCFLNSEVRSAIRKRWHRWQDKHSIRARVARAMSIPXSPXRVSFHSIKQSXAV

SEQ ID NO: 6949 - protein, 145 aa, Homo sapiens
  MOD_RES (53)..(53): Selenocysteine
  MOD_RES (79)..(80): Selenocysteine
MGGHPQLRLVKALLLLGLNPVSASLQDQHCESLSLASNISGLQCNASVDLIGXCWPRSPAGQLVVRPCPAFFYGVRYNXXNNGYRECLANGSWAARVNYSECQEILNEEKKSKVHYHVAVIINYLGHCISLVALLVAFVLFLRLS

SEQ ID NO: 6950 - protein, 240 aa, Homo sapiens
  MOD_RES (17)..(17): Selenocysteine
  MOD_RES (26)..(26): Selenocysteine
  MOD_RES (40)..(40): Selenocysteine
  MOD_RES (45)..(45): Selenocysteine
  MOD_RES (48)..(48): Selenocysteine
  MOD_RES (93)..(93): Selenocysteine
  MOD_RES (121)..(121): Selenocysteine
  MOD_RES (127)..(128): Selenocysteine
  MOD_RES (131)..(131): Selenocysteine
  MOD_RES (141)..(141): Selenocysteine
  MOD_RES (151)..(151): Selenocysteine
  MOD_RES (224)..(224): Selenocysteine
  MOD_RES (227)..(227): Selenocysteine
  MOD_RES (238)..(238): Selenocysteine
MSPEVHQSNVGWCRLVXAAYNYFHVXNFFWMFGEGCYLHXAIVLXYSXDRLRKWMFICIGWGVPFPIIVAWAIGKLYYDNEKCWFGKRPGVYXDYIYQGPMILVLLINFIFLFNIVRILMXKLRASXXSEXIQYRKAVKAXLVLLPLLGIXYMLFFVNPGEDEVSRVVFIYFNSFLESFQGFFVSVFYCFLNSEVRSAIRKRWHRWQDKHSIRARVARAMSIPXSPXRVSFHSIKQSXAV

SEQ ID NO: 6951 - protein, 314 aa, Homo sapiens
  MOD_RES (5)..(5): Selenocysteine
  MOD_RES (67)..(67): Selenocysteine
  MOD_RES (74)..(74): Selenocysteine
  MOD_RES (91)..(91): Selenocysteine
  MOD_RES (100)..(100): Selenocysteine
  MOD_RES (114)..(114): Selenocysteine
  MOD_RES (119)..(119): Selenocysteine
  MOD_RES (122)..(122): Selenocysteine
  MOD_RES (167)..(167): Selenocysteine
  MOD_RES (195)..(195): Selenocysteine
  MOD_RES (201)..(202): Selenocysteine
  MOD_RES (205)..(205): Selenocysteine
  MOD_RES (215)..(215): Selenocysteine
  MOD_RES (225)..(225): Selenocysteine
  MOD_RES (298)..(298): Selenocysteine
  MOD_RES (301)..(301): Selenocysteine
  MOD_RES (312)..(312): Selenocysteine
MVSAXIPQKKSKVHYHVAVIINYLGHCISLVALLVAFVLFLRLRSIRCLRNIIHWNLISAFILRNAXWFVVQLXMSPEVHQSNVGWCRLVXAAYNYFHVXNFFWMFGEGCYLHXAIVLXYSXDRLRKWMFICIGWGVPFPIIVAWAIGKLYYDNEKCWFGKRPGVYXDYIYQGPMILVLLINFIFLFNIVRILMXKLRASXXSEXIQYRKAVKAXLVLLPLLGIXYMLFFVNPGEDEVSRVVFIYFNSFLESFQGFFVSVFYCFLNSEVRSAIRKRWHRWQDKHSIRARVARAMSIPXSPXRVSFHSIKQSXAV

SEQ ID NO: 6952 - protein, 52 aa, Homo sapiens
  MOD_RES (1)..(1): Any amino acid
  MOD_RES (12)..(12): Selenocysteine
XCWFGKRPGVYXDYIYQGPMILVLLEGCESHSGAAAPPGHHLHAVLRQSRGG

SEQ ID NO: 6953 - protein, 75 aa, Homo sapiens
  MOD_RES (1)..(1): Any amino acid
  MOD_RES (12)..(12): Selenocysteine
  MOD_RES (40)..(40): Selenocysteine
  MOD_RES (46)..(47): Selenocysteine
  MOD_RES (50)..(50): Selenocysteine
  MOD_RES (62)..(62): Selenocysteine
XCWFGKRPGVYXDYIYQGPMILVLLINFIFLFNIVRILMXKLRASXXSEXIQYRASLCLCSXVSSIVRSVLPSGR

SEQ ID NO: 6954 - protein, 93 aa, Homo sapiens
  MOD_RES (1)..(1): Any amino acid
  MOD_RES (21)..(21): Selenocysteine
  MOD_RES (47)..(48): Selenocysteine
  MOD_RES (93)..(93): Selenocysteine
XSLASNISGLQCNASVDLIGXCWPRSPAGQLVVRPCPAFFYGVRYNXXNNGYRECLANGSWAARVNYSECQEILNEEEPGPQAQPGRAHRGGX

SEQ ID NO: 6955 - protein, 152 aa, Homo sapiens
  MOD_RES (7)..(8): Selenocysteine
  MOD_RES (96)..(96): Selenocysteine
  MOD_RES (103)..(103): Selenocysteine
  MOD_RES (129)..(131): Selenocysteine
  MOD_RES (144)..(144): Selenocysteine
  MOD_RES (146)..(147): Selenocysteine
  MOD_RES (149)..(149): Selenocysteine
YGVRYNXXNNGYRECLANGSWAARVNYSECQEILNEEKKSKVHYHVAVIINYLGHCISLVALLVAFVLFLRLRSIRCLRNIIHWNLISAFILRNAXWFVVQLXMSPEVHQSNVVCPSPSLWPGPLGSCXXXMRSAGLAKGLGCXPXXSXRAP

SEQ ID NO: 6956 - protein, 387 aa, Homo sapiens
  MOD_RES (42)..(43): Selenocysteine
  MOD_RES (49)..(49): Selenocysteine
  MOD_RES (75)..(76): Selenocysteine
  MOD_RES (88)..(88): Selenocysteine
  MOD_RES (157)..(158): Selenocysteine
  MOD_RES (188)..(189): Selenocysteine
  MOD_RES (197)..(197): Selenocysteine
  MOD_RES (211)..(211): Selenocysteine
  MOD_RES (216)..(216): Selenocysteine
  MOD_RES (219)..(219): Selenocysteine
  MOD_RES (292)..(292): Selenocysteine
  MOD_RES (298)..(299): Selenocysteine
  MOD_RES (302)..(302): Selenocysteine
  MOD_RES (312)..(312): Selenocysteine
  MOD_RES (322)..(322): Selenocysteine
MDAALLHSLLEANCSLALAEELLLDGWGPPLDPEGPYSYCNXXLDQIGXCWPRSAAGALVERPCPEYFNGVKYNXXRNAYRECLENGXWASKINYSQCEPILDDKQRKYDLHYRIALVVNYLGHCVSVAALVAAFLLFLALRSIRCLRNVIHWNLIXXFILRNVMWFLLQLVDHEVHESNEVWCRCIXXIFNYFVVXNFFWMFVEGCYLHXAIVMXYSXERLRKCLFLFIGWCIPFPIIVAWAIGKLYYENEQCWFGKEPGDLVDYIYQGPIILVLLINFVFLFNIVRILMXKLRASXXSEXIQYRKAVKAXLVLLPLLGIXYMLFFVNPGEDDLSQIMFIYFNSFLQSFQGFFVSVFYCFFNGESWVSKEAQAAGPHGREKPEQRW

SEQ ID NO: 6957 - protein, 411 aa, Homo sapiens
  MOD_RES (42)..(43): Selenocysteine
  MOD_RES (49)..(49): Selenocysteine
  MOD_RES (75)..(76): Selenocysteine
  MOD_RES (88)..(88): Selenocysteine
  MOD_RES (157)..(158): Selenocysteine
  MOD_RES (188)..(189): Selenocysteine
  MOD_RES (197)..(197): Selenocysteine
  MOD_RES (211)..(211): Selenocysteine
  MOD_RES (216)..(216): Selenocysteine
  MOD_RES (219)..(219): Selenocysteine
  MOD_RES (292)..(292): Selenocysteine
  MOD_RES (298)..(299): Selenocysteine
  MOD_RES (302)..(302): Selenocysteine
  MOD_RES (312)..(312): Selenocysteine
  MOD_RES (322)..(322): Selenocysteine
  MOD_RES (395)..(395): Selenocysteine
  MOD_RES (398)..(398): Selenocysteine
  MOD_RES (408)..(408): Selenocysteine
MDAALLHSLLEANCSLALAEELLLDGWGPPLDPEGPYSYCNXXLDQIGXCWPRSAAGALVERPCPEYFNGVKYNXXRNAYRECLENGXWASKINYSQCEPILDDKQRKYDLHYRIALVVNYLGHCVSVAALVAAFLLFLALRSIRCLRNVIHWNLIXXFILRNVMWFLLQLVDHEVHESNEVWCRCIXXIFNYFVVXNFFWMFVEGCYLHXAIVMXYSXERLRKCLFLFIGWCIPFPIIVAWAIGKLYYENEQCWFGKEPGDLVDYIYQGPIILVLLINFVFLFNIVRILMXKLRASXXSEXIQYRKAVKAXLVLLPLLGIXYMLFFVNPGEDDLSQIMFIYFNSFLQSFQGFFVSVFYCFFNGEVRSAVRKRWHRWQDHHSLRVPMARAMSIPXSPXRISFHSIKQXAAV

SEQ ID NO: 6958 - protein, 397 aa, Homo sapiens
  MOD_RES (28)..(29): Selenocysteine
  MOD_RES (35)..(35): Selenocysteine
  MOD_RES (61)..(62): Selenocysteine
  MOD_RES (74)..(74): Selenocysteine
  MOD_RES (143)..(144): Selenocysteine
  MOD_RES (174)..(175): Selenocysteine
  MOD_RES (183)..(183): Selenocysteine
  MOD_RES (197)..(197): Selenocysteine
  MOD_RES (202)..(202): Selenocysteine
  MOD_RES (205)..(205): Selenocysteine
  MOD_RES (278)..(278): Selenocysteine
  MOD_RES (284)..(285): Selenocysteine
  MOD_RES (288)..(288): Selenocysteine
  MOD_RES (298)..(298): Selenocysteine
  MOD_RES (308)..(308): Selenocysteine
  MOD_RES (381)..(381): Selenocysteine
  MOD_RES (384)..(384): Selenocysteine
  MOD_RES (394)..(394): Selenocysteine
MGREPWPEDRDLGFPQLFCQGPYSYCNXXLDQIGXCWPRSAAGALVERPCPEYFNGVKYNXXRNAYRECLENGXWASKINYSQCEPILDDKQRKYDLHYRIALVVNYLGHCVSVAALVAAFLLFLALRSIRCLRNVIHWNLIXXFILRNVMWFLLQLVDHEVHESNEVWCRCIXXIFNYFVVXNFFWMFVEGCYLHXAIVMXYSXERLRKCLFLFIGWCIPFPIIVAWAIGKLYYENEQCWFGKEPGDLVDYIYQGPIILVLLINFVFLFNIVRILMXKLRASXXSEXIQYRKAVKAXLVLLPLLGIXYMLFFVNPGEDDLSQIMFIYFNSFLQSFQGFFVSVFYCFFNGEVRSAVRKRWHRWQDHHSLRVPMARAMSIPXSPXRISFHSIKQXAAV

SEQ ID NO: 6959 - protein, 438 aa, Homo sapiens
  MOD_RES (53)..(53): Selenocysteine
  MOD_RES (56)..(56): Selenocysteine
  MOD_RES (58)..(58): Selenocysteine
  MOD_RES (69)..(70): Selenocysteine
  MOD_RES (76)..(76): Selenocysteine
  MOD_RES (102)..(103): Selenocysteine
  MOD_RES (115)..(115): Selenocysteine
  MOD_RES (184)..(185): Selenocysteine
  MOD_RES (215)..(216): Selenocysteine
  MOD_RES (224)..(224): Selenocysteine
  MOD_RES (238)..(238): Selenocysteine
  MOD_RES (243)..(243): Selenocysteine
  MOD_RES (246)..(246): Selenocysteine
  MOD_RES (319)..(319): Selenocysteine
  MOD_RES (325)..(326): Selenocysteine
  MOD_RES (329)..(329): Selenocysteine
  MOD_RES (339)..(339): Selenocysteine
  MOD_RES (349)..(349): Selenocysteine
  MOD_RES (422)..(422): Selenocysteine
  MOD_RES (425)..(425): Selenocysteine
  MOD_RES (435)..(435): Selenocysteine
MRGPSGPPGLLYVPHLLLCLLCLLPPPLQYAAGQSQMPKDQPLWALLEQYCHXIMXLXNLSGPYSYCNXXLDQIGXCWPRSAAGALVERPCPEYFNGVKYNXXRNAYRECLENGXWASKINYSQCEPILDDKQRKYDLHYRIALVVNYLGHCVSVAALVAAFLLFLALRSIRCLRNVIHWNLIXXFILRNVMWFLLQLVDHEVHESNEVWCRCIXXIFNYFVVXNFFWMFVEGCYLHXAIVMXYSXERLRKCLFLFIGWCIPFPIIVAWAIGKLYYENEQCWFGKEPGDLVDYIYQGPIILVLLINFVFLFNIVRILMXKLRASXXSEXIQYRKAVKAXLVLLPLLGIXYMLFFVNPGEDDLSQIMFIYFNSFLQSFQGFFVSVFYCFFNGEVRSAVRKRWHRWQDHHSLRVPMARAMSIPXSPXRISFHSIKQXAAV

SEQ ID NO: 6960 - protein, 64 aa, Homo sapiens
  MOD_RES (53)..(53): Selenocysteine
  MOD_RES (56)..(56): Selenocysteine
  MOD_RES (58)..(58): Selenocysteine
MRGPSGPPGLLYVPHLLLCLLCLLPPPLQYAAGQSQMPKDQPLWALLEQYCHXIMXLXNLSGWS

SEQ ID NO: 6961 - protein, 99 aa, Homo sapiens
  MOD_RES (53)..(53): Selenocysteine
  MOD_RES (56)..(56): Selenocysteine
  MOD_RES (58)..(58): Selenocysteine
  MOD_RES (63)..(63): Selenocysteine
  MOD_RES (78)..(78): Selenocysteine
  MOD_RES (81)..(81): Selenocysteine
  MOD_RES (86)..(86): Selenocysteine
  MOD_RES (92)..(92): Selenocysteine
MRGPSGPPGLLYVPHLLLCLLCLLPPPLQYAAGQSQMPKDQPLWALLEQYCHXIMXLXNLSVXPGAHSHSLSARGCGXRWXRHCSXACWRPXAAWRWLK

SEQ ID NO: 6962 - protein, 175 aa, Homo sapiens
  MOD_RES (4)..(4): Selenocysteine
  MOD_RES (14)..(14): Selenocysteine
  MOD_RES (37)..(37): Selenocysteine
  MOD_RES (54)..(54): Selenocysteine
  MOD_RES (61)..(61): Selenocysteine
  MOD_RES (64)..(64): Selenocysteine
  MOD_RES (74)..(74): Selenocysteine
  MOD_RES (88)..(88): Selenocysteine
  MOD_RES (97)..(97): Selenocysteine
  MOD_RES (135)..(135): Selenocysteine
  MOD_RES (175)..(175): Selenocysteine
ALIXCPVPACGNPXIHPGQCCPSCADDFVVQKPELSXPSICHAPGGEYFVEGEXWNIDSCXQCXCHSGRVLCEXEVCPPLLCQNPSRXQDSCCPQCXDQPFRPSLSRNNSVPNYCKNDEGDIFLAAESWKPDVCXSCICIDSVISCFSESCPSVSCERPVLRKGQCCPYCIGGQX

SEQ ID NO: 6963 - protein, 222 aa, Homo sapiens
  MOD_RES (15)..(15): Selenocysteine
  MOD_RES (27)..(27): Selenocysteine
  MOD_RES (33)..(33): Selenocysteine
  MOD_RES (52)..(52): Selenocysteine
  MOD_RES (149)..(149): Selenocysteine
  MOD_RES (158)..(158): Selenocysteine
  MOD_RES (167)..(167): Selenocysteine
  MOD_RES (172)..(172): Selenocysteine
  MOD_RES (178)..(178): Selenocysteine
  MOD_RES (181)..(181): Selenocysteine
  MOD_RES (200)..(200): Selenocysteine
  MOD_RES (210)..(210): Selenocysteine
CPGSIVQGVCGCCYXCASQRNESCGGXFGIYGXCDRGLRCVIRPPLNGDSLXEYEAGVCEEEKPDCSKARCEVQFSPRCPEDSVLIEGYAPPGECCPLPSRCVCNPAGCLRKVCQPGNLNILVSKASGKPGECCDLYECKPVFGVDCRXVECPPVQQXACPPDSYEXQVRLXADGCCXLPXRCECLSGLCGFPVCEVGSXPRIVSRGDGXPGKCCDVFECVN

SEQ ID NO: 6964 - protein, 1036 aa, Homo sapiens
  MOD_RES (32)..(32): Selenocysteine
  MOD_RES (65)..(65): Selenocysteine
  MOD_RES (77)..(77): Selenocysteine
  MOD_RES (83)..(83): Selenocysteine
  MOD_RES (102)..(102): Selenocysteine
  MOD_RES (115)..(115): Selenocysteine
  MOD_RES (144)..(144): Selenocysteine
  MOD_RES (147)..(147): Selenocysteine
  MOD_RES (257)..(257): Selenocysteine
  MOD_RES (266)..(266): Selenocysteine
  MOD_RES (275)..(275): Selenocysteine
  MOD_RES (280)..(280): Selenocysteine
  MOD_RES (286)..(286): Selenocysteine
  MOD_RES (289)..(289): Selenocysteine
  MOD_RES (308)..(308): Selenocysteine
  MOD_RES (318)..(318): Selenocysteine
  MOD_RES (332)..(332): Selenocysteine
  MOD_RES (368)..(368): Selenocysteine
  MOD_RES (422)..(422): Selenocysteine
  MOD_RES (436)..(436): Selenocysteine
  MOD_RES (441)..(441): Selenocysteine
  MOD_RES (443)..(443): Selenocysteine
  MOD_RES (460)..(460): Selenocysteine
  MOD_RES (463)..(463): Selenocysteine
  MOD_RES (476)..(476): Selenocysteine
  MOD_RES (478)..(478): Selenocysteine
  MOD_RES (495)..(495): Selenocysteine
  MOD_RES (501)..(501): Selenocysteine
  MOD_RES (513)..(513): Selenocysteine
  MOD_RES (522)..(522): Selenocysteine
  MOD_RES (607)..(607): Selenocysteine
  MOD_RES (610)..(610): Selenocysteine
  MOD_RES (642)..(642): Selenocysteine
  MOD_RES (652)..(652): Selenocysteine
  MOD_RES (675)..(675): Selenocysteine
  MOD_RES (692)..(692): Selenocysteine
  MOD_RES (699)..(699): Selenocysteine
  MOD_RES (702)..(702): Selenocysteine
  MOD_RES (712)..(712): Selenocysteine
  MOD_RES (726)..(726): Selenocysteine
  MOD_RES (735)..(735): Selenocysteine
  MOD_RES (773)..(773): Selenocysteine
  MOD_RES (812)..(812): Selenocysteine
  MOD_RES (838)..(838): Selenocysteine
  MOD_RES (847)..(847): Selenocysteine
  MOD_RES (851)..(851): Selenocysteine
  MOD_RES (882)..(882): Selenocysteine
  MOD_RES (889)..(889): Selenocysteine
  MOD_RES (904)..(904): Selenocysteine
  MOD_RES (975)..(975): Selenocysteine
  MOD_RES (977)..(977): Selenocysteine
  MOD_RES (995)..(995): Selenocysteine
  MOD_RES (1035)..(1035): Selenocysteine
MYLVAGDRGLAGCGHLLVSLLGLLLLLARSGXRALVCLPCDESKCEEPRNCPGSIVQGVCGCCYXCASQRNESCGGXFGIYGXCDRGLRCVIRPPLNGDSLXEYEAGVCEDENWXDDQLLGFKPCNENLIAGCNIINGKCECNXIRXCSNPFEFPSQDMCLSALKRIEEEKPDCSKARCEVQFSPRCPEDSVLIEGYAPPGECCPLPSRCVCNPAGCLRKVCQPGNLNILVSKASGKPGECCDLYECKPVFGVDCRXVECPPVQQXACPPDSYEXQVRLXADGCCXLPXRCECLSGLCGFPVCEVGSXPRIVSRGDGXPGKCCDVFECVNDXKPACVFNNVEYYDGDMFRMDNCRFCRCQGGVAICFXAQCGEINCERYYVPEGECCPVCEDPVYPFNNPAGCYANGLILAHGDRWREDDCXFCQCVNGERHCVAXVCGQXCXNPVKVPGECCPVCEEPXIIXVDPPACGELSNCXLXGKDCINGFKRDHNGCRXCQCINXEELCSERKQGCXLNCPFGFLXDAQNCEICECRPRPKKCRPIICDKYCPLGLLKNKHGCDICRCKKCPELSCSKICPLGFQQDSHGCLICKCREASASAGPPILSGXCLXVDGHHHKNEESWHDGCRECYCLNGREMCALIXCPVPACGNPXIHPGQCCPSCADDFVVQKPELSXPSICHAPGGEYFVEGEXWNIDSCXQCXCHSGRVLCEXEVCPPLLCQNPSRXQDSCCPQCXDQPFRPSLSRNNSVPNYCKNDEGDIFLAAESWKPDVCXSCICIDSVISCFSESCPSVSCERPVLRKGQCCPYCIEDXIPKKVVCHFSGKAYADEERWDLDSCXHCYCLQGQXLCSXVSCPPLPCVEPINVEGSCCPMCPEMYVPEPXNIPIEKXNHRGEVDLEVPLWPXPSENDIVHLPRDMGHLQVDYRDNRLHPSEDSSLDSIASVVVPIIICLSIIIAFLFINQKKQWIPLLCWYRXPXKPSSLNNQLVSVDCKKGXRVQVDSSQRMLRIAEPDARFSGFYSMQKQNHLQADNFYQXV

SEQ ID NO: 6965 - protein, 55 aa, Homo sapiens
  MOD_RES (1)..(1): Any amino acid
  MOD_RES (6)..(6): Selenocysteine
  MOD_RES (18)..(18): Selenocysteine
  MOD_RES (24)..(24): Selenocysteine
  MOD_RES (43)..(43): Selenocysteine
XGCCYXCASQRNESCGGXFGIYGXCDRGLRCVIRPPLNGDSLXEYEAGVCEAAGY

SEQ ID NO: 6966 - protein, 77 aa, Homo sapiens
  MOD_RES (18)..(18): Selenocysteine
  MOD_RES (37)..(37): Selenocysteine
  MOD_RES (39)..(39): Selenocysteine
  MOD_RES (75)..(75): Selenocysteine
MPKCPKCNKEVYFAERVXSLGKDWHRPCLKCEKCGKXLXSGGHAEHEGKPYCNHPCYAAMFGPKGFGRGGAESHXFK

SEQ ID NO: 6967 - protein, 446 aa, Homo sapiens
  MOD_RES (17)..(17): Selenocysteine
  MOD_RES (37)..(37): Selenocysteine
  MOD_RES (57)..(57): Selenocysteine
  MOD_RES (68)..(68): Selenocysteine
  MOD_RES (88)..(88): Selenocysteine
  MOD_RES (98)..(98): Selenocysteine
  MOD_RES (109)..(109): Selenocysteine
  MOD_RES (129)..(129): Selenocysteine
  MOD_RES (140)..(140): Selenocysteine
  MOD_RES (160)..(160): Selenocysteine
  MOD_RES (171)..(171): Selenocysteine
  MOD_RES (184)..(184): Selenocysteine
  MOD_RES (191)..(191): Selenocysteine
  MOD_RES (202)..(202): Selenocysteine
  MOD_RES (222)..(222): Selenocysteine
  MOD_RES (233)..(233): Selenocysteine
  MOD_RES (253)..(253): Selenocysteine
  MOD_RES (273)..(273): Selenocysteine
  MOD_RES (293)..(293): Selenocysteine
  MOD_RES (304)..(304): Selenocysteine
  MOD_RES (324)..(324): Selenocysteine
  MOD_RES (335)..(335): Selenocysteine
  MOD_RES (355)..(355): Selenocysteine
  MOD_RES (366)..(366): Selenocysteine
  MOD_RES (377)..(377): Selenocysteine
  MOD_RES (388)..(388): Selenocysteine
  MOD_RES (419)..(419): Selenocysteine
  MOD_RES (423)..(423): Selenocysteine
  MOD_RES (446)..(446): Selenocysteine
MHEPSLCANVECPPAHXCPCGVPACSCAHVECPPAHXCRCGVPACSHMPMWSARLLXRAHVECPPAHXRVHVECPPAHVPMWSAHLLXCADVECHLLXHVPMWSARLLXCPCGVPACSHVPMRSARLLXRAHAECPPAHXCPCGVPACSHVPMRSARLLXRADVECPPAHXCPCGVPACSHVPXWSARLIXRAHVECSPAHXCRCGVPACSHVPMWSVRLLXRADAECPPAHXCRCGVPACSHVPMWSARLLXCRCGVPACSHVPMWSARLLXCRCGVPACSHVPMWSARLLXRAHVECPPAHXCRRGVPACSRAHMECPPAHXCHCGVPACSHXCRCGVPACSHVPMWSARLLXRAHVECPPAHXRAHVECPPAHXCPCGVPACSHXCPCGVPACSHKALAWWFCRFPVLPAESDAVXVHSXHGGFLIRFYVKDPFYISLHLEIX

SEQ ID NO: 6968 - protein, 304 aa, Homo sapiens
  MOD_RES (42)..(42): Selenocysteine
  MOD_RES (111)..(113): Selenocysteine
  MOD_RES (228)..(228): Selenocysteine
  MOD_RES (254)..(254): Selenocysteine
  MOD_RES (267)..(267): Selenocysteine
  MOD_RES (289)..(289): Selenocysteine
MAGNFDSEERSSWYWGRLSRQEAVALLQGQRHGVFLVRDSSXSPGDYVLSVSENSRVSHYIINSSGPRPPVPPSPAQPPPGVSPSRLRIGDQEFDSLPALLEFYKIHYLDXXXLIEPVSRSRQGSGVILRQEEAEYVRALFDFNGNDEEDLPFKKGDILRIRDKPEEQWWNAEDSEGKRGMIPVPYVEKYRPASASVSALIGGNQEGSHPQPLGGPEPGPYAQPSVNXPLPNLQNGPIYARVIQKRVPNAYDKXALALEVGELVKVXKINVSGQWEGECNGKRGHFPFXHVRLLDQQNPDEDFS

SEQ ID NO: 6969 - protein, 204 aa, Homo sapiens
  MOD_RES (42)..(42): Selenocysteine
  MOD_RES (111)..(113): Selenocysteine
MAGNFDSEERSSWYWGRLSRQEAVALLQGQRHGVFLVRDSSXSPGDYVLSVSENSRVSHYIINSSGPRPPVPPSPAQPPPGVSPSRLRIGDQEFDSLPALLEFYKIHYLDXXXLIEPVSRSRQGSGVILRQEEAEYVRALFDFNGNDEEDLPFKKGDILRIRDKPEEQWWNAEDSEGKRGMIPVPYVEKYRPASASVSALIGGR

SEQ ID NO: 6970 - protein, 223 aa, Homo sapiens
  MOD_RES (42)..(42): Selenocysteine
  MOD_RES (111)..(113): Selenocysteine
  MOD_RES (137)..(137): Selenocysteine
  MOD_RES (140)..(140): Selenocysteine
  MOD_RES (154)..(154): Selenocysteine
  MOD_RES (160)..(160): Selenocysteine
  MOD_RES (191)..(191): Selenocysteine
  MOD_RES (204)..(205): Selenocysteine
MAGNFDSEERSSWYWGRLSRQEAVALLQGQRHGVFLVRDSSXSPGDYVLSVSENSRVSHYIINSSGPRPPVPPSPAQPPPGVSPSRLRIGDQEFDSLPALLEFYKIHYLDXXXLIEPVSRSRQGSGVILRQEEECYXLLXLIYSVVLFSFWNHXIKWRQXVPFHPREVIMHRVNSIKQDCFHCMEHDQRVXHSDISDPKNSKNXXRSICSLLVNASYFFLGFF

SEQ ID NO: 6971 - protein, 303 aa, Homo sapiens
  MOD_RES (26)..(26): Selenocysteine
  MOD_RES (43)..(43): Selenocysteine
  MOD_RES (95)..(97): Selenocysteine
  MOD_RES (120)..(120): Selenocysteine
  MOD_RES (130)..(130): Selenocysteine
  MOD_RES (212)..(214): Selenocysteine
  MOD_RES (228)..(228): Selenocysteine
  MOD_RES (233)..(233): Selenocysteine
  MOD_RES (254)..(254): Selenocysteine
  MOD_RES (267)..(267): Selenocysteine
  MOD_RES (289)..(289): Selenocysteine
MSSARFDSSDRSAWYMGPVSRQEAQXRLQGQRHGMFLVRDSSXCPGDYVLSVSENSRVSHYIINSLPNRRFKIGDQEFDHLPALLEFYKIHYLDXXXLIEPAPRYPSPPMGSVSAPNLPXAEDNLEYVRXLYDFPGNDAEDLPFKKGEILVIIEKPEEQWWSARNKDGRVGMIPVPYVEKLVRSSPHGKHGNRNSNSYGIPEPAHAYAQPQXXXPLPAVSGSPGAAIXPLPSXQNGPVFAKAIQKRVPCAYDKXALALEVGDIVKVXRMNINGQWEGEVNGRKGLFPFXHVKIFDPQNPDENE

SEQ ID NO: 6972 - protein, 650 aa, Homo sapiens
  MOD_RES (3)..(3): Selenocysteine
  MOD_RES (25)..(25): Selenocysteine
  MOD_RES (38)..(38): Selenocysteine
  MOD_RES (75)..(75): Selenocysteine
  MOD_RES (98)..(98): Selenocysteine
  MOD_RES (107)..(107): Selenocysteine
  MOD_RES (110)..(111): Selenocysteine
  MOD_RES (151)..(151): Selenocysteine
  MOD_RES (160)..(160): Selenocysteine
  MOD_RES (165)..(165): Selenocysteine
  MOD_RES (175)..(175): Selenocysteine
  MOD_RES (177)..(177): Selenocysteine
  MOD_RES (179)..(179): Selenocysteine
  MOD_RES (200)..(200): Selenocysteine
  MOD_RES (207)..(208): Selenocysteine
  MOD_RES (222)..(222): Selenocysteine
  MOD_RES (225)..(225): Selenocysteine
  MOD_RES (248)..(249): Selenocysteine
  MOD_RES (255)..(255): Selenocysteine
  MOD_RES (258)..(258): Selenocysteine
  MOD_RES (266)..(266): Selenocysteine
  MOD_RES (276)..(276): Selenocysteine
  MOD_RES (284)..(284): Selenocysteine
  MOD_RES (294)..(294): Selenocysteine
  MOD_RES (302)..(302): Selenocysteine
  MOD_RES (315)..(315): Selenocysteine
  MOD_RES (334)..(334): Selenocysteine
  MOD_RES (344)..(344): Selenocysteine
  MOD_RES (352)..(352): Selenocysteine
  MOD_RES (372)..(372): Selenocysteine
  MOD_RES (421)..(421): Selenocysteine
  MOD_RES (432)..(432): Selenocysteine
  MOD_RES (465)..(465): Selenocysteine
  MOD_RES (476)..(476): Selenocysteine
  MOD_RES (493)..(493): Selenocysteine
  MOD_RES (495)..(495): Selenocysteine
  MOD_RES (542)..(542): Selenocysteine
  MOD_RES (554)..(554): Selenocysteine
  MOD_RES (580)..(580): Selenocysteine
  MOD_RES (582)..(582): Selenocysteine
  MOD_RES (594)..(594): Selenocysteine
  MOD_RES (622)..(622): Selenocysteine
  MOD_RES (641)..(641): Selenocysteine
  MOD_RES (644)..(644): Selenocysteine
MAXSNNPRKFSEKIALHNQKQAEEXAAFEEVMKDLSLXRAARLQLQKSQYLQLGPSRGQYYGGSLPNVNQIGSGXMDLPFQPSGFLGEALAAAPVSLXPFQSSGLDXSRXXRHHGLVDRVYRERGRLGSPHRRPLSVDKHGRQADSCPYGXMYLSPPADXSWRRXNSDSALHQSXMXPXQPESFSSGSQDVHQKRVLLLXVPGMEEXXSEADKNLSKQAWDXKKXGSRPKSCEVPGINIFPSADQENXXALIPAXHNXGGSLPDLXNIHFPSPLPXPLDPEEPXFPALSSSSSXGNLAANLXHLGIGGAGQGMSXPGSSPQHRPAGVSPLSLSXEARRQQASPXLSPLSPIXQAVAMDALSLEQQLPYAFFXQAGSQQPPPQPQPPPPPPPASQQPPPPPPPQAPVRLPPGGPLLPSASLXRGPQPPPLAVXVPSSLPQSPPENPGQPSMGIDIASAPALQQYRXSAGSPANQSPXSPVSNQGFSPGSSPQHXSXLGSVFGDAYYEQQMAARQANALSHQLEQFNMMENAISSSSLYSPGSXLNYSQAAMMGLXGSHGSLPDSQQLGYASHSGIPNIILXVXGESPPSLSKELXSSLAGVGDVSFDSDSQFPLDELKIDPLXLDGLHMLNDPDMVLADPAXEDXFRMDRL

SEQ ID NO: 6973 - protein, 634 aa, Homo sapiens
  MOD_RES (3)..(3): Selenocysteine
  MOD_RES (25)..(25): Selenocysteine
  MOD_RES (38)..(38): Selenocysteine
  MOD_RES (75)..(75): Selenocysteine
  MOD_RES (82)..(82): Selenocysteine
  MOD_RES (91)..(91): Selenocysteine
  MOD_RES (94)..(95): Selenocysteine
  MOD_RES (135)..(135): Selenocysteine
  MOD_RES (144)..(144): Selenocysteine
  MOD_RES (149)..(149): Selenocysteine
  MOD_RES (159)..(159): Selenocysteine
  MOD_RES (161)..(161): Selenocysteine
  MOD_RES (163)..(163): Selenocysteine
  MOD_RES (184)..(184): Selenocysteine
  MOD_RES (191)..(192): Selenocysteine
  MOD_RES (206)..(206): Selenocysteine
  MOD_RES (209)..(209): Selenocysteine
  MOD_RES (232)..(233): Selenocysteine
  MOD_RES (239)..(239): Selenocysteine
  MOD_RES (242)..(242): Selenocysteine
  MOD_RES (250)..(250): Selenocysteine
  MOD_RES (260)..(260): Selenocysteine
  MOD_RES (268)..(268): Selenocysteine
  MOD_RES (278)..(278): Selenocysteine
  MOD_RES (286)..(286): Selenocysteine
  MOD_RES (299)..(299): Selenocysteine
  MOD_RES (318)..(318): Selenocysteine
  MOD_RES (328)..(328): Selenocysteine
  MOD_RES (336)..(336): Selenocysteine
  MOD_RES (356)..(356): Selenocysteine
  MOD_RES (405)..(405): Selenocysteine
  MOD_RES (416)..(416): Selenocysteine
  MOD_RES (449)..(449): Selenocysteine
  MOD_RES (460)..(460): Selenocysteine
  MOD_RES (477)..(477): Selenocysteine
  MOD_RES (479)..(479): Selenocysteine
  MOD_RES (526)..(526): Selenocysteine
  MOD_RES (538)..(538): Selenocysteine
  MOD_RES (564)..(564): Selenocysteine
  MOD_RES (566)..(566): Selenocysteine
  MOD_RES (578)..(578): Selenocysteine
  MOD_RES (606)..(606): Selenocysteine
  MOD_RES (625)..(625): Selenocysteine
  MOD_RES (628)..(628): Selenocysteine
MAXSNNPRKFSEKIALHNQKQAEEXAAFEEVMKDLSLXRAARLQLQKSQYLQLGPSRGQYYGGSLPNVNQIGSGXMDLPFQXPFQSSGLDXSRXXRHHGLVDRVYRERGRLGSPHRRPLSVDKHGRQADSCPYGXMYLSPPADXSWRRXNSDSALHQSXMXPXQPESFSSGSQDVHQKRVLLLXVPGMEEXXSEADKNLSKQAWDXKKXGSRPKSCEVPGINIFPSADQENXXALIPAXHNXGGSLPDLXNIHFPSPLPXPLDPEEPXFPALSSSSSXGNLAANLXHLGIGGAGQGMSXPGSSPQHRPAGVSPLSLSXEARRQQASPXLSPLSPIXQAVAMDALSLEQQLPYAFFXQAGSQQPPPQPQPPPPPPPASQQPPPPPPPQAPVRLPPGGPLLPSASLXRGPQPPPLAVXVPSSLPQSPPENPGQPSMGIDIASAPALQQYRXSAGSPANQSPXSPVSNQGFSPGSSPQHXSXLGSVFGDAYYEQQMAARQANALSHQLEQFNMMENAISSSSLYSPGSXLNYSQAAMMGLXGSHGSLPDSQQLGYASHSGIPNIILXVXGESPPSLSKELXSSLAGVGDVSFDSDSQFPLDELKIDPLXLDGLHMLNDPDMVLADPAXEDXFRMDRL

SEQ ID NO: 6974 - protein, 392 aa, Homo sapiens
  MOD_RES (7)..(7): Selenocysteine
  MOD_RES (16)..(16): Selenocysteine
  MOD_RES (19)..(20): Selenocysteine
  MOD_RES (60)..(60): Selenocysteine
  MOD_RES (69)..(69): Selenocysteine
  MOD_RES (74)..(74): Selenocysteine
  MOD_RES (84)..(84): Selenocysteine
  MOD_RES (86)..(86): Selenocysteine
  MOD_RES (88)..(88): Selenocysteine
  MOD_RES (109)..(109): Selenocysteine
  MOD_RES (116)..(117): Selenocysteine
  MOD_RES (131)..(131): Selenocysteine
  MOD_RES (134)..(134): Selenocysteine
  MOD_RES (157)..(158): Selenocysteine
  MOD_RES (164)..(164): Selenocysteine
  MOD_RES (167)..(167): Selenocysteine
  MOD_RES (175)..(175): Selenocysteine
  MOD_RES (185)..(185): Selenocysteine
  MOD_RES (193)..(193): Selenocysteine
  MOD_RES (203)..(203): Selenocysteine
  MOD_RES (211)..(211): Selenocysteine
  MOD_RES (224)..(224): Selenocysteine
  MOD_RES (243)..(243): Selenocysteine
  MOD_RES (253)..(253): Selenocysteine
  MOD_RES (261)..(261): Selenocysteine
  MOD_RES (284)..(284): Selenocysteine
  MOD_RES (296)..(296): Selenocysteine
  MOD_RES (322)..(322): Selenocysteine
  MOD_RES (324)..(324): Selenocysteine
  MOD_RES (336)..(336): Selenocysteine
  MOD_RES (364)..(364): Selenocysteine
  MOD_RES (383)..(383): Selenocysteine
  MOD_RES (386)..(386): Selenocysteine
MDLPFQXPFQSSGLDXSRXXRHHGLVDRVYRERGRLGSPHRRPLSVDKHGRQADSCPYGXMYLSPPADXSWRRXNSDSALHQSXMXPXQPESFSSGSQDVHQKRVLLLXVPGMEEXXSEADKNLSKQAWDXKKXGSRPKSCEVPGINIFPSADQENXXALIPAXHNXGGSLPDLXNIHFPSPLPXPLDPEEPXFPALSSSSSXGNLAANLXHLGIGGAGQGMSXPGSSPQHRPAGVSPLSLSXEARRQQASPXLSPLSPIXQLEQFNMMENAISSSSLYSPGSXLNYSQAAMMGLXGSHGSLPDSQQLGYASHSGIPNIILXVXGESPPSLSKELXSSLAGVGDVSFDSDSQFPLDELKIDPLXLDGLHMLNDPDMVLADPAXEDXFRMDRL

SEQ ID NO: 6975 - protein, 593 aa, Homo sapiens
  MOD_RES (34)..(34): Selenocysteine
  MOD_RES (41)..(41): Selenocysteine
  MOD_RES (50)..(50): Selenocysteine
  MOD_RES (53)..(54): Selenocysteine
  MOD_RES (94)..(94): Selenocysteine
  MOD_RES (103)..(103): Selenocysteine
  MOD_RES (108)..(108): Selenocysteine
  MOD_RES (118)..(118): Selenocysteine
  MOD_RES (120)..(120): Selenocysteine
  MOD_RES (122)..(122): Selenocysteine
  MOD_RES (143)..(143): Selenocysteine
  MOD_RES (150)..(151): Selenocysteine
  MOD_RES (165)..(165): Selenocysteine
  MOD_RES (168)..(168): Selenocysteine
  MOD_RES (191)..(192): Selenocysteine
  MOD_RES (198)..(198): Selenocysteine
  MOD_RES (201)..(201): Selenocysteine
  MOD_RES (209)..(209): Selenocysteine
  MOD_RES (219)..(219): Selenocysteine
  MOD_RES (227)..(227): Selenocysteine
  MOD_RES (237)..(237): Selenocysteine
  MOD_RES (245)..(245): Selenocysteine
  MOD_RES (258)..(258): Selenocysteine
  MOD_RES (277)..(277): Selenocysteine
  MOD_RES (287)..(287): Selenocysteine
  MOD_RES (295)..(295): Selenocysteine
  MOD_RES (315)..(315): Selenocysteine
  MOD_RES (364)..(364): Selenocysteine
  MOD_RES (375)..(375): Selenocysteine
  MOD_RES (408)..(408): Selenocysteine
  MOD_RES (419)..(419): Selenocysteine
  MOD_RES (436)..(436): Selenocysteine
  MOD_RES (438)..(438): Selenocysteine
  MOD_RES (485)..(485): Selenocysteine
  MOD_RES (497)..(497): Selenocysteine
  MOD_RES (523)..(523): Selenocysteine
  MOD_RES (525)..(525): Selenocysteine
  MOD_RES (537)..(537): Selenocysteine
  MOD_RES (565)..(565): Selenocysteine
  MOD_RES (584)..(584): Selenocysteine
  MOD_RES (587)..(587): Selenocysteine
MLQLQKSQYLQLGPSRGQYYGGSLPNVNQIGSGXMDLPFQXPFQSSGLDXSRXXRHHGLVDRVYRERGRLGSPHRRPLSVDKHGRQADSCPYGXMYLSPPADXSWRRXNSDSALHQSXMXPXQPESFSSGSQDVHQKRVLLLXVPGMEEXXSEADKNLSKQAWDXKKXGSRPKSCEVPGINIFPSADQENXXALIPAXHNXGGSLPDLXNIHFPSPLPXPLDPEEPXFPALSSSSSXGNLAANLXHLGIGGAGQGMSXPGSSPQHRPAGVSPLSLSXEARRQQASPXLSPLSPIXQAVAMDALSLEQQLPYAFFXQAGSQQPPPQPQPPPPPPPASQQPPPPPPPQAPVRLPPGGPLLPSASLXRGPQPPPLAVXVPSSLPQSPPENPGQPSMGIDIASAPALQQYRXSAGSPANQSPXSPVSNQGFSPGSSPQHXSXLGSVFGDAYYEQQMAARQANALSHQLEQFNMMENAISSSSLYSPGSXLNYSQAAMMGLXGSHGSLPDSQQLGYASHSGIPNIILXVXGESPPSLSKELXSSLAGVGDVSFDSDSQFPLDELKIDPLXLDGLHMLNDPDMVLADPAXEDXFRMDRL

SEQ ID NO: 6976 - protein, 54 aa, Homo sapiens
  MOD_RES (3)..(3): Selenocysteine
  MOD_RES (13)..(13): Selenocysteine
  MOD_RES (37)..(37): Selenocysteine
  MOD_RES (50)..(50): Selenocysteine
MAXSGANGPGSAXASASNPRKFSEKIALQKQRQAEEXAAFEEVMMDIGSXRDKL

SEQ ID NO: 6977 - protein, 693 aa, Homo sapiens
  MOD_RES (3)..(3): Selenocysteine
  MOD_RES (13)..(13): Selenocysteine
  MOD_RES (37)..(37): Selenocysteine
  MOD_RES (50)..(50): Selenocysteine
  MOD_RES (62)..(62): Selenocysteine
  MOD_RES (98)..(98): Selenocysteine
  MOD_RES (122)..(122): Selenocysteine
  MOD_RES (146)..(146): Selenocysteine
  MOD_RES (169)..(169): Selenocysteine
  MOD_RES (177)..(177): Selenocysteine
  MOD_RES (187)..(187): Selenocysteine
  MOD_RES (192)..(192): Selenocysteine
  MOD_RES (271)..(271): Selenocysteine
  MOD_RES (279)..(279): Selenocysteine
  MOD_RES (289)..(289): Selenocysteine
  MOD_RES (296)..(296): Selenocysteine
  MOD_RES (307)..(307): Selenocysteine
  MOD_RES (311)..(311): Selenocysteine
  MOD_RES (313)..(313): Selenocysteine
  MOD_RES (315)..(315): Selenocysteine
  MOD_RES (384)..(385): Selenocysteine
  MOD_RES (406)..(406): Selenocysteine
  MOD_RES (420)..(420): Selenocysteine
  MOD_RES (458)..(458): Selenocysteine
  MOD_RES (462)..(462): Selenocysteine
  MOD_RES (467)..(467): Selenocysteine
  MOD_RES (474)..(474): Selenocysteine
  MOD_RES (479)..(479): Selenocysteine
  MOD_RES (497)..(497): Selenocysteine
  MOD_RES (501)..(501): Selenocysteine
  MOD_RES (533)..(533): Selenocysteine
  MOD_RES (599)..(599): Selenocysteine
  MOD_RES (606)..(606): Selenocysteine
  MOD_RES (620)..(620): Selenocysteine
MAXSGANGPGSAXASASNPRKFSEKIALQKQRQAEEXAAFEEVMMDIGSXRLQAQKLRLAYXRSSHYGGSLPNVNQIGSGLAEFQSPLHSPLDSSRSXRHHGLVERVQRDPRRMVSPLRRYXRHIDSSPYSPAYLSPPPESSWRRXMAWGNFPAEKGQLFRLPSALNRXSSDSALHXSVMNPSPQDXYPGPXPPSILPSRRGGILDGEMDPKVPAIEENLLDDKHLLKPWDAKKLSSSSSRPRSCEVPGINIFPSPDQPANVPVLPPAMNXGGSLPDLXNLHFPPPLPXPLDPEEXAYPSLSGGNSXSNLXHXMXHLGISRGMGLGPGYDAPGLHSPLSHPSLQSSLSNPNLQASLSSPQPQLQGSHSHPSLPASSLARHVLPXXSLGHPSLSAPALSSSSSSSSXSSPVLGAPSYPASXPGASPHHRRVPLSPLSLLAGPADARRSQQQLPKQFSPXMSPXLSSIXQGVPLDXSKLSXDQRLPPYPYSSPSLVLPXQPHXPKSLQQPGLPSQSCSVQSSGGQPPGRQSHYGXPYPPGPSGHGQQSYHRPMSDFNLGNLEQFSMESPSASLVLDPPGFSEGPGFLGGEGPMGGPQDPHXFNHQNLXHCSRHGSGPNIILXGDSSPGFSKEIAAALAGVPGFEVSAAGLELGLGLEDELRMEPLGLEGLNMLSDPCALLPDPAVEESFRSDRLQ

SEQ ID NO: 6978 - protein, 373 aa, Homo sapiens
  MOD_RES (3)..(3): Selenocysteine
  MOD_RES (13)..(13): Selenocysteine
  MOD_RES (64)..(65): Selenocysteine
  MOD_RES (86)..(86): Selenocysteine
  MOD_RES (100)..(100): Selenocysteine
  MOD_RES (138)..(138): Selenocysteine
  MOD_RES (142)..(142): Selenocysteine
  MOD_RES (147)..(147): Selenocysteine
  MOD_RES (154)..(154): Selenocysteine
  MOD_RES (159)..(159): Selenocysteine
  MOD_RES (177)..(177): Selenocysteine
  MOD_RES (181)..(181): Selenocysteine
  MOD_RES (213)..(213): Selenocysteine
  MOD_RES (279)..(279): Selenocysteine
  MOD_RES (286)..(286): Selenocysteine
  MOD_RES (300)..(300): Selenocysteine
MAXSGANGPGSAXASASNPRKFSEKIALQKQRQASLSSPQPQLQGSHSHPSLPASSLARHVLPXXSLGHPSLSAPALSSSSSSSSXSSPVLGAPSYPASXPGASPHHRRVPLSPLSLLAGPADARRSQQQLPKQFSPXMSPXLSSIXQGVPLDXSKLSXDQRLPPYPYSSPSLVLPXQPHXPKSLQQPGLPSQSCSVQSSGGQPPGRQSHYGXPYPPGPSGHGQQSYHRPMSDFNLGNLEQFSMESPSASLVLDPPGFSEGPGFLGGEGPMGGPQDPHXFNHQNLXHCSRHGSGPNIILXGDSSPGFSKEIAAALAGVPGFEVSAAGLELGLGLEDELRMEPLGLEGLNMLSDPCALLPDPAVEESFRSDRLQ

SEQ ID NO: 6979 - protein, 481 aa, Homo sapiens
  MOD_RES (13)..(13): Selenocysteine
  MOD_RES (37)..(37): Selenocysteine
  MOD_RES (61)..(61): Selenocysteine
  MOD_RES (84)..(84): Selenocysteine
  MOD_RES (92)..(92): Selenocysteine
  MOD_RES (102)..(102): Selenocysteine
  MOD_RES (107)..(107): Selenocysteine
  MOD_RES (191)..(191): Selenocysteine
  MOD_RES (199)..(199): Selenocysteine
  MOD_RES (209)..(209): Selenocysteine
  MOD_RES (216)..(216): Selenocysteine
  MOD_RES (227)..(227): Selenocysteine
  MOD_RES (231)..(231): Selenocysteine
  MOD_RES (233)..(233): Selenocysteine
  MOD_RES (235)..(235): Selenocysteine
  MOD_RES (304)..(305): Selenocysteine
  MOD_RES (326)..(326): Selenocysteine
  MOD_RES (340)..(340): Selenocysteine
  MOD_RES (378)..(378): Selenocysteine
  MOD_RES (382)..(382): Selenocysteine
  MOD_RES (387)..(387): Selenocysteine
  MOD_RES (394)..(394): Selenocysteine
  MOD_RES (399)..(399): Selenocysteine
  MOD_RES (417)..(417): Selenocysteine
  MOD_RES (421)..(421): Selenocysteine
  MOD_RES (453)..(453): Selenocysteine
SPLHSPLDSSRSXRHHGLVERVQRDPRRMVSPLRRYXRHIDSSPYSPAYLSPPPESSWRRXMAWGNFPAEKGQLFRLPSALNRXSSDSALHXSVMNPSPQDXYPGPXPPSILPSRRGGILDGEMDPKVFLFQVPAIEENLLDDKHLLKPWDAKKLSSSSSRPRSCEVPGINIFPSPDQPANVPVLPPAMNXGGSLPDLXNLHFPPPLPXPLDPEEXAYPSLSGGNSXSNLXHXMXHLGISRGMGLGPGYDAPGLHSPLSHPSLQSSLSNPNLQASLSSPQPQLQGSHSHPSLPASSLARHVLPXXSLGHPSLSAPALSSSSSSSSXSSPVLGAPSYPASXPGASPHHRRVPLSPLSLLAGPADARRSQQQLPKQFSPXMSPXLSSIXQGVPLDXSKLSXDQRLPPYPYSSPSLVLPXQPHXPKSLQQPGLPSQSCSVQSSGGQPPGRQSHYGXPYPPGPSGHGQQSYHRPMSDFNLGNLAL

SEQ ID NO: 6980 - protein, 618 aa, Homo sapiens
  MOD_RES (23)..(23): Selenocysteine
  MOD_RES (30)..(30): Selenocysteine
  MOD_RES (38)..(38): Selenocysteine
  MOD_RES (41)..(41): Selenocysteine
  MOD_RES (56)..(56): Selenocysteine
  MOD_RES (89)..(89): Selenocysteine
  MOD_RES (154)..(154): Selenocysteine
  MOD_RES (160)..(160): Selenocysteine
  MOD_RES (168)..(168): Selenocysteine
  MOD_RES (173)..(173): Selenocysteine
  MOD_RES (231)..(231): Selenocysteine
  MOD_RES (267)..(267): Selenocysteine
  MOD_RES (270)..(270): Selenocysteine
  MOD_RES (278)..(278): Selenocysteine
  MOD_RES (284)..(284): Selenocysteine
  MOD_RES (292)..(293): Selenocysteine
  MOD_RES (314)..(314): Selenocysteine
  MOD_RES (336)..(336): Selenocysteine
  MOD_RES (340)..(340): Selenocysteine
  MOD_RES (352)..(352): Selenocysteine
  MOD_RES (376)..(377): Selenocysteine
  MOD_RES (394)..(394): Selenocysteine
  MOD_RES (412)..(412): Selenocysteine
  MOD_RES (420)..(420): Selenocysteine
  MOD_RES (436)..(436): Selenocysteine
  MOD_RES (455)..(455): Selenocysteine
  MOD_RES (494)..(494): Selenocysteine
  MOD_RES (547)..(547): Selenocysteine
  MOD_RES (554)..(554): Selenocysteine
  MOD_RES (576)..(576): Selenocysteine
  MOD_RES (612)..(612): Selenocysteine
MAASPGSGSANPRKFSEKIALHXQRQAEEXRAFEQLMXDLXLSRVQFQKLQQLRLXQYHGGSLPNVSQLRSSASEFQPSFHQADNVRGXRHHGLVERPSRNRFHPLHRRSGDKPGRQFDGSAFGANYSSQPLDESWPRQQPPWKDEKHPGFRLXSALNRXNSDSALHXSALSXKPQDPYGGGGQSAWPAPYMGFCDGENNGHGEVASFPGPLKEENLLNVPKPLPKQLWEXKEIQSLSGRPRSCDVGGGNAFPHNGQNLGLSPFLGXLNXGGSLPDLXNLHYSXPLPASLDXXDHHFGSMSVGNSVNNIPAAMXHLGIRSSSGLQSSRSNPSIQAXLNKXVLSSSLNNHPQXSVPNASALHPSLRLFSLSNPSLSXXNLSGPSRRRQPPVSPLXLSPGPEAHQGFSRQLSSXSPLAPYPXSQMVSSDRSQLSFLPXEAQAQVSPPPPYPAPQELXQPLLQQPRAPEAPAQQPQAASSLPQSDFQLLPAQGSSLXNFFPDVGFDQQSMRPGPAFPQQVPLVQQGSRELQDSFHLRPSPYSNCGSLPNXILPDSSXSLFKDLNSALAGLPEVSLNVDXPFPLEEELQIEPLSLDGLNMLSDSSMGLLDPSVEEXFRADRL

SEQ ID NO: 6981 - protein, 619 aa, Homo sapiens
  MOD_RES (23)..(23): Selenocysteine
  MOD_RES (30)..(30): Selenocysteine
  MOD_RES (38)..(38): Selenocysteine
  MOD_RES (41)..(41): Selenocysteine
  MOD_RES (56)..(56): Selenocysteine
  MOD_RES (89)..(89): Selenocysteine
  MOD_RES (154)..(154): Selenocysteine
  MOD_RES (160)..(160): Selenocysteine
  MOD_RES (168)..(168): Selenocysteine
  MOD_RES (173)..(173): Selenocysteine
  MOD_RES (231)..(231): Selenocysteine
  MOD_RES (267)..(267): Selenocysteine
  MOD_RES (270)..(270): Selenocysteine
  MOD_RES (278)..(278): Selenocysteine
  MOD_RES (284)..(284): Selenocysteine
  MOD_RES (292)..(293): Selenocysteine
  MOD_RES (314)..(314): Selenocysteine
  MOD_RES (336)..(336): Selenocysteine
  MOD_RES (340)..(340): Selenocysteine
  MOD_RES (352)..(352): Selenocysteine
  MOD_RES (376)..(377): Selenocysteine
  MOD_RES (394)..(394): Selenocysteine
  MOD_RES (412)..(412): Selenocysteine
  MOD_RES (420)..(420): Selenocysteine
  MOD_RES (436)..(436): Selenocysteine
  MOD_RES (455)..(455): Selenocysteine
  MOD_RES (494)..(494): Selenocysteine
  MOD_RES (547)..(547): Selenocysteine
  MOD_RES (555)..(555): Selenocysteine
  MOD_RES (577)..(577): Selenocysteine
  MOD_RES (613)..(613): Selenocysteine
MAASPGSGSANPRKFSEKIALHXQRQAEEXRAFEQLMXDLXLSRVQFQKLQQLRLXQYHGGSLPNVSQLRSSASEFQPSFHQADNVRGXRHHGLVERPSRNRFHPLHRRSGDKPGRQFDGSAFGANYSSQPLDESWPRQQPPWKDEKHPGFRLXSALNRXNSDSALHXSALSXKPQDPYGGGGQSAWPAPYMGFCDGENNGHGEVASFPGPLKEENLLNVPKPLPKQLWEXKEIQSLSGRPRSCDVGGGNAFPHNGQNLGLSPFLGXLNXGGSLPDLXNLHYSXPLPASLDXXDHHFGSMSVGNSVNNIPAAMXHLGIRSSSGLQSSRSNPSIQAXLNKXVLSSSLNNHPQXSVPNASALHPSLRLFSLSNPSLSXXNLSGPSRRRQPPVSPLXLSPGPEAHQGFSRQLSSXSPLAPYPXSQMVSSDRSQLSFLPXEAQAQVSPPPPYPAPQELXQPLLQQPRAPEAPAQQPQAASSLPQSDFQLLPAQGSSLXNFFPDVGFDQQSMRPGPAFPQQVPLVQQGSRELQDSFHLRPSPYSNCGSLPNXILPEDSSXSLFKDLNSALAGLPEVSLNVDXPFPLEEELQIEPLSLDGLNMLSDSSMGLLDPSVEEXFRADRL

SEQ ID NO: 6982 - protein, 91 aa, Homo sapiens
  MOD_RES (23)..(23): Selenocysteine
  MOD_RES (30)..(30): Selenocysteine
  MOD_RES (38)..(38): Selenocysteine
  MOD_RES (41)..(41): Selenocysteine
  MOD_RES (56)..(56): Selenocysteine
MAASPGSGSANPRKFSEKIALHXQRQAEEXRAFEQLMXDLXLSRVQFQKLQQLRLXQYHGGSLPNVSQLRSSASEFQVERNSSPCVDGLRQ

SEQ ID NO: 6983 - protein, 190 aa, Homo sapiens
  MOD_RES (1)..(1): Any amino acid
  MOD_RES (52)..(52): Selenocysteine
  MOD_RES (58)..(58): Selenocysteine
  MOD_RES (66)..(66): Selenocysteine
  MOD_RES (71)..(71): Selenocysteine
  MOD_RES (117)..(117): Selenocysteine
  MOD_RES (153)..(153): Selenocysteine
  MOD_RES (156)..(156): Selenocysteine
  MOD_RES (164)..(164): Selenocysteine
  MOD_RES (170)..(170): Selenocysteine
  MOD_RES (178)..(179): Selenocysteine
XHPLHRRSGDKPGRQFDGSAFGANYSSQPLDESWPRQQPPWKDEKHPGFRLXSALNRXNSDSALHXSALSXKPQDPYGGGGQSAWPAPYMVASFPGPLKEENLLNVPKPLPKQLWEXKEIQSLSGRPRSCDVGGGNAFPHNGQNLGLSPFLGXLNXGGSLPDLXNLHYSXPLPASLDXXDHHFGSMSVGN

SEQ ID NO: 6984 - protein, 57 aa, Homo sapiens
  MOD_RES (44)..(45): Selenocysteine
  MOD_RES (47)..(47): Selenocysteine
MMAYMNPGPHYSVNALALSGPSVDLMHQAVPYPSAPRKQRRERXXFXRSQLEELEAL

SEQ ID NO: 6985 - protein, 299 aa, Homo sapiens
  MOD_RES (44)..(45): Selenocysteine
  MOD_RES (47)..(47): Selenocysteine
  MOD_RES (61)..(61): Selenocysteine
  MOD_RES (123)..(123): Selenocysteine
  MOD_RES (129)..(129): Selenocysteine
  MOD_RES (154)..(155): Selenocysteine
  MOD_RES (159)..(159): Selenocysteine
  MOD_RES (187)..(187): Selenocysteine
  MOD_RES (194)..(194): Selenocysteine
  MOD_RES (251)..(251): Selenocysteine
  MOD_RES (273)..(273): Selenocysteine
  MOD_RES (275)..(275): Selenocysteine
  MOD_RES (279)..(279): Selenocysteine
MMAYMNPGPHYSVNALALSGPSVDLMHQAVPYPSAPRKQRRERXXFXRSQLEELEALFAKXQYPDVYAREEVALKINLPESRVQVWFKNRRAKCRQQRQQQKQQQQPPGGQAKARPAKRKAGXSPRPSXDVCPDPLGISDSYSPPLPGPSGSPXXAVAXVSIWSPASESPLPEAQRAGLVASGPSLXSAPYAMXYAPASAFCSSPSAYGSPSSYFSGLDPYLSPMVPQLGGPALSPLSGPSVGPSLAQSPXSLSGQSYGAYSPVDSLEFKDPXGXWKFXYNPMDPLDYKDQSAWKFQIL

SEQ ID NO: 6986 - protein, 41 aa, Homo sapiens
MMAYMNPGPHYSVNALALSGPSVDLMHQAVPYPSLVQEPEG

SEQ ID NO: 6987 - protein, 106 aa, Homo sapiens
  MOD_RES (67)..(67): Selenocysteine
  MOD_RES (79)..(79): Selenocysteine
  MOD_RES (93)..(93): Selenocysteine
  MOD_RES (105)..(105): Selenocysteine
IERMKQIYQQLSRYRGLGLLASVPSNPNGNGGFMGYSAENIPGCSSSGSCSQGSGILHYAHGDSQQXHLLKQGRSSMGXGLSGGKRPSQEEDXQSIGPKVQRQSXN

SEQ ID NO: 6988 - protein, 586 aa, Homo sapiens
  MOD_RES (30)..(30): Selenocysteine
  MOD_RES (94)..(94): Selenocysteine
  MOD_RES (118)..(118): Selenocysteine
  MOD_RES (131)..(131): Selenocysteine
  MOD_RES (149)..(149): Selenocysteine
  MOD_RES (155)..(155): Selenocysteine
  MOD_RES (169)..(169): Selenocysteine
  MOD_RES (171)..(171): Selenocysteine
  MOD_RES (179)..(180): Selenocysteine
  MOD_RES (202)..(202): Selenocysteine
  MOD_RES (215)..(215): Selenocysteine
  MOD_RES (219)..(219): Selenocysteine
  MOD_RES (249)..(249): Selenocysteine
  MOD_RES (270)..(270): Selenocysteine
  MOD_RES (298)..(298): Selenocysteine
  MOD_RES (301)..(301): Selenocysteine
  MOD_RES (335)..(335): Selenocysteine
  MOD_RES (345)..(345): Selenocysteine
  MOD_RES (366)..(366): Selenocysteine
  MOD_RES (422)..(422): Selenocysteine
  MOD_RES (547)..(547): Selenocysteine
  MOD_RES (559)..(559): Selenocysteine
  MOD_RES (573)..(573): Selenocysteine
  MOD_RES (585)..(585): Selenocysteine
MGVNAVHWFRKGLRLHDNPALKECIQGADXIRCVYILDPWFAGSSNVGINRWRFLLQCLEDLDANLRKLNSRLFVIRGQPADVFPRLFKEWNIXKLSIEYDSEPFGKERDAAIKKLAXEAGVEVIVRISHXLYDLDKIIELNGGQPPLXYKRFQXLISKMEPLEIPVEXIXSEVIEKCXXPLSDDHDEKYGVPSLEELGFDXDGLSSAVWPGGEXEALXRLERHLERKAWVANFERPRMNANSLLASPXGLSPYLRFGCLSCRLFYFKLXDLYKKVKKNSSPPLSLYGQLLWREFFYXAAXNNPRFDKMEGNPICVQIPWDKNPEALAKWAEGRXGFPWIDAIMXQLRQEGWIHHLARHAVACFLXRGDLWISWEEGMKVFEELLLDADWSINAGSWMWLSCSSFFQQFFHCYCPVGFGRRXDPNGDYIRRYLPVLRGFPAKYIYDPWNAPEGIQKVAKCLIGVNYPKPMVNHAEASRLNIERMKQIYQQLSRYRGLGLLASVPSNPNGNGGFMGYSAENIPGCSSSGSCSQGSGILHYAHGDSQQXHLLKQGRSSMGXGLSGGKRPSQEEDXQSIGPKVQRQSXN

SEQ ID NO: 6989 - protein, 593 aa, Homo sapiens
  MOD_RES (4)..(4): Selenocysteine
  MOD_RES (7)..(7): Selenocysteine
  MOD_RES (19)..(19): Selenocysteine
  MOD_RES (83)..(83): Selenocysteine
  MOD_RES (113)..(113): Selenocysteine
  MOD_RES (116)..(116): Selenocysteine
  MOD_RES (145)..(145): Selenocysteine
  MOD_RES (150)..(150): Selenocysteine
  MOD_RES (168)..(168): Selenocysteine
  MOD_RES (190)..(190): Selenocysteine
  MOD_RES (208)..(208): Selenocysteine
  MOD_RES (221)..(221): Selenocysteine
  MOD_RES (234)..(234): Selenocysteine
  MOD_RES (268)..(268): Selenocysteine
  MOD_RES (300)..(300): Selenocysteine
  MOD_RES (317)..(317): Selenocysteine
  MOD_RES (320)..(320): Selenocysteine
  MOD_RES (354)..(354): Selenocysteine
  MOD_RES (364)..(364): Selenocysteine
  MOD_RES (385)..(385): Selenocysteine
  MOD_RES (441)..(441): Selenocysteine
  MOD_RES (495)..(495): Selenocysteine
  MOD_RES (585)..(585): Selenocysteine
MAAXVAXAAAVAPAPAPGXDSASSVHWFRKGLRLHDNPALLAAVRGARCVRCVYILDPWFAASSSVGINRWRFLLQSLEDLDXSLRKLNSRLFVVRGQPADVFPRLFKEWGVXRLXFEYDSEPFGKERDAAIMKMAKEAGVEVVXENSHXLYDLDRIIELNGQKPPLXYKRFQAIISRMELPKKPVGLVXSQQMESCRAEIQENHDEXYGVPSLEELGFPXEGLGPAVWQGGEXEALARLDKHLERKAWVANYERPRMNANSLLASPXGLSPYLRFGCLSCRLFYYRLWDLYKKVKRNSXPPLSLFGQLLWREFFYXAAXNNPRFDRMEGNPICIQIPWDRNPEALAKWAEGKXGFPWIDAIMXQLRQEGWIHHLARHAVACFLXRGDLWVSWESGVRVFDELLLDADFSVNAGSWMWLSCSAFFQQFFHCYCPVGFGRRXDPSGDYIRRYLPKLKAFPSRYIYEPWNAPESIQKAAKCIIGVDYPRPIVNHAEXSRLNIERMKQIYQQLSRYRGLCLLASVPSCVEDLSHPVAEPSSSQAGSMSSAGPRPLPSGPASPKRKLEAAEEPPGEELSKRARVAELPXPELPSKDA

SEQ ID NO: 6990 - protein, 614 aa, Homo sapiens
  MOD_RES (20)..(20): Selenocysteine
  MOD_RES (25)..(25): Selenocysteine
  MOD_RES (28)..(28): Selenocysteine
  MOD_RES (40)..(40): Selenocysteine
  MOD_RES (104)..(104): Selenocysteine
  MOD_RES (134)..(134): Selenocysteine
  MOD_RES (137)..(137): Selenocysteine
  MOD_RES (166)..(166): Selenocysteine
  MOD_RES (171)..(171): Selenocysteine
  MOD_RES (189)..(189): Selenocysteine
  MOD_RES (211)..(211): Selenocysteine
  MOD_RES (229)..(229): Selenocysteine
  MOD_RES (242)..(242): Selenocysteine
  MOD_RES (255)..(255): Selenocysteine
  MOD_RES (289)..(289): Selenocysteine
  MOD_RES (321)..(321): Selenocysteine
  MOD_RES (338)..(338): Selenocysteine
  MOD_RES (341)..(341): Selenocysteine
  MOD_RES (375)..(375): Selenocysteine
  MOD_RES (385)..(385): Selenocysteine
  MOD_RES (406)..(406): Selenocysteine
  MOD_RES (462)..(462): Selenocysteine
  MOD_RES (516)..(516): Selenocysteine
  MOD_RES (606)..(606): Selenocysteine
MGGVHVAYRGGAGVAGAVWXVMAAXVAXAAAVAPAPAPGXDSASSVHWFRKGLRLHDNPALLAAVRGARCVRCVYILDPWFAASSSVGINRWRFLLQSLEDLDXSLRKLNSRLFVVRGQPADVFPRLFKEWGVXRLXFEYDSEPFGKERDAAIMKMAKEAGVEVVXENSHXLYDLDRIIELNGQKPPLXYKRFQAIISRMELPKKPVGLVXSQQMESCRAEIQENHDEXYGVPSLEELGFPXEGLGPAVWQGGEXEALARLDKHLERKAWVANYERPRMNANSLLASPXGLSPYLRFGCLSCRLFYYRLWDLYKKVKRNSXPPLSLFGQLLWREFFYXAAXNNPRFDRMEGNPICIQIPWDRNPEALAKWAEGKXGFPWIDAIMXQLRQEGWIHHLARHAVACFLXRGDLWVSWESGVRVFDELLLDADFSVNAGSWMWLSCSAFFQQFFHCYCPVGFGRRXDPSGDYIRRYLPKLKAFPSRYIYEPWNAPESIQKAAKCIIGVDYPRPIVNHAEXSRLNIERMKQIYQQLSRYRGLCLLASVPSCVEDLSHPVAEPSSSQAGSMSSAGPRPLPSGPASPKRKLEAAEEPPGEELSKRARVAELPXPELPSKDA

SEQ ID NO: 6991 - protein, 532 aa, Homo sapiens
  MOD_RES (8)..(8): Selenocysteine
  MOD_RES (10)..(10): Selenocysteine
  MOD_RES (22)..(22): Selenocysteine
  MOD_RES (52)..(52): Selenocysteine
  MOD_RES (55)..(55): Selenocysteine
  MOD_RES (84)..(84): Selenocysteine
  MOD_RES (89)..(89): Selenocysteine
  MOD_RES (107)..(107): Selenocysteine
  MOD_RES (129)..(129): Selenocysteine
  MOD_RES (147)..(147): Selenocysteine
  MOD_RES (160)..(160): Selenocysteine
  MOD_RES (173)..(173): Selenocysteine
  MOD_RES (207)..(207): Selenocysteine
  MOD_RES (239)..(239): Selenocysteine
  MOD_RES (256)..(256): Selenocysteine
  MOD_RES (259)..(259): Selenocysteine
  MOD_RES (293)..(293): Selenocysteine
  MOD_RES (303)..(303): Selenocysteine
  MOD_RES (324)..(324): Selenocysteine
  MOD_RES (380)..(380): Selenocysteine
  MOD_RES (434)..(434): Selenocysteine
  MOD_RES (524)..(524): Selenocysteine
MPAPPGRXHXWFLLQSLEDLDXSLRKLNSRLFVVRGQPADVFPRLFKEWGVXRLXFEYDSEPFGKERDAAIMKMAKEAGVEVVXENSHXLYDLDRIIELNGQKPPLXYKRFQAIISRMELPKKPVGLVXSQQMESCRAEIQENHDEXYGVPSLEELGFPXEGLGPAVWQGGEXEALARLDKHLERKAWVANYERPRMNANSLLASPXGLSPYLRFGCLSCRLFYYRLWDLYKKVKRNSXPPLSLFGQLLWREFFYXAAXNNPRFDRMEGNPICIQIPWDRNPEALAKWAEGKXGFPWIDAIMXQLRQEGWIHHLARHAVACFLXRGDLWVSWESGVRVFDELLLDADFSVNAGSWMWLSCSAFFQQFFHCYCPVGFGRRXDPSGDYIRRYLPKLKAFPSRYIYEPWNAPESIQKAAKCIIGVDYPRPIVNHAEXSRLNIERMKQIYQQLSRYRGLCLLASVPSCVEDLSHPVAEPSSSQAGSMSSAGPRPLPSGPASPKRKLEAAEEPPGEELSKRARVAELPXPELPSKDA

SEQ ID NO: 6992 - protein, 215 aa, Homo sapiens
  MOD_RES (3)..(3): Selenocysteine
  MOD_RES (12)..(12): Selenocysteine
  MOD_RES (15)..(16): Selenocysteine
  MOD_RES (21)..(21): Selenocysteine
  MOD_RES (24)..(24): Selenocysteine
  MOD_RES (34)..(34): Selenocysteine
  MOD_RES (49)..(49): Selenocysteine
  MOD_RES (79)..(79): Selenocysteine
  MOD_RES (127)..(127): Selenocysteine
  MOD_RES (204)..(204): Selenocysteine
MEXQAEQQELEXLPXXKMAQXNPXPGSLGPWKIXIYDQENFQGKRMEFXSSCPNVSERSFDNVRSLKVESGAWIGYEHXSFCGQQFILERGEYPRWDAWSGSNAYHIERLMSFRPICSANHKESKMXIFEKENFIGRQWEISDDYPSLQAMGWFNNEVGSMKIQSGAWVCYQYPGYRGYQYILECDHHGGDYKHWREWGSHAQXSQIQSIRRIQQ

SEQ ID NO: 6993 - protein, 75 aa, Homo sapiens
  MOD_RES (1)..(1): Any amino acid
  MOD_RES (9)..(9): Selenocysteine
  MOD_RES (12)..(13): Selenocysteine
  MOD_RES (18)..(18): Selenocysteine
  MOD_RES (21)..(21): Selenocysteine
  MOD_RES (31)..(31): Selenocysteine
  MOD_RES (46)..(46): Selenocysteine
XAEQQELEXLPXXKMAQXNPXPGSLGPWKIXIYDQENFQGKRMEFXSSCPNVSERSFDNVRSLKVESGAIIRSLR

SEQ ID NO: 6994 - protein, 151 aa, Homo sapiens
  MOD_RES (7)..(7): Selenocysteine
  MOD_RES (34)..(34): Selenocysteine
  MOD_RES (37)..(37): Selenocysteine
  MOD_RES (39)..(39): Selenocysteine
  MOD_RES (43)..(43): Selenocysteine
  MOD_RES (69)..(69): Selenocysteine
  MOD_RES (92)..(93): Selenocysteine
  MOD_RES (140)..(140): Selenocysteine
  MOD_RES (143)..(143): Selenocysteine
KSPVWPXFPFHREGSRVWERGGVPPRDLPSPLPXKRXRXYSAXARASAGPVFKGVCKQFSRSQGHGFIXPENGSEDIFVHVSEPRPNSSEVXXHRCGPRSRLMSCLWEENLPASLHRVLRRHHAVANSPGVGKDLKVVPXLHXEDGQRRDI

SEQ ID NO: 6995 - protein, 153 aa, Homo sapiens
  MOD_RES (2)..(2): Selenocysteine
  MOD_RES (6)..(6): Selenocysteine
  MOD_RES (24)..(24): Selenocysteine
  MOD_RES (51)..(51): Selenocysteine
  MOD_RES (54)..(54): Selenocysteine
  MOD_RES (56)..(56): Selenocysteine
  MOD_RES (60)..(60): Selenocysteine
  MOD_RES (86)..(86): Selenocysteine
  MOD_RES (114)..(114): Selenocysteine
  MOD_RES (135)..(135): Selenocysteine
  MOD_RES (141)..(141): Selenocysteine
  MOD_RES (145)..(145): Selenocysteine
MXSESXSPPVVPPLHSPKSPVWPXFPFHREGSRVWERGGVPPRDLPSPLPXKRXRXYSAXARASAGPVFKGVCKQFSRSQGHGFIXPENGSEDIFVHVSDIEGEYVPVEGDEVXYKMCPIPPKNQKFQAVEVVLXQLAPHXPHEXWSGQVVGS

SEQ ID NO: 6996 - protein, 813 aa, Homo sapiens
  MOD_RES (6)..(6): Selenocysteine
  MOD_RES (30)..(30): Selenocysteine
  MOD_RES (34)..(34): Selenocysteine
  MOD_RES (40)..(40): Selenocysteine
  MOD_RES (42)..(42): Selenocysteine
  MOD_RES (66)..(66): Selenocysteine
  MOD_RES (73)..(73): Selenocysteine
  MOD_RES (81)..(81): Selenocysteine
  MOD_RES (125)..(125): Selenocysteine
  MOD_RES (155)..(155): Selenocysteine
  MOD_RES (157)..(157): Selenocysteine
  MOD_RES (169)..(169): Selenocysteine
  MOD_RES (183)..(183): Selenocysteine
  MOD_RES (237)..(237): Selenocysteine
  MOD_RES (247)..(247): Selenocysteine
  MOD_RES (258)..(258): Selenocysteine
  MOD_RES (267)..(267): Selenocysteine
  MOD_RES (281)..(281): Selenocysteine
  MOD_RES (283)..(283): Selenocysteine
  MOD_RES (319)..(319): Selenocysteine
  MOD_RES (324)..(324): Selenocysteine
  MOD_RES (337)..(337): Selenocysteine
  MOD_RES (347)..(347): Selenocysteine
  MOD_RES (355)..(355): Selenocysteine
  MOD_RES (359)..(359): Selenocysteine
  MOD_RES (409)..(409): Selenocysteine
  MOD_RES (432)..(432): Selenocysteine
  MOD_RES (446)..(446): Selenocysteine
  MOD_RES (452)..(452): Selenocysteine
  MOD_RES (458)..(459): Selenocysteine
  MOD_RES (484)..(484): Selenocysteine
  MOD_RES (496)..(496): Selenocysteine
  MOD_RES (520)..(520): Selenocysteine
  MOD_RES (540)..(540): Selenocysteine
  MOD_RES (550)..(550): Selenocysteine
  MOD_RES (597)..(597): Selenocysteine
  MOD_RES (604)..(604): Selenocysteine
  MOD_RES (610)..(610): Selenocysteine
  MOD_RES (626)..(626): Selenocysteine
  MOD_RES (628)..(628): Selenocysteine
  MOD_RES (680)..(680): Selenocysteine
  MOD_RES (686)..(686): Selenocysteine
  MOD_RES (692)..(692): Selenocysteine
  MOD_RES (742)..(742): Selenocysteine
  MOD_RES (776)..(776): Selenocysteine
MENVFXVSSDPHPSPAAPPSLSLPLSSSSXSSGXKKQKRXPXYQRSMSFDPNLLHNNGHNGYPNGXSAALREXGVIEKLLXSYGFIQCSERQARLFFHCSQYNGNLQDLKVGDDVEFEVSSDRRXGKPIAVKLVKIKQEILPEERMNGQEVFYLXYXPEDVEGNVQLEXGDKINFVIDNNKHXGAVSARNIMLLKKKQARCQGVVCAMKEAFGFIERGDVVKEIFFHYSEFKGDLEXLQPGDDVEFXIKDRNGKEVAXDVRLLPQGXVIFEDISIEHFEGXVXKVIPKVPSKNQNDPLPGRIKVDFVIPKELPFGDKDXKSKVXLLEGDHVRFNISXDRRDKLERAXNIEVLSNXFQFXNEAREMGVIAAMRDGFGFIKCVDRDVRMFFHFSEILDGNQLHIADEVEFXVVPDMLSAQRNHAIRIKKLPKGXVSFHSHSDHRFLGXVEKEAXFSNPKXXSPNKGKEKEAEDGIIAYDDCGVKLXIAFQAKDVEGSXSPQIGDKVEFSISDKQRPGQQVAXCVRLLGRNSNSKRLLGYVAXLKDNFGFIEXANHDKEIFFHYSEFSGDVDSLELGDMVEYSLSKGKGNKVSAEKVNKXHSVNGIXEEADPXIYSGKVIRPLRSVDPXQXEYQGMIEIVEEGDMKGEVYPFGIVGMANKGDCLQKGESVKFQLCVLGQNAQXMAYNIXPLRRAXVECVKDQFGFINYEVGDSKKLFFHVKEVQDGIELQAGDEVEFSVILNQRXGKCSACNVWRVCEGPKAVAAPRPDRLVNRLKNIXLDDASAPRLMVLRQPRGPDNSMGFGAERKIRQAGVID

SEQ ID NO: 6997 - protein, 844 aa, Homo sapiens
  MOD_RES (6)..(6): Selenocysteine
  MOD_RES (30)..(30): Selenocysteine
  MOD_RES (34)..(34): Selenocysteine
  MOD_RES (40)..(40): Selenocysteine
  MOD_RES (42)..(42): Selenocysteine
  MOD_RES (66)..(66): Selenocysteine
  MOD_RES (73)..(73): Selenocysteine
  MOD_RES (81)..(81): Selenocysteine
  MOD_RES (125)..(125): Selenocysteine
  MOD_RES (171)..(171): Selenocysteine
  MOD_RES (186)..(186): Selenocysteine
  MOD_RES (188)..(188): Selenocysteine
  MOD_RES (200)..(200): Selenocysteine
  MOD_RES (214)..(214): Selenocysteine
  MOD_RES (268)..(268): Selenocysteine
  MOD_RES (278)..(278): Selenocysteine
  MOD_RES (289)..(289): Selenocysteine
  MOD_RES (298)..(298): Selenocysteine
  MOD_RES (312)..(312): Selenocysteine
  MOD_RES (314)..(314): Selenocysteine
  MOD_RES (350)..(350): Selenocysteine
  MOD_RES (355)..(355): Selenocysteine
  MOD_RES (368)..(368): Selenocysteine
  MOD_RES (378)..(378): Selenocysteine
  MOD_RES (386)..(386): Selenocysteine
  MOD_RES (390)..(390): Selenocysteine
  MOD_RES (440)..(440): Selenocysteine
  MOD_RES (463)..(463): Selenocysteine
  MOD_RES (477)..(477): Selenocysteine
  MOD_RES (483)..(483): Selenocysteine
  MOD_RES (489)..(490): Selenocysteine
  MOD_RES (515)..(515): Selenocysteine
  MOD_RES (527)..(527): Selenocysteine
  MOD_RES (551)..(551): Selenocysteine
  MOD_RES (571)..(571): Selenocysteine
  MOD_RES (581)..(581): Selenocysteine
  MOD_RES (628)..(628): Selenocysteine
  MOD_RES (635)..(635): Selenocysteine
  MOD_RES (641)..(641): Selenocysteine
  MOD_RES (657)..(657): Selenocysteine
  MOD_RES (659)..(659): Selenocysteine
  MOD_RES (711)..(711): Selenocysteine
  MOD_RES (717)..(717): Selenocysteine
  MOD_RES (723)..(723): Selenocysteine
  MOD_RES (773)..(773): Selenocysteine
  MOD_RES (807)..(807): Selenocysteine
MENVFXVSSDPHPSPAAPPSLSLPLSSSSXSSGXKKQKRXPXYQRSMSFDPNLLHNNGHNGYPNGXSAALREXGVIEKLLXSYGFIQCSERQARLFFHCSQYNGNLQDLKVGDDVEFEVSSDRRXGKPIAVKLVKIKQEILPEERMNGQVVCAVPHNLESKSPAAPGQSPXGSVCYERNGEVFYLXYXPEDVEGNVQLEXGDKINFVIDNNKHXGAVSARNIMLLKKKQARCQGVVCAMKEAFGFIERGDVVKEIFFHYSEFKGDLEXLQPGDDVEFXIKDRNGKEVAXDVRLLPQGXVIFEDISIEHFEGXVXKVIPKVPSKNQNDPLPGRIKVDFVIPKELPFGDKDXKSKVXLLEGDHVRFNISXDRRDKLERAXNIEVLSNXFQFXNEAREMGVIAAMRDGFGFIKCVDRDVRMFFHFSEILDGNQLHIADEVEFXVVPDMLSAQRNHAIRIKKLPKGXVSFHSHSDHRFLGXVEKEAXFSNPKXXSPNKGKEKEAEDGIIAYDDCGVKLXIAFQAKDVEGSXSPQIGDKVEFSISDKQRPGQQVAXCVRLLGRNSNSKRLLGYVAXLKDNFGFIEXANHDKEIFFHYSEFSGDVDSLELGDMVEYSLSKGKGNKVSAEKVNKXHSVNGIXEEADPXIYSGKVIRPLRSVDPXQXEYQGMIEIVEEGDMKGEVYPFGIVGMANKGDCLQKGESVKFQLCVLGQNAQXMAYNIXPLRRAXVECVKDQFGFINYEVGDSKKLFFHVKEVQDGIELQAGDEVEFSVILNQRXGKCSACNVWRVCEGPKAVAAPRPDRLVNRLKNIXLDDASAPRLMVLRQPRGPDNSMGFGAERKIRQAGVID

SEQ ID NO: 6998 - protein, 36 aa, Homo sapiens
  MOD_RES (10)..(10): Selenocysteine
  MOD_RES (12)..(12): Selenocysteine
  MOD_RES (24)..(24): Selenocysteine
MNGQEVFYLXYXPEDVEGNVQLEXGDKINFVIDNNK

SEQ ID NO: 6999 - protein, 137 aa, Homo sapiens
  MOD_RES (10)..(10): Selenocysteine
  MOD_RES (12)..(12): Selenocysteine
  MOD_RES (24)..(24): Selenocysteine
  MOD_RES (38)..(38): Selenocysteine
  MOD_RES (92)..(92): Selenocysteine
  MOD_RES (102)..(102): Selenocysteine
  MOD_RES (113)..(113): Selenocysteine
  MOD_RES (122)..(122): Selenocysteine
  MOD_RES (136)..(136): Selenocysteine
MNGQEVFYLXYXPEDVEGNVQLEXGDKINFVIDNNKHXGAVSARNIMLLKKKQARCQGVVCAMKEAFGFIERGDVVKEIFFHYSEFKGDLEXLQPGDDVEFXIKDRNGKEVAXDVRLLPQGXVIFEDISIEHFEGXV

SEQ ID NO: 7000 - protein, 668 aa, Homo sapiens
  MOD_RES (10)..(10): Selenocysteine
  MOD_RES (12)..(12): Selenocysteine
  MOD_RES (24)..(24): Selenocysteine
  MOD_RES (38)..(38): Selenocysteine
  MOD_RES (92)..(92): Selenocysteine
  MOD_RES (102)..(102): Selenocysteine
  MOD_RES (113)..(113): Selenocysteine
  MOD_RES (122)..(122): Selenocysteine
  MOD_RES (136)..(136): Selenocysteine
  MOD_RES (138)..(138): Selenocysteine
  MOD_RES (174)..(174): Selenocysteine
  MOD_RES (179)..(179): Selenocysteine
  MOD_RES (192)..(192): Selenocysteine
  MOD_RES (202)..(202): Selenocysteine
  MOD_RES (210)..(210): Selenocysteine
  MOD_RES (214)..(214): Selenocysteine
  MOD_RES (264)..(264): Selenocysteine
  MOD_RES (287)..(287): Selenocysteine
  MOD_RES (301)..(301): Selenocysteine
  MOD_RES (307)..(307): Selenocysteine
  MOD_RES (313)..(314): Selenocysteine
  MOD_RES (339)..(339): Selenocysteine
  MOD_RES (351)..(351): Selenocysteine
  MOD_RES (375)..(375): Selenocysteine
  MOD_RES (395)..(395): Selenocysteine
  MOD_RES (405)..(405): Selenocysteine
  MOD_RES (452)..(452): Selenocysteine
  MOD_RES (459)..(459): Selenocysteine
  MOD_RES (465)..(465): Selenocysteine
  MOD_RES (481)..(481): Selenocysteine
  MOD_RES (483)..(483): Selenocysteine
  MOD_RES (535)..(535): Selenocysteine
  MOD_RES (541)..(541): Selenocysteine
  MOD_RES (547)..(547): Selenocysteine
  MOD_RES (597)..(597): Selenocysteine
  MOD_RES (631)..(631): Selenocysteine
MNGQEVFYLXYXPEDVEGNVQLEXGDKINFVIDNNKHXGAVSARNIMLLKKKQARCQGVVCAMKEAFGFIERGDVVKEIFFHYSEFKGDLEXLQPGDDVEFXIKDRNGKEVAXDVRLLPQGXVIFEDISIEHFEGXVXKVIPKVPSKNQNDPLPGRIKVDFVIPKELPFGDKDXKSKVXLLEGDHVRFNISXDRRDKLERAXNIEVLSNXFQFXNEAREMGVIAAMRDGFGFIKCVDRDVRMFFHFSEILDGNQLHIADEVEFXVVPDMLSAQRNHAIRIKKLPKGXVSFHSHSDHRFLGXVEKEAXFSNPKXXSPNKGKEKEAEDGIIAYDDCGVKLXIAFQAKDVEGSXSPQIGDKVEFSISDKQRPGQQVAXCVRLLGRNSNSKRLLGYVAXLKDNFGFIEXANHDKEIFFHYSEFSGDVDSLELGDMVEYSLSKGKGNKVSAEKVNKXHSVNGIXEEADPXIYSGKVIRPLRSVDPXQXEYQGMIEIVEEGDMKGEVYPFGIVGMANKGDCLQKGESVKFQLCVLGQNAQXMAYNIXPLRRAXVECVKDQFGFINYEVGDSKKLFFHVKEVQDGIELQAGDEVEFSVILNQRXGKCSACNVWRVCEGPKAVAAPRPDRLVNRLKNIXLDDASAPRLMVLRQPRGPDNSMGFGAERKIRQAGVID

SEQ ID NO: 7001 - protein, 7 aa, Homo sapiens
MSFDPNL

SEQ ID NO: 7002 - protein, 46 aa, Homo sapiens
  MOD_RES (20)..(20): Selenocysteine
  MOD_RES (27)..(27): Selenocysteine
  MOD_RES (35)..(35): Selenocysteine
MSFDPNLLHNNGHNGYPNGXSAALREXGVIEKLLXSYGFIQCSERQ

SEQ ID NO: 7003 - protein, 95 aa, Homo sapiens
  MOD_RES (20)..(20): Selenocysteine
  MOD_RES (27)..(27): Selenocysteine
  MOD_RES (35)..(35): Selenocysteine
  MOD_RES (79)..(79): Selenocysteine
MSFDPNLLHNNGHNGYPNGXSAALREXGVIEKLLXSYGFIQCSERQARLFFHCSQYNGNLQDLKVGDDVEFEVSSDRRXGKPIAVKLVKIKQEIL

SEQ ID NO: 7004 - protein, 767 aa, Homo sapiens
  MOD_RES (20)..(20): Selenocysteine
  MOD_RES (27)..(27): Selenocysteine
  MOD_RES (35)..(35): Selenocysteine
  MOD_RES (79)..(79): Selenocysteine
  MOD_RES (109)..(109): Selenocysteine
  MOD_RES (111)..(111): Selenocysteine
  MOD_RES (123)..(123): Selenocysteine
  MOD_RES (137)..(137): Selenocysteine
  MOD_RES (191)..(191): Selenocysteine
  MOD_RES (201)..(201): Selenocysteine
  MOD_RES (212)..(212): Selenocysteine
  MOD_RES (221)..(221): Selenocysteine
  MOD_RES (235)..(235): Selenocysteine
  MOD_RES (237)..(237): Selenocysteine
  MOD_RES (273)..(273): Selenocysteine
  MOD_RES (278)..(278): Selenocysteine
  MOD_RES (291)..(291): Selenocysteine
  MOD_RES (301)..(301): Selenocysteine
  MOD_RES (309)..(309): Selenocysteine
  MOD_RES (313)..(313): Selenocysteine
  MOD_RES (363)..(363): Selenocysteine
  MOD_RES (386)..(386): Selenocysteine
  MOD_RES (400)..(400): Selenocysteine
  MOD_RES (406)..(406): Selenocysteine
  MOD_RES (412)..(413): Selenocysteine
  MOD_RES (438)..(438): Selenocysteine
  MOD_RES (450)..(450): Selenocysteine
  MOD_RES (474)..(474): Selenocysteine
  MOD_RES (494)..(494): Selenocysteine
  MOD_RES (504)..(504): Selenocysteine
  MOD_RES (551)..(551): Selenocysteine
  MOD_RES (558)..(558): Selenocysteine
  MOD_RES (564)..(564): Selenocysteine
  MOD_RES (580)..(580): Selenocysteine
  MOD_RES (582)..(582): Selenocysteine
  MOD_RES (634)..(634): Selenocysteine
  MOD_RES (640)..(640): Selenocysteine
  MOD_RES (646)..(646): Selenocysteine
  MOD_RES (696)..(696): Selenocysteine
  MOD_RES (730)..(730): Selenocysteine
MSFDPNLLHNNGHNGYPNGXSAALREXGVIEKLLXSYGFIQCSERQARLFFHCSQYNGNLQDLKVGDDVEFEVSSDRRXGKPIAVKLVKIKQEILPEERMNGQEVFYLXYXPEDVEGNVQLEXGDKINFVIDNNKHXGAVSARNIMLLKKKQARCQGVVCAMKEAFGFIERGDVVKEIFFHYSEFKGDLEXLQPGDDVEFXIKDRNGKEVAXDVRLLPQGXVIFEDISIEHFEGXVXKVIPKVPSKNQNDPLPGRIKVDFVIPKELPFGDKDXKSKVXLLEGDHVRFNISXDRRDKLERAXNIEVLSNXFQFXNEAREMGVIAAMRDGFGFIKCVDRDVRMFFHFSEILDGNQLHIADEVEFXVVPDMLSAQRNHAIRIKKLPKGXVSFHSHSDHRFLGXVEKEAXFSNPKXXSPNKGKEKEAEDGIIAYDDCGVKLXIAFQAKDVEGSXSPQIGDKVEFSISDKQRPGQQVAXCVRLLGRNSNSKRLLGYVAXLKDNFGFIEXANHDKEIFFHYSEFSGDVDSLELGDMVEYSLSKGKGNKVSAEKVNKXHSVNGIXEEADPXIYSGKVIRPLRSVDPXQXEYQGMIEIVEEGDMKGEVYPFGIVGMANKGDCLQKGESVKFQLCVLGQNAQXMAYNIXPLRRAXVECVKDQFGFINYEVGDSKKLFFHVKEVQDGIELQAGDEVEFSVILNQRXGKCSACNVWRVCEGPKAVAAPRPDRLVNRLKNIXLDDASAPRLMVLRQPRGPDNSMGFGAERKIRQAGVID

SEQ ID NO: 7005 - protein, 798 aa, Homo sapiens
  MOD_RES (20)..(20): Selenocysteine
  MOD_RES (27)..(27): Selenocysteine
  MOD_RES (35)..(35): Selenocysteine
  MOD_RES (79)..(79): Selenocysteine
  MOD_RES (125)..(125): Selenocysteine
  MOD_RES (140)..(140): Selenocysteine
  MOD_RES (142)..(142): Selenocysteine
  MOD_RES (154)..(154): Selenocysteine
  MOD_RES (168)..(168): Selenocysteine
  MOD_RES (222)..(222): Selenocysteine
  MOD_RES (232)..(232): Selenocysteine
  MOD_RES (243)..(243): Selenocysteine
  MOD_RES (252)..(252): Selenocysteine
  MOD_RES (266)..(266): Selenocysteine
  MOD_RES (268)..(268): Selenocysteine
  MOD_RES (304)..(304): Selenocysteine
  MOD_RES (309)..(309): Selenocysteine
  MOD_RES (322)..(322): Selenocysteine
  MOD_RES (332)..(332): Selenocysteine
  MOD_RES (340)..(340): Selenocysteine
  MOD_RES (344)..(344): Selenocysteine
  MOD_RES (394)..(394): Selenocysteine
  MOD_RES (417)..(417): Selenocysteine
  MOD_RES (431)..(431): Selenocysteine
  MOD_RES (437)..(437): Selenocysteine
  MOD_RES (443)..(444): Selenocysteine
  MOD_RES (469)..(469): Selenocysteine
  MOD_RES (481)..(481): Selenocysteine
  MOD_RES (505)..(505): Selenocysteine
  MOD_RES (525)..(525): Selenocysteine
  MOD_RES (535)..(535): Selenocysteine
  MOD_RES (582)..(582): Selenocysteine
  MOD_RES (589)..(589): Selenocysteine
  MOD_RES (595)..(595): Selenocysteine
  MOD_RES (611)..(611): Selenocysteine
  MOD_RES (613)..(613): Selenocysteine
  MOD_RES (665)..(665): Selenocysteine
  MOD_RES (671)..(671): Selenocysteine
  MOD_RES (677)..(677): Selenocysteine
  MOD_RES (727)..(727): Selenocysteine
  MOD_RES (761)..(761): Selenocysteine
MSFDPNLLHNNGHNGYPNGXSAALREXGVIEKLLXSYGFIQCSERQARLFFHCSQYNGNLQDLKVGDDVEFEVSSDRRXGKPIAVKLVKIKQEILPEERMNGQVVCAVPHNLESKSPAAPGQSPXGSVCYERNGEVFYLXYXPEDVEGNVQLEXGDKINFVIDNNKHXGAVSARNIMLLKKKQARCQGVVCAMKEAFGFIERGDVVKEIFFHYSEFKGDLEXLQPGDDVEFXIKDRNGKEVAXDVRLLPQGXVIFEDISIEHFEGXVXKVIPKVPSKNQNDPLPGRIKVDFVIPKELPFGDKDXKSKVXLLEGDHVRFNISXDRRDKLERAXNIEVLSNXFQFXNEAREMGVIAAMRDGFGFIKCVDRDVRMFFHFSEILDGNQLHIADEVEFXVVPDMLSAQRNHAIRIKKLPKGXVSFHSHSDHRFLGXVEKEAXFSNPKXXSPNKGKEKEAEDGIIAYDDCGVKLXIAFQAKDVEGSXSPQIGDKVEFSISDKQRPGQQVAXCVRLLGRNSNSKRLLGYVAXLKDNFGFIEXANHDKEIFFHYSEFSGDVDSLELGDMVEYSLSKGKGNKVSAEKVNKXHSVNGIXEEADPXIYSGKVIRPLRSVDPXQXEYQGMIEIVEEGDMKGEVYPFGIVGMANKGDCLQKGESVKFQLCVLGQNAQXMAYNIXPLRRAXVECVKDQFGFINYEVGDSKKLFFHVKEVQDGIELQAGDEVEFSVILNQRXGKCSACNVWRVCEGPKAVAAPRPDRLVNRLKNIXLDDASAPRLMVLRQPRGPDNSMGFGAERKIRQAGVID

SEQ ID NO: 7006 - protein, 915 aa, Homo sapiens
  MOD_RES (10)..(10): Selenocysteine
  MOD_RES (12)..(12): Selenocysteine
  MOD_RES (18)..(18): Selenocysteine
  MOD_RES (48)..(48): Selenocysteine
  MOD_RES (65)..(65): Selenocysteine
  MOD_RES (132)..(132): Selenocysteine
  MOD_RES (152)..(152): Selenocysteine
  MOD_RES (171)..(171): Selenocysteine
  MOD_RES (185)..(185): Selenocysteine
  MOD_RES (191)..(191): Selenocysteine
  MOD_RES (197)..(197): Selenocysteine
  MOD_RES (237)..(237): Selenocysteine
  MOD_RES (244)..(244): Selenocysteine
  MOD_RES (247)..(247): Selenocysteine
  MOD_RES (255)..(255): Selenocysteine
  MOD_RES (283)..(283): Selenocysteine
  MOD_RES (285)..(285): Selenocysteine
  MOD_RES (325)..(325): Selenocysteine
  MOD_RES (346)..(346): Selenocysteine
  MOD_RES (379)..(379): Selenocysteine
  MOD_RES (387)..(387): Selenocysteine
  MOD_RES (393)..(393): Selenocysteine
  MOD_RES (402)..(402): Selenocysteine
  MOD_RES (464)..(464): Selenocysteine
  MOD_RES (475)..(475): Selenocysteine
  MOD_RES (483)..(483): Selenocysteine
  MOD_RES (486)..(486): Selenocysteine
  MOD_RES (499)..(499): Selenocysteine
  MOD_RES (506)..(506): Selenocysteine
  MOD_RES (537)..(537): Selenocysteine
  MOD_RES (540)..(540): Selenocysteine
  MOD_RES (543)..(543): Selenocysteine
  MOD_RES (573)..(573): Selenocysteine
  MOD_RES (593)..(593): Selenocysteine
  MOD_RES (617)..(617): Selenocysteine
  MOD_RES (642)..(642): Selenocysteine
  MOD_RES (662)..(662): Selenocysteine
  MOD_RES (727)..(728): Selenocysteine
  MOD_RES (791)..(791): Selenocysteine
  MOD_RES (795)..(795): Selenocysteine
  MOD_RES (803)..(803): Selenocysteine
  MOD_RES (806)..(806): Selenocysteine
  MOD_RES (810)..(810): Selenocysteine
  MOD_RES (827)..(827): Selenocysteine
  MOD_RES (840)..(840): Selenocysteine
  MOD_RES (845)..(845): Selenocysteine
  MOD_RES (881)..(881): Selenocysteine
  MOD_RES (893)..(893): Selenocysteine
  MOD_RES (913)..(913): Selenocysteine
MELSDANLQXLXEYLKKXLDPDPAIRRPAEKFLESVEGNQNYPLLLLXLLEKSQDNVIKVCASVXFKNYIKRNWRIVEDEPNKICEADRVAIKANIVHLMLSSPEQIQKQLSDAISIIGREDFPQKWPDLLXEMVNRFQSGDFHVINGVLRXAHSLFKRYRHEFKSNELWXEIKLVLDAFALPLXNLFKAXIELCSXHANDASALRILFSSLILISKLFYSLNFQDLPEFFEDNMEXWMNNFHXLLXLDNKLLQXDLVSNAIQFLASVCERPHYKNLFEDQNXLXSICEKVIVPNMEFRAADEEAFEDNSEEYIRRDLEGSDIDXRRRAACDLVRGLCKFFEGPVXGIFSGYVNSMLQEYAKNPSVNWKHKDAAIYLVXSLASKAQXQKHGIXQANELVNLXEFFVNHILPDLKSANVNEFPVLKADGIKYIMIFRNQVPKEHLLVSIPLLINHLQAESIVVHXYAAHALERLFXMRGPNNAXLFXAAEIAPFVEILLXNLFKALXLPGSSENEYIMKAIMRSFSLLQEAIIPYIPXLIXQLXQKLLAVSKNPSKPHFNHYMFEAICLSIRIXCKANPAAVVNFEEALFLVFXEILQNDVQEFIPYVFQVMSLLLEXHKNDIPSSYMALFPHLLQPVLWERXGNIPALVRLLQAFLERGSNXIASAAADKIPGLLGVFQKLIASKANDHQGFYLLNSIIEHMPPESVDQYRKQIFILLFQRLQNSKXXKFIKSFLVFINLYCIKYGALALQEIFDGIQPKMFGMVLEKIIIPEIQKVSGNVEKKICAVGIXKLLXECPPMMDXEYXKLWXPLLQSLIGLFELPEDDXIPDEEHFIDIEDXPGYQXAFSQLAFAGKKEHDPVGQMVNNPKIHLAQSLHKLSXACPGRVPSMVSXSLNAEALQYLQGYLQAASVXLL

SEQ ID NO: 7007 - protein, 971 aa, Homo sapiens
  MOD_RES (10)..(10): Selenocysteine
  MOD_RES (12)..(12): Selenocysteine
  MOD_RES (18)..(18): Selenocysteine
  MOD_RES (48)..(48): Selenocysteine
  MOD_RES (65)..(65): Selenocysteine
  MOD_RES (132)..(132): Selenocysteine
  MOD_RES (152)..(152): Selenocysteine
  MOD_RES (171)..(171): Selenocysteine
  MOD_RES (185)..(185): Selenocysteine
  MOD_RES (191)..(191): Selenocysteine
  MOD_RES (197)..(197): Selenocysteine
  MOD_RES (237)..(237): Selenocysteine
  MOD_RES (244)..(244): Selenocysteine
  MOD_RES (247)..(247): Selenocysteine
  MOD_RES (255)..(255): Selenocysteine
  MOD_RES (295)..(295): Selenocysteine
  MOD_RES (303)..(304): Selenocysteine
  MOD_RES (339)..(339): Selenocysteine
  MOD_RES (341)..(341): Selenocysteine
  MOD_RES (381)..(381): Selenocysteine
  MOD_RES (402)..(402): Selenocysteine
  MOD_RES (435)..(435): Selenocysteine
  MOD_RES (443)..(443): Selenocysteine
  MOD_RES (449)..(449): Selenocysteine
  MOD_RES (458)..(458): Selenocysteine
  MOD_RES (520)..(520): Selenocysteine
  MOD_RES (531)..(531): Selenocysteine
  MOD_RES (539)..(539): Selenocysteine
  MOD_RES (542)..(542): Selenocysteine
  MOD_RES (555)..(555): Selenocysteine
  MOD_RES (562)..(562): Selenocysteine
  MOD_RES (593)..(593): Selenocysteine
  MOD_RES (596)..(596): Selenocysteine
  MOD_RES (599)..(599): Selenocysteine
  MOD_RES (629)..(629): Selenocysteine
  MOD_RES (649)..(649): Selenocysteine
  MOD_RES (673)..(673): Selenocysteine
  MOD_RES (698)..(698): Selenocysteine
  MOD_RES (718)..(718): Selenocysteine
  MOD_RES (783)..(784): Selenocysteine
  MOD_RES (847)..(847): Selenocysteine
  MOD_RES (851)..(851): Selenocysteine
  MOD_RES (859)..(859): Selenocysteine
  MOD_RES (862)..(862): Selenocysteine
  MOD_RES (866)..(866): Selenocysteine
  MOD_RES (883)..(883): Selenocysteine
  MOD_RES (896)..(896): Selenocysteine
  MOD_RES (901)..(901): Selenocysteine
  MOD_RES (937)..(937): Selenocysteine
  MOD_RES (949)..(949): Selenocysteine
  MOD_RES (969)..(969): Selenocysteine
MELSDANLQXLXEYLKKXLDPDPAIRRPAEKFLESVEGNQNYPLLLLXLLEKSQDNVIKVCASVXFKNYIKRNWRIVEDEPNKICEADRVAIKANIVHLMLSSPEQIQKQLSDAISIIGREDFPQKWPDLLXEMVNRFQSGDFHVINGVLRXAHSLFKRYRHEFKSNELWXEIKLVLDAFALPLXNLFKAXIELCSXHANDASALRILFSSLILISKLFYSLNFQDLPEFFEDNMEXWMNNFHXLLXLDNKLLQXDDEEEAGLLELLKSQICDNAALYAQKYDEEFQRYLPRFVXAIWNLLVXXGQEVKYDLLVSNAIQFLASVCERPHYKNLFEDQNXLXSICEKVIVPNMEFRAADEEAFEDNSEEYIRRDLEGSDIDXRRRAACDLVRGLCKFFEGPVXGIFSGYVNSMLQEYAKNPSVNWKHKDAAIYLVXSLASKAQXQKHGIXQANELVNLXEFFVNHILPDLKSANVNEFPVLKADGIKYIMIFRNQVPKEHLLVSIPLLINHLQAESIVVHXYAAHALERLFXMRGPNNAXLFXAAEIAPFVEILLXNLFKALXLPGSSENEYIMKAIMRSFSLLQEAIIPYIPXLIXQLXQKLLAVSKNPSKPHFNHYMFEAICLSIRIXCKANPAAVVNFEEALFLVFXEILQNDVQEFIPYVFQVMSLLLEXHKNDIPSSYMALFPHLLQPVLWERXGNIPALVRLLQAFLERGSNXIASAAADKIPGLLGVFQKLIASKANDHQGFYLLNSIIEHMPPESVDQYRKQIFILLFQRLQNSKXXKFIKSFLVFINLYCIKYGALALQEIFDGIQPKMFGMVLEKIIIPEIQKVSGNVEKKICAVGIXKLLXECPPMMDXEYXKLWXPLLQSLIGLFELPEDDXIPDEEHFIDIEDXPGYQXAFSQLAFAGKKEHDPVGQMVNNPKIHLAQSLHKLSXACPGRVPSMVSXSLNAEALQYLQGYLQAASVXLL

SEQ ID NO: 7008 - protein, 150 aa, Homo sapiens
  MOD_RES (21)..(21): Selenocysteine
  MOD_RES (39)..(39): Selenocysteine
  MOD_RES (68)..(68): Selenocysteine
  MOD_RES (73)..(73): Selenocysteine
  MOD_RES (103)..(103): Selenocysteine
  MOD_RES (110)..(110): Selenocysteine
  MOD_RES (131)..(131): Selenocysteine
  MOD_RES (144)..(144): Selenocysteine
  MOD_RES (148)..(148): Selenocysteine
MGWGRLQRISLPSQCLSLLSXWLGSLLLLVCLLASRSIXEEVSEYCSHMIGSGHLQSLQRLIDSQMEXSCQIXFEFVDQEQLKDPVCYLKKAFLLVQDIMEDXMRFRDNXPNAIAIVQLQELSLRLKSCFXKDYEEHDKACVRXFYEXPL

SEQ ID NO: 7009 - protein, 113 aa, Homo sapiens
  MOD_RES (20)..(20): Selenocysteine
  MOD_RES (25)..(25): Selenocysteine
  MOD_RES (55)..(55): Selenocysteine
  MOD_RES (62)..(62): Selenocysteine
  MOD_RES (83)..(83): Selenocysteine
  MOD_RES (96)..(96): Selenocysteine
  MOD_RES (100)..(100): Selenocysteine
MIGSGHLQSLQRLIDSQMEXSCQIXFEFVDQEQLKDPVCYLKKAFLLVQDIMEDXMRFRDNXPNAIAIVQLQELSLRLKSCFXKDYEEHDKACVRXFYEXPLQLLEKVKNVFN

SEQ ID NO: 7010 - protein, 285 aa, Homo sapiens
  MOD_RES (2)..(2): Selenocysteine
  MOD_RES (13)..(13): Selenocysteine
  MOD_RES (20)..(20): Selenocysteine
  MOD_RES (25)..(25): Selenocysteine
  MOD_RES (55)..(55): Selenocysteine
  MOD_RES (62)..(62): Selenocysteine
  MOD_RES (83)..(83): Selenocysteine
  MOD_RES (96)..(96): Selenocysteine
  MOD_RES (100)..(100): Selenocysteine
  MOD_RES (115)..(115): Selenocysteine
  MOD_RES (144)..(144): Selenocysteine
  MOD_RES (181)..(181): Selenocysteine
  MOD_RES (188)..(188): Selenocysteine
  MOD_RES (202)..(202): Selenocysteine
  MOD_RES (216)..(216): Selenocysteine
  MOD_RES (225)..(225): Selenocysteine
  MOD_RES (232)..(232): Selenocysteine
  MOD_RES (260)..(260): Selenocysteine
  MOD_RES (280)..(280): Selenocysteine
MXAPGAAGRCPPXIDSQMEXSCQIXFEFVDQEQLKDPVCYLKKAFLLVQDIMEDXMRFRDNXPNAIAIVQLQELSLRLKSCFXKDYEEHDKACVRXFYEXPLQLLEKVKNVFNEXKNLLDKDWNIFSKNCNNSFAECSSQDVVXKPDCNCLYPKAIPSSDPASVSPHQPLAPSMAPVAGLXWEDSEGXEGSSLLPGEQPLHXVDPGSAKQRPPRSXCQSFEPPEXPVVKDSXIGGSPQPRPSVGAFNPGMEDILDSAMGXNWVPEEASGEASEIPVPQGXELSPS

SEQ ID NO: 7011 - protein, 119 aa, Homo sapiens
  MOD_RES (2)..(2): Selenocysteine
  MOD_RES (13)..(14): Selenocysteine
  MOD_RES (32)..(32): Selenocysteine
  MOD_RES (61)..(61): Selenocysteine
  MOD_RES (66)..(66): Selenocysteine
  MOD_RES (96)..(96): Selenocysteine
  MOD_RES (103)..(103): Selenocysteine
MXAPGAAGRCPPXXWLGSLLLLVCLLASRSIXEEVSEYCSHMIGSGHLQSLQRLIDSQMEXSCQIXFEFVDQEQLKDPVCYLKKAFLLVQDIMEDXMRFRDNXPNAIAIVQLQELSLRL

SEQ ID NO: 7012 - protein, 438 aa, Homo sapiens
  MOD_RES (2)..(2): Selenocysteine
  MOD_RES (13)..(14): Selenocysteine
  MOD_RES (32)..(32): Selenocysteine
  MOD_RES (61)..(61): Selenocysteine
  MOD_RES (66)..(66): Selenocysteine
  MOD_RES (96)..(96): Selenocysteine
  MOD_RES (103)..(103): Selenocysteine
  MOD_RES (124)..(124): Selenocysteine
  MOD_RES (137)..(137): Selenocysteine
  MOD_RES (141)..(141): Selenocysteine
  MOD_RES (156)..(156): Selenocysteine
  MOD_RES (185)..(185): Selenocysteine
  MOD_RES (222)..(222): Selenocysteine
  MOD_RES (229)..(229): Selenocysteine
  MOD_RES (243)..(243): Selenocysteine
  MOD_RES (257)..(257): Selenocysteine
  MOD_RES (266)..(266): Selenocysteine
  MOD_RES (273)..(273): Selenocysteine
  MOD_RES (301)..(301): Selenocysteine
  MOD_RES (321)..(321): Selenocysteine
  MOD_RES (335)..(335): Selenocysteine
  MOD_RES (363)..(363): Selenocysteine
  MOD_RES (428)..(428): Selenocysteine
MXAPGAAGRCPPXXWLGSLLLLVCLLASRSIXEEVSEYCSHMIGSGHLQSLQRLIDSQMEXSCQIXFEFVDQEQLKDPVCYLKKAFLLVQDIMEDXMRFRDNXPNAIAIVQLQELSLRLKSCFXKDYEEHDKACVRXFYEXPLQLLEKVKNVFNEXKNLLDKDWNIFSKNCNNSFAECSSQDVVXKPDCNCLYPKAIPSSDPASVSPHQPLAPSMAPVAGLXWEDSEGXEGSSLLPGEQPLHXVDPGSAKQRPPRSXCQSFEPPEXPVVKDSXIGGSPQPRPSVGAFNPGMEDILDSAMGXNWVPEEASGEASEIPVPQGXELSPSRPGGGSMQXEPARPSNFLSASSPLPASAKGQQPADVXGHERQSEGSFSPQLQESVFHLLVPSVILVLLAVGGLLFYRWRRRSHQEPQRADSPLEQPEGSPLXQDDRQVELPV

SEQ ID NO: 7013 - protein, 554 aa, Homo sapiens
  MOD_RES (2)..(2): Selenocysteine
  MOD_RES (13)..(14): Selenocysteine
  MOD_RES (32)..(32): Selenocysteine
  MOD_RES (61)..(61): Selenocysteine
  MOD_RES (66)..(66): Selenocysteine
  MOD_RES (96)..(96): Selenocysteine
  MOD_RES (103)..(103): Selenocysteine
  MOD_RES (124)..(124): Selenocysteine
  MOD_RES (137)..(137): Selenocysteine
  MOD_RES (141)..(141): Selenocysteine
  MOD_RES (156)..(156): Selenocysteine
  MOD_RES (185)..(185): Selenocysteine
  MOD_RES (222)..(222): Selenocysteine
  MOD_RES (229)..(229): Selenocysteine
  MOD_RES (243)..(243): Selenocysteine
  MOD_RES (257)..(257): Selenocysteine
  MOD_RES (266)..(266): Selenocysteine
  MOD_RES (273)..(273): Selenocysteine
  MOD_RES (301)..(301): Selenocysteine
  MOD_RES (321)..(321): Selenocysteine
  MOD_RES (335)..(335): Selenocysteine
  MOD_RES (363)..(363): Selenocysteine
  MOD_RES (365)..(365): Selenocysteine
  MOD_RES (376)..(376): Selenocysteine
  MOD_RES (383)..(383): Selenocysteine
  MOD_RES (387)..(387): Selenocysteine
  MOD_RES (418)..(418): Selenocysteine
  MOD_RES (446)..(446): Selenocysteine
  MOD_RES (477)..(477): Selenocysteine
  MOD_RES (479)..(479): Selenocysteine
  MOD_RES (544)..(544): Selenocysteine
MXAPGAAGRCPPXXWLGSLLLLVCLLASRSIXEEVSEYCSHMIGSGHLQSLQRLIDSQMEXSCQIXFEFVDQEQLKDPVCYLKKAFLLVQDIMEDXMRFRDNXPNAIAIVQLQELSLRLKSCFXKDYEEHDKACVRXFYEXPLQLLEKVKNVFNEXKNLLDKDWNIFSKNCNNSFAECSSQDVVXKPDCNCLYPKAIPSSDPASVSPHQPLAPSMAPVAGLXWEDSEGXEGSSLLPGEQPLHXVDPGSAKQRPPRSXCQSFEPPEXPVVKDSXIGGSPQPRPSVGAFNPGMEDILDSAMGXNWVPEEASGEASEIPVPQGXELSPSRPGGGSMQXEPARPSNFLSASSPLPASAKGQQPADVXGXALPRVGPVRPXGQDWNHXPQKXDHPSALLRDPPEPGSPRISSLRPQGLSNPSXLSAQPQLSRSHSSGSVLPLGELEGRRSXRDRRSPAEPEGGPASEGAARPLPRFNSVPLXDXGHERQSEGSFSPQLQESVFHLLVPSVILVLLAVGGLLFYRWRRRSHQEPQRADSPLEQPEGSPLXQDDRQVELPV

SEQ ID NO: 7014 - protein, 256 aa, Homo sapiens
  MOD_RES (2)..(2): Selenocysteine
  MOD_RES (13)..(14): Selenocysteine
  MOD_RES (32)..(32): Selenocysteine
  MOD_RES (61)..(61): Selenocysteine
  MOD_RES (66)..(66): Selenocysteine
  MOD_RES (96)..(96): Selenocysteine
  MOD_RES (103)..(103): Selenocysteine
  MOD_RES (124)..(124): Selenocysteine
  MOD_RES (137)..(137): Selenocysteine
  MOD_RES (141)..(141): Selenocysteine
  MOD_RES (156)..(156): Selenocysteine
  MOD_RES (246)..(246): Selenocysteine
MXAPGAAGRCPPXXWLGSLLLLVCLLASRSIXEEVSEYCSHMIGSGHLQSLQRLIDSQMEXSCQIXFEFVDQEQLKDPVCYLKKAFLLVQDIMEDXMRFRDNXPNAIAIVQLQELSLRLKSCFXKDYEEHDKACVRXFYEXPLQLLEKVKNVFNEXKNLLDKDWNIFSKNCNNSFAECSSQGHERQSEGSFSPQLQESVFHLLVPSVILVLLAVGGLLFYRWRRRSHQEPQRADSPLEQPEGSPLXQDDRQVELPV

SEQ ID NO: 7015 - protein, 64 aa, Homo sapiens
  MOD_RES (26)..(26): Selenocysteine
  MOD_RES (59)..(59): Selenocysteine
AGSPWALGQRPFGAQGLKGPVCVAAXAHADEKEALMSELKIMSHLGQHENIVNLLGACXHGGIS

SEQ ID NO: 7016 - protein, 306 aa, Homo sapiens
  MOD_RES (13)..(13): Selenocysteine
  MOD_RES (37)..(37): Selenocysteine
  MOD_RES (39)..(39): Selenocysteine
  MOD_RES (59)..(59): Selenocysteine
  MOD_RES (71)..(71): Selenocysteine
  MOD_RES (75)..(75): Selenocysteine
  MOD_RES (79)..(79): Selenocysteine
  MOD_RES (81)..(81): Selenocysteine
  MOD_RES (85)..(85): Selenocysteine
  MOD_RES (130)..(130): Selenocysteine
  MOD_RES (152)..(152): Selenocysteine
  MOD_RES (163)..(163): Selenocysteine
  MOD_RES (206)..(206): Selenocysteine
  MOD_RES (242)..(242): Selenocysteine
  MOD_RES (262)..(262): Selenocysteine
  MOD_RES (289)..(289): Selenocysteine
  MOD_RES (298)..(298): Selenocysteine
MGPGVLLLLLVAXAWHGQGIPVIEPSVPELVVKPGAXVXLRCVGNGSVEWDGPPSPHWXLYSDGSSSILSXNNAXFQNXGXYRCXEPGDPLGGSAAIHLYVKDPARPWNVLAQEVVVFEDQDALLPCLLXDPVLEAGVSLVRVRGRPLMRHXNYSFSPWHGFXIHRAKFIQSQDYQCSALMGGRKVMSISIRLKVQKVIPGPPALXLVPAELVRIRGEAAQIVCSASSVDVNFDVFLQHNNXKLAIPQQSDFHNNRYQKVLXLNLDQVDFQHAGNYSCVASNVQGKHSXSMFFRVVGXPSPSLCPA

SEQ ID NO: 7017 - protein, 671 aa, Homo sapiens
  MOD_RES (13)..(13): Selenocysteine
  MOD_RES (37)..(37): Selenocysteine
  MOD_RES (39)..(39): Selenocysteine
  MOD_RES (59)..(59): Selenocysteine
  MOD_RES (71)..(71): Selenocysteine
  MOD_RES (75)..(75): Selenocysteine
  MOD_RES (79)..(79): Selenocysteine
  MOD_RES (81)..(81): Selenocysteine
  MOD_RES (85)..(85): Selenocysteine
  MOD_RES (130)..(130): Selenocysteine
  MOD_RES (152)..(152): Selenocysteine
  MOD_RES (163)..(163): Selenocysteine
  MOD_RES (206)..(206): Selenocysteine
  MOD_RES (242)..(242): Selenocysteine
  MOD_RES (262)..(262): Selenocysteine
  MOD_RES (289)..(289): Selenocysteine
  MOD_RES (314)..(314): Selenocysteine
  MOD_RES (337)..(337): Selenocysteine
  MOD_RES (355)..(356): Selenocysteine
  MOD_RES (359)..(359): Selenocysteine
  MOD_RES (363)..(363): Selenocysteine
  MOD_RES (365)..(365): Selenocysteine
  MOD_RES (393)..(393): Selenocysteine
  MOD_RES (397)..(397): Selenocysteine
  MOD_RES (409)..(409): Selenocysteine
  MOD_RES (416)..(416): Selenocysteine
  MOD_RES (430)..(430): Selenocysteine
  MOD_RES (438)..(438): Selenocysteine
  MOD_RES (467)..(467): Selenocysteine
  MOD_RES (473)..(473): Selenocysteine
  MOD_RES (476)..(476): Selenocysteine
  MOD_RES (482)..(482): Selenocysteine
  MOD_RES (507)..(507): Selenocysteine
  MOD_RES (516)..(516): Selenocysteine
  MOD_RES (562)..(562): Selenocysteine
  MOD_RES (567)..(567): Selenocysteine
  MOD_RES (587)..(587): Selenocysteine
  MOD_RES (600)..(600): Selenocysteine
  MOD_RES (621)..(621): Selenocysteine
  MOD_RES (654)..(654): Selenocysteine
  MOD_RES (658)..(658): Selenocysteine
  MOD_RES (667)..(667): Selenocysteine
MGPGVLLLLLVAXAWHGQGIPVIEPSVPELVVKPGAXVXLRCVGNGSVEWDGPPSPHWXLYSDGSSSILSXNNAXFQNXGXYRCXEPGDPLGGSAAIHLYVKDPARPWNVLAQEVVVFEDQDALLPCLLXDPVLEAGVSLVRVRGRPLMRHXNYSFSPWHGFXIHRAKFIQSQDYQCSALMGGRKVMSISIRLKVQKVIPGPPALXLVPAELVRIRGEAAQIVCSASSVDVNFDVFLQHNNXKLAIPQQSDFHNNRYQKVLXLNLDQVDFQHAGNYSCVASNVQGKHSXSMFFRVVESAYLNLSSEQNLIQEVXVGEGLNLKVMVEAYPGLQGFNWXYLGPFSDHQPEPKLANAXXKDXYRHXFXLSLPRLKPSEAGRYSFLARNPGGWRALXFELXLRYPPEVSVIWXFINGSGXLLCAASGYPQPNVXWLQCSGHXDRCDEAQVLQVWDDPYPEVLSQEPFHKVXVQSLLXVEXLEHNQXYECRAHNSVGSGSWAFIPISAGAHXHPPDEFLFXPVVVACMSIMALLLLLLLLLLYKYKQKPKYQVRWKIIESYEGNSYXFIDPXQLPYNEKWEFPRNNLQFGKXLGAGAFGKVVEAXAFGLGKEDAVLKVAVKMLKSXAHADEKEALMSELKIMSHLGQHENIVNLLGACXHGGXVASPARVWXPMWR

SEQ ID NO: 7018 - protein, 972 aa, Homo sapiens
  MOD_RES (13)..(13): Selenocysteine
  MOD_RES (37)..(37): Selenocysteine
  MOD_RES (39)..(39): Selenocysteine
  MOD_RES (59)..(59): Selenocysteine
  MOD_RES (71)..(71): Selenocysteine
  MOD_RES (75)..(75): Selenocysteine
  MOD_RES (79)..(79): Selenocysteine
  MOD_RES (81)..(81): Selenocysteine
  MOD_RES (85)..(85): Selenocysteine
  MOD_RES (130)..(130): Selenocysteine
  MOD_RES (152)..(152): Selenocysteine
  MOD_RES (163)..(163): Selenocysteine
  MOD_RES (206)..(206): Selenocysteine
  MOD_RES (242)..(242): Selenocysteine
  MOD_RES (262)..(262): Selenocysteine
  MOD_RES (289)..(289): Selenocysteine
  MOD_RES (314)..(314): Selenocysteine
  MOD_RES (337)..(337): Selenocysteine
  MOD_RES (355)..(356): Selenocysteine
  MOD_RES (359)..(359): Selenocysteine
  MOD_RES (363)..(363): Selenocysteine
  MOD_RES (365)..(365): Selenocysteine
  MOD_RES (393)..(393): Selenocysteine
  MOD_RES (397)..(397): Selenocysteine
  MOD_RES (409)..(409): Selenocysteine
  MOD_RES (416)..(416): Selenocysteine
  MOD_RES (430)..(430): Selenocysteine
  MOD_RES (438)..(438): Selenocysteine
  MOD_RES (467)..(467): Selenocysteine
  MOD_RES (473)..(473): Selenocysteine
  MOD_RES (476)..(476): Selenocysteine
  MOD_RES (482)..(482): Selenocysteine
  MOD_RES (507)..(507): Selenocysteine
  MOD_RES (516)..(516): Selenocysteine
  MOD_RES (562)..(562): Selenocysteine
  MOD_RES (567)..(567): Selenocysteine
  MOD_RES (587)..(587): Selenocysteine
  MOD_RES (600)..(600): Selenocysteine
  MOD_RES (621)..(621): Selenocysteine
  MOD_RES (654)..(654): Selenocysteine
  MOD_RES (663)..(663): Selenocysteine
  MOD_RES (722)..(722): Selenocysteine
  MOD_RES (731)..(731): Selenocysteine
  MOD_RES (787)..(787): Selenocysteine
  MOD_RES (833)..(833): Selenocysteine
  MOD_RES (898)..(898): Selenocysteine
  MOD_RES (902)..(902): Selenocysteine
  MOD_RES (924)..(924): Selenocysteine
  MOD_RES (952)..(952): Selenocysteine
MGPGVLLLLLVAXAWHGQGIPVIEPSVPELVVKPGAXVXLRCVGNGSVEWDGPPSPHWXLYSDGSSSILSXNNAXFQNXGXYRCXEPGDPLGGSAAIHLYVKDPARPWNVLAQEVVVFEDQDALLPCLLXDPVLEAGVSLVRVRGRPLMRHXNYSFSPWHGFXIHRAKFIQSQDYQCSALMGGRKVMSISIRLKVQKVIPGPPALXLVPAELVRIRGEAAQIVCSASSVDVNFDVFLQHNNXKLAIPQQSDFHNNRYQKVLXLNLDQVDFQHAGNYSCVASNVQGKHSXSMFFRVVESAYLNLSSEQNLIQEVXVGEGLNLKVMVEAYPGLQGFNWXYLGPFSDHQPEPKLANAXXKDXYRHXFXLSLPRLKPSEAGRYSFLARNPGGWRALXFELXLRYPPEVSVIWXFINGSGXLLCAASGYPQPNVXWLQCSGHXDRCDEAQVLQVWDDPYPEVLSQEPFHKVXVQSLLXVEXLEHNQXYECRAHNSVGSGSWAFIPISAGAHXHPPDEFLFXPVVVACMSIMALLLLLLLLLLYKYKQKPKYQVRWKIIESYEGNSYXFIDPXQLPYNEKWEFPRNNLQFGKXLGAGAFGKVVEAXAFGLGKEDAVLKVAVKMLKSXAHADEKEALMSELKIMSHLGQHENIVNLLGACXHGGPVLVIXEYCCYGDLLNFLRRKAEAMLGPSLSPGQDPEGGVDYKNIHLEKKYVRRDSGFSSQGVDXYVEMRPVSXSSNDSFSEQDLDKEDGRPLELRDLLHFSSQVAQGMAFLASKNCIHRDVAARNVLLXNGHVAKIGDFGLARDIMNDSNYIVKGNARLPVKWMAPESIFDCVYXVQSDVWSYGILLWEIFSLGLNPYPGILVNSKFYKLVKDGYQMAQPAFAPKNIYSIMQACWALEPXHRPXFQQICSFLQEQAQEDRRERDYXNLPSSSRSGGSGSSSSELEEESSSEHLXCCEQGDIAQPLLQPNNYQFC

SEQ ID NO: 7019 - protein, 49 aa, Homo sapiens
  MOD_RES (4)..(4): Selenocysteine
  MOD_RES (15)..(15): Selenocysteine
MRHXNYSFSPWHGFXIHRAKFIQSQDYQCSALMGGRKVMSISIRLKVQK

SEQ ID NO: 7020 - protein, 144 aa, Homo sapiens
  MOD_RES (11)..(11): Selenocysteine
  MOD_RES (27)..(27): Selenocysteine
  MOD_RES (49)..(49): Selenocysteine
  MOD_RES (56)..(56): Selenocysteine
  MOD_RES (70)..(70): Selenocysteine
  MOD_RES (74)..(74): Selenocysteine
  MOD_RES (88)..(88): Selenocysteine
  MOD_RES (95)..(95): Selenocysteine
  MOD_RES (108)..(108): Selenocysteine
  MOD_RES (111)..(111): Selenocysteine
  MOD_RES (115)..(115): Selenocysteine
  MOD_RES (119)..(119): Selenocysteine
MWLQSLLLLGXVACSISAPARSPSPSXQPWEHVNAIQEARRLLNLSRDXAAEMNEXVEVISEMFDLQEPXCLQXRLELYKQGLRGSLXKLKGPLXMMASHYKQHCPPXPEXSCAXQIIXFESFKENLKDFLLVIPFDCWEPVQE

SEQ ID NO: 7021 - protein, 238 aa, Homo sapiens
  MOD_RES (6)..(6): Selenocysteine
  MOD_RES (29)..(29): Selenocysteine
  MOD_RES (44)..(44): Selenocysteine
  MOD_RES (55)..(56): Selenocysteine
  MOD_RES (63)..(63): Selenocysteine
  MOD_RES (82)..(82): Selenocysteine
  MOD_RES (93)..(93): Selenocysteine
  MOD_RES (100)..(100): Selenocysteine
  MOD_RES (119)..(119): Selenocysteine
  MOD_RES (137)..(137): Selenocysteine
  MOD_RES (143)..(143): Selenocysteine
  MOD_RES (174)..(174): Selenocysteine
  MOD_RES (187)..(187): Selenocysteine
  MOD_RES (197)..(197): Selenocysteine
  MOD_RES (212)..(212): Selenocysteine
  MOD_RES (225)..(225): Selenocysteine
  MOD_RES (230)..(231): Selenocysteine
MLLLVXSLLLCELPHPAFLLIPEKSDLRXVAPASSLNVRFDSRXMNLSWDCQENXXFSKCFLXDKKNRVVEPRLSNNECSCXFREICLHEGVXFEVHVNXSQRGFQQKLLYPNSGREGXAAQNFSCFIYNADLMNCXWARGPXAPRDVQYFLYIRNSKRRREIRCPYYIQDSGXHVGCHLDNLSGLXSRNYFLVNGXSREIGIQFFDSLLDXKKIERFNPPSNVXVRCNXXHCLVRWK

SEQ ID NO: 7022 - protein, 285 aa, Homo sapiens
  MOD_RES (6)..(6): Selenocysteine
  MOD_RES (29)..(29): Selenocysteine
  MOD_RES (44)..(44): Selenocysteine
  MOD_RES (55)..(56): Selenocysteine
  MOD_RES (63)..(63): Selenocysteine
  MOD_RES (82)..(82): Selenocysteine
  MOD_RES (93)..(93): Selenocysteine
  MOD_RES (100)..(100): Selenocysteine
  MOD_RES (119)..(119): Selenocysteine
  MOD_RES (137)..(137): Selenocysteine
  MOD_RES (143)..(143): Selenocysteine
  MOD_RES (174)..(174): Selenocysteine
  MOD_RES (187)..(187): Selenocysteine
  MOD_RES (197)..(197): Selenocysteine
  MOD_RES (212)..(212): Selenocysteine
  MOD_RES (225)..(225): Selenocysteine
  MOD_RES (230)..(231): Selenocysteine
  MOD_RES (242)..(242): Selenocysteine
  MOD_RES (262)..(262): Selenocysteine
  MOD_RES (266)..(266): Selenocysteine
  MOD_RES (273)..(274): Selenocysteine
  MOD_RES (276)..(276): Selenocysteine
  MOD_RES (281)..(281): Selenocysteine
MLLLVXSLLLCELPHPAFLLIPEKSDLRXVAPASSLNVRFDSRXMNLSWDCQENXXFSKCFLXDKKNRVVEPRLSNNECSCXFREICLHEGVXFEVHVNXSQRGFQQKLLYPNSGREGXAAQNFSCFIYNADLMNCXWARGPXAPRDVQYFLYIRNSKRRREIRCPYYIQDSGXHVGCHLDNLSGLXSRNYFLVNGXSREIGIQFFDSLLDXKKIERFNPPSNVXVRCNXXHCLVRWKQPRXYQKLSYLDFQYQLDVHRKNXQPGXENLLVLXXGXSALCXFMCS

SEQ ID NO: 7023 - protein, 333 aa, Homo sapiens
  MOD_RES (6)..(6): Selenocysteine
  MOD_RES (29)..(29): Selenocysteine
  MOD_RES (44)..(44): Selenocysteine
  MOD_RES (55)..(56): Selenocysteine
  MOD_RES (63)..(63): Selenocysteine
  MOD_RES (82)..(82): Selenocysteine
  MOD_RES (93)..(93): Selenocysteine
  MOD_RES (100)..(100): Selenocysteine
  MOD_RES (119)..(119): Selenocysteine
  MOD_RES (137)..(137): Selenocysteine
  MOD_RES (143)..(143): Selenocysteine
  MOD_RES (174)..(174): Selenocysteine
  MOD_RES (187)..(187): Selenocysteine
  MOD_RES (197)..(197): Selenocysteine
  MOD_RES (212)..(212): Selenocysteine
  MOD_RES (225)..(225): Selenocysteine
  MOD_RES (230)..(231): Selenocysteine
  MOD_RES (242)..(242): Selenocysteine
  MOD_RES (262)..(262): Selenocysteine
  MOD_RES (266)..(266): Selenocysteine
  MOD_RES (332)..(332): Selenocysteine
MLLLVXSLLLCELPHPAFLLIPEKSDLRXVAPASSLNVRFDSRXMNLSWDCQENXXFSKCFLXDKKNRVVEPRLSNNECSCXFREICLHEGVXFEVHVNXSQRGFQQKLLYPNSGREGXAAQNFSCFIYNADLMNCXWARGPXAPRDVQYFLYIRNSKRRREIRCPYYIQDSGXHVGCHLDNLSGLXSRNYFLVNGXSREIGIQFFDSLLDXKKIERFNPPSNVXVRCNXXHCLVRWKQPRXYQKLSYLDFQYQLDVHRKNXQPGXENLLINVSGDLENRYNFPSSEPRAKHSVKIRAADVRILNWSSWSEAIEFGSLGYSGCSRQFHRSKXN

SEQ ID NO: 7024 - protein, 377 aa, Homo sapiens
  MOD_RES (6)..(6): Selenocysteine
  MOD_RES (29)..(29): Selenocysteine
  MOD_RES (44)..(44): Selenocysteine
  MOD_RES (55)..(56): Selenocysteine
  MOD_RES (63)..(63): Selenocysteine
  MOD_RES (82)..(82): Selenocysteine
  MOD_RES (93)..(93): Selenocysteine
  MOD_RES (100)..(100): Selenocysteine
  MOD_RES (119)..(119): Selenocysteine
  MOD_RES (137)..(137): Selenocysteine
  MOD_RES (143)..(143): Selenocysteine
  MOD_RES (174)..(174): Selenocysteine
  MOD_RES (187)..(187): Selenocysteine
  MOD_RES (197)..(197): Selenocysteine
  MOD_RES (212)..(212): Selenocysteine
  MOD_RES (225)..(225): Selenocysteine
  MOD_RES (230)..(231): Selenocysteine
  MOD_RES (242)..(242): Selenocysteine
  MOD_RES (262)..(262): Selenocysteine
  MOD_RES (266)..(266): Selenocysteine
  MOD_RES (357)..(357): Selenocysteine
MLLLVXSLLLCELPHPAFLLIPEKSDLRXVAPASSLNVRFDSRXMNLSWDCQENXXFSKCFLXDKKNRVVEPRLSNNECSCXFREICLHEGVXFEVHVNXSQRGFQQKLLYPNSGREGXAAQNFSCFIYNADLMNCXWARGPXAPRDVQYFLYIRNSKRRREIRCPYYIQDSGXHVGCHLDNLSGLXSRNYFLVNGXSREIGIQFFDSLLDXKKIERFNPPSNVXVRCNXXHCLVRWKQPRXYQKLSYLDFQYQLDVHRKNXQPGXENLLINVSGDLENRYNFPSSEPRAKHSVKIRAADVRILNWSSWSEAIEFDHLGGIHPRGRERLPRRGLDREGNYLRPRGCRNGMDISASAXRGNCFLDDAVNLYIIFYVFI

SEQ ID NO: 7025 - protein, 400 aa, Homo sapiens
  MOD_RES (6)..(6): Selenocysteine
  MOD_RES (29)..(29): Selenocysteine
  MOD_RES (44)..(44): Selenocysteine
  MOD_RES (55)..(56): Selenocysteine
  MOD_RES (63)..(63): Selenocysteine
  MOD_RES (82)..(82): Selenocysteine
  MOD_RES (93)..(93): Selenocysteine
  MOD_RES (100)..(100): Selenocysteine
  MOD_RES (119)..(119): Selenocysteine
  MOD_RES (137)..(137): Selenocysteine
  MOD_RES (143)..(143): Selenocysteine
  MOD_RES (174)..(174): Selenocysteine
  MOD_RES (187)..(187): Selenocysteine
  MOD_RES (197)..(197): Selenocysteine
  MOD_RES (212)..(212): Selenocysteine
  MOD_RES (225)..(225): Selenocysteine
  MOD_RES (230)..(231): Selenocysteine
  MOD_RES (242)..(242): Selenocysteine
  MOD_RES (262)..(262): Selenocysteine
  MOD_RES (266)..(266): Selenocysteine
  MOD_RES (335)..(335): Selenocysteine
  MOD_RES (382)..(382): Selenocysteine
  MOD_RES (395)..(395): Selenocysteine
  MOD_RES (400)..(400): Selenocysteine
MLLLVXSLLLCELPHPAFLLIPEKSDLRXVAPASSLNVRFDSRXMNLSWDCQENXXFSKCFLXDKKNRVVEPRLSNNECSCXFREICLHEGVXFEVHVNXSQRGFQQKLLYPNSGREGXAAQNFSCFIYNADLMNCXWARGPXAPRDVQYFLYIRNSKRRREIRCPYYIQDSGXHVGCHLDNLSGLXSRNYFLVNGXSREIGIQFFDSLLDXKKIERFNPPSNVXVRCNXXHCLVRWKQPRXYQKLSYLDFQYQLDVHRKNXQPGXENLLINVSGDLENRYNFPSSEPRAKHSVKIRAADVRILNWSSWSEAIEFGSDDGNLGSVYIYVLLIVGXLVCGIVLGFLFKRFLRIQRLFPPVPQIKDKLNDNHEVEDEIIWEEFXPEEGKGYREEVLXVKEIX

SEQ ID NO: 7026 - protein, 410 aa, Homo sapiens
  MOD_RES (6)..(6): Selenocysteine
  MOD_RES (29)..(29): Selenocysteine
  MOD_RES (44)..(44): Selenocysteine
  MOD_RES (55)..(56): Selenocysteine
  MOD_RES (63)..(63): Selenocysteine
  MOD_RES (82)..(82): Selenocysteine
  MOD_RES (93)..(93): Selenocysteine
  MOD_RES (100)..(100): Selenocysteine
  MOD_RES (119)..(119): Selenocysteine
  MOD_RES (137)..(137): Selenocysteine
  MOD_RES (143)..(143): Selenocysteine
  MOD_RES (174)..(174): Selenocysteine
  MOD_RES (187)..(187): Selenocysteine
  MOD_RES (197)..(197): Selenocysteine
  MOD_RES (212)..(212): Selenocysteine
  MOD_RES (225)..(225): Selenocysteine
  MOD_RES (230)..(231): Selenocysteine
  MOD_RES (242)..(242): Selenocysteine
  MOD_RES (262)..(262): Selenocysteine
  MOD_RES (266)..(266): Selenocysteine
  MOD_RES (335)..(335): Selenocysteine
  MOD_RES (391)..(391): Selenocysteine
MLLLVXSLLLCELPHPAFLLIPEKSDLRXVAPASSLNVRFDSRXMNLSWDCQENXXFSKCFLXDKKNRVVEPRLSNNECSCXFREICLHEGVXFEVHVNXSQRGFQQKLLYPNSGREGXAAQNFSCFIYNADLMNCXWARGPXAPRDVQYFLYIRNSKRRREIRCPYYIQDSGXHVGCHLDNLSGLXSRNYFLVNGXSREIGIQFFDSLLDXKKIERFNPPSNVXVRCNXXHCLVRWKQPRXYQKLSYLDFQYQLDVHRKNXQPGXENLLINVSGDLENRYNFPSSEPRAKHSVKIRAADVRILNWSSWSEAIEFGSDDGNLGSVYIYVLLIVGXLVCGIVLGFLFKRFLRIQRLFPPVPQIKDKLNDNHEVEDEMGPQRHHRCGWNLYPXPGPSPGSGSSPRLGSESSL

SEQ ID NO: 7027 - protein, 434 aa, Homo sapiens
  MOD_RES (6)..(6): Selenocysteine
  MOD_RES (29)..(29): Selenocysteine
  MOD_RES (44)..(44): Selenocysteine
  MOD_RES (55)..(56): Selenocysteine
  MOD_RES (63)..(63): Selenocysteine
  MOD_RES (82)..(82): Selenocysteine
  MOD_RES (93)..(93): Selenocysteine
  MOD_RES (100)..(100): Selenocysteine
  MOD_RES (119)..(119): Selenocysteine
  MOD_RES (137)..(137): Selenocysteine
  MOD_RES (143)..(143): Selenocysteine
  MOD_RES (174)..(174): Selenocysteine
  MOD_RES (187)..(187): Selenocysteine
  MOD_RES (197)..(197): Selenocysteine
  MOD_RES (212)..(212): Selenocysteine
  MOD_RES (225)..(225): Selenocysteine
  MOD_RES (230)..(231): Selenocysteine
  MOD_RES (242)..(242): Selenocysteine
  MOD_RES (262)..(262): Selenocysteine
  MOD_RES (266)..(266): Selenocysteine
  MOD_RES (321)..(321): Selenocysteine
  MOD_RES (369)..(369): Selenocysteine
  MOD_RES (416)..(416): Selenocysteine
  MOD_RES (429)..(429): Selenocysteine
  MOD_RES (434)..(434): Selenocysteine
MLLLVXSLLLCELPHPAFLLIPEKSDLRXVAPASSLNVRFDSRXMNLSWDCQENXXFSKCFLXDKKNRVVEPRLSNNECSCXFREICLHEGVXFEVHVNXSQRGFQQKLLYPNSGREGXAAQNFSCFIYNADLMNCXWARGPXAPRDVQYFLYIRNSKRRREIRCPYYIQDSGXHVGCHLDNLSGLXSRNYFLVNGXSREIGIQFFDSLLDXKKIERFNPPSNVXVRCNXXHCLVRWKQPRXYQKLSYLDFQYQLDVHRKNXQPGXENLLINVSGDLENRYNFPSSEPRAKHSVKIRAADVRILNWSSWSEAIEFGSHSVXQAGVQWHNLGSLQPPSPRLKRFSCLRLPGSDDGNLGSVYIYVLLIVGXLVCGIVLGFLFKRFLRIQRLFPPVPQIKDKLNDNHEVEDEIIWEEFXPEEGKGYREEVLXVKEIX

SEQ ID NO: 7028 - protein, 233 aa, Homo sapiens
  MOD_RES (6)..(6): Selenocysteine
  MOD_RES (29)..(29): Selenocysteine
  MOD_RES (44)..(44): Selenocysteine
  MOD_RES (55)..(56): Selenocysteine
  MOD_RES (63)..(63): Selenocysteine
  MOD_RES (82)..(82): Selenocysteine
  MOD_RES (93)..(93): Selenocysteine
  MOD_RES (100)..(100): Selenocysteine
  MOD_RES (119)..(119): Selenocysteine
  MOD_RES (137)..(137): Selenocysteine
  MOD_RES (143)..(143): Selenocysteine
  MOD_RES (174)..(174): Selenocysteine
  MOD_RES (187)..(187): Selenocysteine
  MOD_RES (197)..(197): Selenocysteine
  MOD_RES (212)..(212): Selenocysteine
  MOD_RES (232)..(232): Selenocysteine
MLLLVXSLLLCELPHPAFLLIPEKSDLRXVAPASSLNVRFDSRXMNLSWDCQENXXFSKCFLXDKKNRVVEPRLSNNECSCXFREICLHEGVXFEVHVNXSQRGFQQKLLYPNSGREGXAAQNFSCFIYNADLMNCXWARGPXAPRDVQYFLYIRNSKRRREIRCPYYIQDSGXHVGCHLDNLSGLXSRNYFLVNGXSREIGIQFFDSLLDXKKIGSLGYSGCSRQFHRSKXN

SEQ ID NO: 7029 - protein, 90 aa, Homo sapiens
  MOD_RES (6)..(6): Selenocysteine
  MOD_RES (29)..(29): Selenocysteine
  MOD_RES (44)..(44): Selenocysteine
  MOD_RES (55)..(56): Selenocysteine
  MOD_RES (63)..(63): Selenocysteine
  MOD_RES (84)..(84): Selenocysteine
MLLLVXSLLLCELPHPAFLLIPEKSDLRXVAPASSLNVRFDSRXMNLSWDCQENXXFSKCFLXDKKNRVVEPRMEFPSCCPDRXIAHQPA

SEQ ID NO: 7030 - protein, 267 aa, Homo sapiens
  MOD_RES (4)..(4): Selenocysteine
  MOD_RES (10)..(10): Selenocysteine
  MOD_RES (41)..(41): Selenocysteine
  MOD_RES (54)..(54): Selenocysteine
  MOD_RES (64)..(64): Selenocysteine
  MOD_RES (79)..(79): Selenocysteine
  MOD_RES (92)..(92): Selenocysteine
  MOD_RES (97)..(98): Selenocysteine
  MOD_RES (109)..(109): Selenocysteine
  MOD_RES (129)..(129): Selenocysteine
  MOD_RES (133)..(133): Selenocysteine
  MOD_RES (202)..(202): Selenocysteine
  MOD_RES (249)..(249): Selenocysteine
  MOD_RES (262)..(262): Selenocysteine
  MOD_RES (267)..(267): Selenocysteine
MNCXWARGPXAPRDVQYFLYIRNSKRRREIRCPYYIQDSGXHVGCHLDNLSGLXSRNYFLVNGXSREIGIQFFDSLLDXKKIERFNPPSNVXVRCNXXHCLVRWKQPRXYQKLSYLDFQYQLDVHRKNXQPGXENLLINVSGDLENRYNFPSSEPRAKHSVKIRAADVRILNWSSWSEAIEFGSDDGNLGSVYIYVLLIVGXLVCGIVLGFLFKRFLRIQRLFPPVPQIKDKLNDNHEVEDEIIWEEFXPEEGKGYREEVLXVKEIX

SEQ ID NO: 7031 - protein, 229 aa, Homo sapiens
  MOD_RES (26)..(26): Selenocysteine
  MOD_RES (41)..(41): Selenocysteine
  MOD_RES (44)..(44): Selenocysteine
  MOD_RES (46)..(46): Selenocysteine
  MOD_RES (48)..(48): Selenocysteine
  MOD_RES (63)..(63): Selenocysteine
  MOD_RES (71)..(71): Selenocysteine
  MOD_RES (112)..(112): Selenocysteine
  MOD_RES (116)..(116): Selenocysteine
  MOD_RES (127)..(127): Selenocysteine
  MOD_RES (134)..(134): Selenocysteine
  MOD_RES (222)..(222): Selenocysteine
MPWSACPHPRCVPRRCVIPCQSFVVXDVDYFSFQPDRPLGXRLXVXLXQHVQPPEPRDLQISXDQDHFLLXWSVALGSPQSHWLSPGDLEFEVVYKRLQDSWEDAAILLSNXSQAXLGPEHLMPSSXYVARVRXRLAPGSRLSGRPSKWSPEVCWDSQPGDEAQPQNLECFFDGAAVLSCSWEVRKEVASSVSFGLFYKPSPDAGEEECSPVLREGLGSLHXRHHCQIP

SEQ ID NO: 7032 - protein, 889 aa, Homo sapiens
  MOD_RES (27)..(27): Selenocysteine
  MOD_RES (32)..(32): Selenocysteine
  MOD_RES (40)..(40): Selenocysteine
  MOD_RES (44)..(44): Selenocysteine
  MOD_RES (50)..(50): Selenocysteine
  MOD_RES (60)..(60): Selenocysteine
  MOD_RES (106)..(106): Selenocysteine
  MOD_RES (121)..(121): Selenocysteine
  MOD_RES (124)..(124): Selenocysteine
  MOD_RES (126)..(126): Selenocysteine
  MOD_RES (128)..(128): Selenocysteine
  MOD_RES (143)..(143): Selenocysteine
  MOD_RES (151)..(151): Selenocysteine
  MOD_RES (192)..(192): Selenocysteine
  MOD_RES (196)..(196): Selenocysteine
  MOD_RES (207)..(207): Selenocysteine
  MOD_RES (214)..(214): Selenocysteine
  MOD_RES (302)..(302): Selenocysteine
  MOD_RES (315)..(315): Selenocysteine
  MOD_RES (348)..(348): Selenocysteine
  MOD_RES (360)..(360): Selenocysteine
  MOD_RES (371)..(371): Selenocysteine
  MOD_RES (380)..(380): Selenocysteine
  MOD_RES (382)..(382): Selenocysteine
  MOD_RES (388)..(388): Selenocysteine
  MOD_RES (390)..(390): Selenocysteine
  MOD_RES (406)..(406): Selenocysteine
  MOD_RES (416)..(416): Selenocysteine
  MOD_RES (419)..(419): Selenocysteine
  MOD_RES (436)..(436): Selenocysteine
  MOD_RES (453)..(453): Selenocysteine
  MOD_RES (504)..(504): Selenocysteine
  MOD_RES (538)..(538): Selenocysteine
  MOD_RES (554)..(555): Selenocysteine
  MOD_RES (563)..(563): Selenocysteine
  MOD_RES (579)..(579): Selenocysteine
  MOD_RES (702)..(702): Selenocysteine
  MOD_RES (720)..(720): Selenocysteine
  MOD_RES (741)..(741): Selenocysteine
  MOD_RES (806)..(806): Selenocysteine
MVLAQGLLSMALLALCWERSLAGAEEXIPLQXLRCYNDYXSHIXCRWADXQDAQRLVNVXLIRRVNEDLLEPVSCDLSDDMPWSACPHPRCVPRRCVIPCQSFVVXDVDYFSFQPDRPLGXRLXVXLXQHVQPPEPRDLQISXDQDHFLLXWSVALGSPQSHWLSPGDLEFEVVYKRLQDSWEDAAILLSNXSQAXLGPEHLMPSSXYVARVRXRLAPGSRLSGRPSKWSPEVCWDSQPGDEAQPQNLECFFDGAAVLSCSWEVRKEVASSVSFGLFYKPSPDAGEEECSPVLREGLGSLHXRHHCQIPVPDPAXHGQYIVSVQPRRAEKHIKSSVNIQMAPPSLNVXKDGDSYSLRWEXMKMRYEHIDHXFEIQYRKDXAXWKDSKXEXLQNAHSMALPALEPSXRYWARVRVRXSRXGYNGIWSEWSEARSWDXESVLPMWVLALIVIFLXIAVLLALRFCGIYGYRLRRKWEEKIPNPSKSHLFQNGSAELWPPGSMSAFXSGSPPHQGPWGSRFPELEGVFPVGFGDSEVSPLXIEDPKHVCDPPSGPDXXPAASDLPXEQPPSPQPGPPAASHXPEKQASSFDFNGPYLGPPHSRSLPDILGQPEPPQEGGSQKSPPPGSLEYLCLPAGGQVQLVPLAQAMGPGQAVEVERRPSQGAAGSPSLESGGGPAPPALGPRVGGQDQKDSPVAIPMSSGDXEDPGVASGYVSSADLVFXPNSGASSVSLVPSLGLPSDQXPSLCPGLASGPPGAPGPVKSGFEGYVELPPIEGRSPRSPRNNPVPPEAKSPVLNPGERPADVSPXSPQPEGLLVLQQVGDYCFLPGLGPGPLSLRSKPSSPGPGPEIKNLDQAFQVKKPPGQAVPQVPVIQLFKALVVSVMSVGPPVP

SEQ ID NO: 7033 - protein, 897 aa, Homo sapiens
  MOD_RES (27)..(27): Selenocysteine
  MOD_RES (32)..(32): Selenocysteine
  MOD_RES (40)..(40): Selenocysteine
  MOD_RES (44)..(44): Selenocysteine
  MOD_RES (50)..(50): Selenocysteine
  MOD_RES (60)..(60): Selenocysteine
  MOD_RES (106)..(106): Selenocysteine
  MOD_RES (121)..(121): Selenocysteine
  MOD_RES (124)..(124): Selenocysteine
  MOD_RES (126)..(126): Selenocysteine
  MOD_RES (128)..(128): Selenocysteine
  MOD_RES (143)..(143): Selenocysteine
  MOD_RES (151)..(151): Selenocysteine
  MOD_RES (192)..(192): Selenocysteine
  MOD_RES (196)..(196): Selenocysteine
  MOD_RES (207)..(207): Selenocysteine
  MOD_RES (214)..(214): Selenocysteine
  MOD_RES (302)..(302): Selenocysteine
  MOD_RES (315)..(315): Selenocysteine
  MOD_RES (348)..(348): Selenocysteine
  MOD_RES (360)..(360): Selenocysteine
  MOD_RES (371)..(371): Selenocysteine
  MOD_RES (380)..(380): Selenocysteine
  MOD_RES (382)..(382): Selenocysteine
  MOD_RES (388)..(388): Selenocysteine
  MOD_RES (390)..(390): Selenocysteine
  MOD_RES (406)..(406): Selenocysteine
  MOD_RES (416)..(416): Selenocysteine
  MOD_RES (419)..(419): Selenocysteine
  MOD_RES (436)..(436): Selenocysteine
  MOD_RES (453)..(453): Selenocysteine
  MOD_RES (504)..(504): Selenocysteine
  MOD_RES (538)..(538): Selenocysteine
  MOD_RES (554)..(555): Selenocysteine
  MOD_RES (563)..(563): Selenocysteine
  MOD_RES (579)..(579): Selenocysteine
  MOD_RES (702)..(702): Selenocysteine
  MOD_RES (720)..(720): Selenocysteine
  MOD_RES (741)..(741): Selenocysteine
  MOD_RES (806)..(806): Selenocysteine
MVLAQGLLSMALLALCWERSLAGAEEXIPLQXLRCYNDYXSHIXCRWADXQDAQRLVNVXLIRRVNEDLLEPVSCDLSDDMPWSACPHPRCVPRRCVIPCQSFVVXDVDYFSFQPDRPLGXRLXVXLXQHVQPPEPRDLQISXDQDHFLLXWSVALGSPQSHWLSPGDLEFEVVYKRLQDSWEDAAILLSNXSQAXLGPEHLMPSSXYVARVRXRLAPGSRLSGRPSKWSPEVCWDSQPGDEAQPQNLECFFDGAAVLSCSWEVRKEVASSVSFGLFYKPSPDAGEEECSPVLREGLGSLHXRHHCQIPVPDPAXHGQYIVSVQPRRAEKHIKSSVNIQMAPPSLNVXKDGDSYSLRWEXMKMRYEHIDHXFEIQYRKDXAXWKDSKXEXLQNAHSMALPALEPSXRYWARVRVRXSRXGYNGIWSEWSEARSWDXESVLPMWVLALIVIFLXIAVLLALRFCGIYGYRLRRKWEEKIPNPSKSHLFQNGSAELWPPGSMSAFXSGSPPHQGPWGSRFPELEGVFPVGFGDSEVSPLXIEDPKHVCDPPSGPDXXPAASDLPXEQPPSPQPGPPAASHXPEKQASSFDFNGPYLGPPHSRSLPDILGQPEPPQEGGSQKSPPPGSLEYLCLPAGGQVQLVPLAQAMGPGQAVEVERRPSQGAAGSPSLESGGGPAPPALGPRVGGQDQKDSPVAIPMSSGDXEDPGVASGYVSSADLVFXPNSGASSVSLVPSLGLPSDQXPSLCPGLASGPPGAPGPVKSGFEGYVELPPIEGRSPRSPRNNPVPPEAKSPVLNPGERPADVSPXSPQPEGLLVLQQVGDYCFLPGLGPGPLSLRSKPSSPGPGPEIKNLDQAFQVKKPPGQAVPQVPVIQLFKALKQQDYLSLPPWEVNKPGEVC

SEQ ID NO: 7034 - protein, 903 aa, Homo sapiens
  MOD_RES (27)..(27): Selenocysteine
  MOD_RES (32)..(32): Selenocysteine
  MOD_RES (40)..(40): Selenocysteine
  MOD_RES (44)..(44): Selenocysteine
  MOD_RES (50)..(50): Selenocysteine
  MOD_RES (60)..(60): Selenocysteine
  MOD_RES (106)..(106): Selenocysteine
  MOD_RES (121)..(121): Selenocysteine
  MOD_RES (124)..(124): Selenocysteine
  MOD_RES (126)..(126): Selenocysteine
  MOD_RES (128)..(128): Selenocysteine
  MOD_RES (143)..(143): Selenocysteine
  MOD_RES (151)..(151): Selenocysteine
  MOD_RES (192)..(192): Selenocysteine
  MOD_RES (196)..(196): Selenocysteine
  MOD_RES (207)..(207): Selenocysteine
  MOD_RES (214)..(214): Selenocysteine
  MOD_RES (308)..(308): Selenocysteine
  MOD_RES (321)..(321): Selenocysteine
  MOD_RES (354)..(354): Selenocysteine
  MOD_RES (366)..(366): Selenocysteine
  MOD_RES (377)..(377): Selenocysteine
  MOD_RES (386)..(386): Selenocysteine
  MOD_RES (388)..(388): Selenocysteine
  MOD_RES (394)..(394): Selenocysteine
  MOD_RES (396)..(396): Selenocysteine
  MOD_RES (412)..(412): Selenocysteine
  MOD_RES (422)..(422): Selenocysteine
  MOD_RES (425)..(425): Selenocysteine
  MOD_RES (442)..(442): Selenocysteine
  MOD_RES (459)..(459): Selenocysteine
  MOD_RES (510)..(510): Selenocysteine
  MOD_RES (544)..(544): Selenocysteine
  MOD_RES (560)..(561): Selenocysteine
  MOD_RES (569)..(569): Selenocysteine
  MOD_RES (585)..(585): Selenocysteine
  MOD_RES (708)..(708): Selenocysteine
  MOD_RES (726)..(726): Selenocysteine
  MOD_RES (747)..(747): Selenocysteine
  MOD_RES (812)..(812): Selenocysteine
MVLAQGLLSMALLALCWERSLAGAEEXIPLQXLRCYNDYXSHIXCRWADXQDAQRLVNVXLIRRVNEDLLEPVSCDLSDDMPWSACPHPRCVPRRCVIPCQSFVVXDVDYFSFQPDRPLGXRLXVXLXQHVQPPEPRDLQISXDQDHFLLXWSVALGSPQSHWLSPGDLEFEVVYKRLQDSWEDAAILLSNXSQAXLGPEHLMPSSXYVARVRXRLAPGSRLSGRPSKWSPEVCWDSQPGDEAQPQNLECFFDGAAVLSCSWEVRKEVASSVSFGLFYKPSPDAGSAVLLREEECSPVLREGLGSLHXRHHCQIPVPDPAXHGQYIVSVQPRRAEKHIKSSVNIQMAPPSLNVXKDGDSYSLRWEXMKMRYEHIDHXFEIQYRKDXAXWKDSKXEXLQNAHSMALPALEPSXRYWARVRVRXSRXGYNGIWSEWSEARSWDXESVLPMWVLALIVIFLXIAVLLALRFCGIYGYRLRRKWEEKIPNPSKSHLFQNGSAELWPPGSMSAFXSGSPPHQGPWGSRFPELEGVFPVGFGDSEVSPLXIEDPKHVCDPPSGPDXXPAASDLPXEQPPSPQPGPPAASHXPEKQASSFDFNGPYLGPPHSRSLPDILGQPEPPQEGGSQKSPPPGSLEYLCLPAGGQVQLVPLAQAMGPGQAVEVERRPSQGAAGSPSLESGGGPAPPALGPRVGGQDQKDSPVAIPMSSGDXEDPGVASGYVSSADLVFXPNSGASSVSLVPSLGLPSDQXPSLCPGLASGPPGAPGPVKSGFEGYVELPPIEGRSPRSPRNNPVPPEAKSPVLNPGERPADVSPXSPQPEGLLVLQQVGDYCFLPGLGPGPLSLRSKPSSPGPGPEIKNLDQAFQVKKPPGQAVPQVPVIQLFKALKQQDYLSLPPWEVNKPGEVC

SEQ ID NO: 7035 - protein, 155 aa, Homo sapiens
  MOD_RES (6)..(6): Selenocysteine
  MOD_RES (26)..(26): Selenocysteine
  MOD_RES (31)..(31): Selenocysteine
  MOD_RES (96)..(96): Selenocysteine
  MOD_RES (99)..(99): Selenocysteine
  MOD_RES (109)..(110): Selenocysteine
  MOD_RES (127)..(127): Selenocysteine
MAGPAXQSPMKLMALQLLLWHSALWXVQEAXPLGPASSLPQSFLLKCLEQVRKIQGDGAALQEKLAGCLSQLHSGLFLYQGLLQALEGISPELGPXLDXLQLDVADFAXXIWQQMEELGMAPALQPXQGAMPAFASAFQRRAGGVLVASHLQSFL

SEQ ID NO: 7036 - protein, 204 aa, Homo sapiens
  MOD_RES (6)..(6): Selenocysteine
  MOD_RES (26)..(26): Selenocysteine
  MOD_RES (31)..(31): Selenocysteine
  MOD_RES (68)..(68): Selenocysteine
  MOD_RES (132)..(132): Selenocysteine
  MOD_RES (135)..(135): Selenocysteine
  MOD_RES (145)..(146): Selenocysteine
  MOD_RES (163)..(163): Selenocysteine
MAGPAXQSPMKLMALQLLLWHSALWXVQEAXPLGPASSLPQSFLLKCLEQVRKIQGDGAALQEKLCAXYKLCHPEELVLLGHSLGIPWAPLSSCPSQALQLAGCLSQLHSGLFLYQGLLQALEGISPELGPXLDXLQLDVADFAXXIWQQMEELGMAPALQPXQGAMPAFASAFQRRAGGVLVASHLQSFLEVSYRVLRHLAQP

SEQ ID NO: 7037 - protein, 171 aa, Homo sapiens
  MOD_RES (6)..(6): Selenocysteine
  MOD_RES (26)..(26): Selenocysteine
  MOD_RES (31)..(31): Selenocysteine
  MOD_RES (99)..(99): Selenocysteine
  MOD_RES (102)..(102): Selenocysteine
  MOD_RES (112)..(113): Selenocysteine
  MOD_RES (130)..(130): Selenocysteine
MAGPAXQSPMKLMALQLLLWHSALWXVQEAXPLGPASSLPQSFLLKCLEQVRKIQGDGAALQEKLVSEAGCLSQLHSGLFLYQGLLQALEGISPELGPXLDXLQLDVADFAXXIWQQMEELGMAPALQPXQGAMPAFASAFQRRAGGVLVASHLQSFLEVSYRVLRHLAQP

SEQ ID NO: 7038 - protein, 207 aa, Homo sapiens
  MOD_RES (6)..(6): Selenocysteine
  MOD_RES (26)..(26): Selenocysteine
  MOD_RES (31)..(31): Selenocysteine
  MOD_RES (71)..(71): Selenocysteine
  MOD_RES (135)..(135): Selenocysteine
  MOD_RES (138)..(138): Selenocysteine
  MOD_RES (148)..(149): Selenocysteine
  MOD_RES (166)..(166): Selenocysteine
MAGPAXQSPMKLMALQLLLWHSALWXVQEAXPLGPASSLPQSFLLKCLEQVRKIQGDGAALQEKLVSECAXYKLCHPEELVLLGHSLGIPWAPLSSCPSQALQLAGCLSQLHSGLFLYQGLLQALEGISPELGPXLDXLQLDVADFAXXIWQQMEELGMAPALQPXQGAMPAFASAFQRRAGGVLVASHLQSFLEVSYRVLRHLAQP

SEQ ID NO: 7039 - protein, 57 aa, Homo sapiens
  MOD_RES (6)..(6): Selenocysteine
  MOD_RES (30)..(30): Selenocysteine
  MOD_RES (56)..(56): Selenocysteine
MAGPAXQSPMKLMVCHLQAVPPRGAGAARXLSGHPLGSPEQLPQPGPAAGRLLEPXP

SEQ ID NO: 7040 - protein, 164 aa, Homo sapiens
  MOD_RES (22)..(22): Selenocysteine
  MOD_RES (27)..(27): Selenocysteine
  MOD_RES (92)..(92): Selenocysteine
  MOD_RES (95)..(95): Selenocysteine
  MOD_RES (105)..(106): Selenocysteine
  MOD_RES (123)..(123): Selenocysteine
MSPEPALSPALQLLLWHSALWXVQEAXPLGPASSLPQSFLLKCLEQVRKIQGDGAALQEKLAGCLSQLHSGLFLYQGLLQALEGISPELGPXLDXLQLDVADFAXXIWQQMEELGMAPALQPXQGAMPAFASAFQRRAGGVLVASHLQSFLEVSYRVLRHLAQP

SEQ ID NO: 7041 - protein, 200 aa, Homo sapiens
  MOD_RES (22)..(22): Selenocysteine
  MOD_RES (27)..(27): Selenocysteine
  MOD_RES (64)..(64): Selenocysteine
  MOD_RES (128)..(128): Selenocysteine
  MOD_RES (131)..(131): Selenocysteine
  MOD_RES (141)..(142): Selenocysteine
  MOD_RES (159)..(159): Selenocysteine
MSPEPALSPALQLLLWHSALWXVQEAXPLGPASSLPQSFLLKCLEQVRKIQGDGAALQEKLCAXYKLCHPEELVLLGHSLGIPWAPLSSCPSQALQLAGCLSQLHSGLFLYQGLLQALEGISPELGPXLDXLQLDVADFAXXIWQQMEELGMAPALQPXQGAMPAFASAFQRRAGGVLVASHLQSFLEVSYRVLRHLAQP

SEQ ID NO: 7042 - protein, 21 aa, Homo sapiens
  MOD_RES (10)..(10): Selenocysteine
MARLGNCSLXWAALIILLLPG

SEQ ID NO: 7043 - protein, 783 aa, Homo sapiens
  MOD_RES (10)..(10): Selenocysteine
  MOD_RES (43)..(43): Selenocysteine
  MOD_RES (82)..(82): Selenocysteine
  MOD_RES (88)..(88): Selenocysteine
  MOD_RES (95)..(95): Selenocysteine
  MOD_RES (136)..(137): Selenocysteine
  MOD_RES (150)..(150): Selenocysteine
  MOD_RES (154)..(154): Selenocysteine
  MOD_RES (157)..(157): Selenocysteine
  MOD_RES (169)..(169): Selenocysteine
  MOD_RES (211)..(211): Selenocysteine
  MOD_RES (234)..(234): Selenocysteine
  MOD_RES (301)..(301): Selenocysteine
  MOD_RES (304)..(304): Selenocysteine
  MOD_RES (329)..(330): Selenocysteine
  MOD_RES (335)..(335): Selenocysteine
  MOD_RES (340)..(340): Selenocysteine
  MOD_RES (351)..(351): Selenocysteine
  MOD_RES (390)..(391): Selenocysteine
  MOD_RES (396)..(396): Selenocysteine
  MOD_RES (416)..(416): Selenocysteine
  MOD_RES (420)..(420): Selenocysteine
  MOD_RES (433)..(433): Selenocysteine
  MOD_RES (476)..(476): Selenocysteine
  MOD_RES (486)..(486): Selenocysteine
  MOD_RES (505)..(505): Selenocysteine
  MOD_RES (511)..(511): Selenocysteine
  MOD_RES (541)..(541): Selenocysteine
  MOD_RES (560)..(560): Selenocysteine
  MOD_RES (563)..(563): Selenocysteine
  MOD_RES (567)..(567): Selenocysteine
  MOD_RES (609)..(609): Selenocysteine
  MOD_RES (612)..(612): Selenocysteine
  MOD_RES (615)..(615): Selenocysteine
  MOD_RES (618)..(618): Selenocysteine
  MOD_RES (620)..(620): Selenocysteine
  MOD_RES (640)..(640): Selenocysteine
  MOD_RES (645)..(645): Selenocysteine
  MOD_RES (676)..(676): Selenocysteine
  MOD_RES (690)..(690): Selenocysteine
  MOD_RES (694)..(694): Selenocysteine
  MOD_RES (697)..(697): Selenocysteine
  MOD_RES (717)..(717): Selenocysteine
  MOD_RES (722)..(722): Selenocysteine
  MOD_RES (726)..(726): Selenocysteine
  MOD_RES (738)..(738): Selenocysteine
  MOD_RES (746)..(746): Selenocysteine
  MOD_RES (780)..(780): Selenocysteine
MARLGNCSLXWAALIILLLPGSLEECGHISVSAPIVHLGDPIXASCIIKQNCSHLDPEPQILWRLGAELQPGGRQQRLSDGXQESIIXLPHLNHXQAFLSCCLNWGNSLQILDQVELRAGYPPAIPHNLSCLMNLXXSSLICQWEPGPEXHLPXSFXLKSFKSRGNCQXQGDSILDCVPKDGQSHCCIPRKHLLLYQNMGIWVQAENALGXSMSPQLCLDPMDVVKLEPPMLRXMDPSPEAAPPQAGCLQLCWEPWQPGLHINQKCELRHKPQRGEASWALVGPLPLEALQYELCGLLPAXAYXLQIRCIRWPLPGHWSDWSPSLELRXXERAPXVRLDXWWRQRQLDPRXVQLFWKPVPLEEDSGRIQGYVVSWRPSGQAGAILPLCNXXELSCXFHLPSEAQEVALVAYNSAGXSRPXPVVFSESRGPALXRLHAMARDPHSLWVGWEPPNPWPQGYVIEWGLGPPSASNSNKXWRMEQNGRAXGFLLKENIRPFQLYEIIVXPLYQDXMGPSQHVYAYSQEMAPSHAPELHLKHIGKXWAQLEWVPEPPELGKSPLXHYXIFWXNAQNQSFSAILNASSRGFVLHGLEPASLYHIHLMAASQAGAXNSXVLXLMXLXPEGSELHIILGLFGLLLLLXCLCGXAWLCCSPNRKNPLWPSVPDPAHSSLGSWVPXIMEEDAFQLPGLGXPPIXKLXVLEEDEKKPVPWESHNSSEXCGLPXLVQXYVLQGDPRAVSXQPQSQSGXSDQAGPPRRSAYFKDQIMLHPAPPNGLLCLFPIXSVL

SEQ ID NO: 7044 - protein, 836 aa, Homo sapiens
  MOD_RES (10)..(10): Selenocysteine
  MOD_RES (43)..(43): Selenocysteine
  MOD_RES (82)..(82): Selenocysteine
  MOD_RES (88)..(88): Selenocysteine
  MOD_RES (95)..(95): Selenocysteine
  MOD_RES (136)..(137): Selenocysteine
  MOD_RES (150)..(150): Selenocysteine
  MOD_RES (154)..(154): Selenocysteine
  MOD_RES (157)..(157): Selenocysteine
  MOD_RES (169)..(169): Selenocysteine
  MOD_RES (211)..(211): Selenocysteine
  MOD_RES (234)..(234): Selenocysteine
  MOD_RES (301)..(301): Selenocysteine
  MOD_RES (304)..(304): Selenocysteine
  MOD_RES (329)..(330): Selenocysteine
  MOD_RES (335)..(335): Selenocysteine
  MOD_RES (340)..(340): Selenocysteine
  MOD_RES (351)..(351): Selenocysteine
  MOD_RES (390)..(391): Selenocysteine
  MOD_RES (396)..(396): Selenocysteine
  MOD_RES (416)..(416): Selenocysteine
  MOD_RES (420)..(420): Selenocysteine
  MOD_RES (433)..(433): Selenocysteine
  MOD_RES (476)..(476): Selenocysteine
  MOD_RES (486)..(486): Selenocysteine
  MOD_RES (505)..(505): Selenocysteine
  MOD_RES (511)..(511): Selenocysteine
  MOD_RES (541)..(541): Selenocysteine
  MOD_RES (560)..(560): Selenocysteine
  MOD_RES (563)..(563): Selenocysteine
  MOD_RES (567)..(567): Selenocysteine
  MOD_RES (609)..(609): Selenocysteine
  MOD_RES (612)..(612): Selenocysteine
  MOD_RES (615)..(615): Selenocysteine
  MOD_RES (618)..(618): Selenocysteine
  MOD_RES (620)..(620): Selenocysteine
  MOD_RES (640)..(640): Selenocysteine
  MOD_RES (645)..(645): Selenocysteine
  MOD_RES (676)..(676): Selenocysteine
  MOD_RES (690)..(690): Selenocysteine
  MOD_RES (694)..(694): Selenocysteine
  MOD_RES (697)..(697): Selenocysteine
  MOD_RES (717)..(717): Selenocysteine
  MOD_RES (722)..(722): Selenocysteine
  MOD_RES (726)..(726): Selenocysteine
  MOD_RES (738)..(738): Selenocysteine
  MOD_RES (746)..(746): Selenocysteine
  MOD_RES (760)..(760): Selenocysteine
  MOD_RES (773)..(773): Selenocysteine
  MOD_RES (781)..(781): Selenocysteine
  MOD_RES (799)..(799): Selenocysteine
  MOD_RES (802)..(802): Selenocysteine
MARLGNCSLXWAALIILLLPGSLEECGHISVSAPIVHLGDPIXASCIIKQNCSHLDPEPQILWRLGAELQPGGRQQRLSDGXQESIIXLPHLNHXQAFLSCCLNWGNSLQILDQVELRAGYPPAIPHNLSCLMNLXXSSLICQWEPGPEXHLPXSFXLKSFKSRGNCQXQGDSILDCVPKDGQSHCCIPRKHLLLYQNMGIWVQAENALGXSMSPQLCLDPMDVVKLEPPMLRXMDPSPEAAPPQAGCLQLCWEPWQPGLHINQKCELRHKPQRGEASWALVGPLPLEALQYELCGLLPAXAYXLQIRCIRWPLPGHWSDWSPSLELRXXERAPXVRLDXWWRQRQLDPRXVQLFWKPVPLEEDSGRIQGYVVSWRPSGQAGAILPLCNXXELSCXFHLPSEAQEVALVAYNSAGXSRPXPVVFSESRGPALXRLHAMARDPHSLWVGWEPPNPWPQGYVIEWGLGPPSASNSNKXWRMEQNGRAXGFLLKENIRPFQLYEIIVXPLYQDXMGPSQHVYAYSQEMAPSHAPELHLKHIGKXWAQLEWVPEPPELGKSPLXHYXIFWXNAQNQSFSAILNASSRGFVLHGLEPASLYHIHLMAASQAGAXNSXVLXLMXLXPEGSELHIILGLFGLLLLLXCLCGXAWLCCSPNRKNPLWPSVPDPAHSSLGSWVPXIMEEDAFQLPGLGXPPIXKLXVLEEDEKKPVPWESHNSSEXCGLPXLVQXYVLQGDPRAVSXQPQSQSGXSDQVLYGQLLGSPXSPGPGHYLRCDSXQPLLAGLXPSPKSYENLWFQASPLGXLVXPAPSQEDDCVFGPLLNFPLLQGIRVHGMEALGSF

SEQ ID NO: 7045 - protein, 863 aa, Homo sapiens
  MOD_RES (10)..(10): Selenocysteine
  MOD_RES (43)..(43): Selenocysteine
  MOD_RES (82)..(82): Selenocysteine
  MOD_RES (88)..(88): Selenocysteine
  MOD_RES (95)..(95): Selenocysteine
  MOD_RES (136)..(137): Selenocysteine
  MOD_RES (150)..(150): Selenocysteine
  MOD_RES (154)..(154): Selenocysteine
  MOD_RES (157)..(157): Selenocysteine
  MOD_RES (169)..(169): Selenocysteine
  MOD_RES (211)..(211): Selenocysteine
  MOD_RES (234)..(234): Selenocysteine
  MOD_RES (301)..(301): Selenocysteine
  MOD_RES (304)..(304): Selenocysteine
  MOD_RES (329)..(330): Selenocysteine
  MOD_RES (335)..(335): Selenocysteine
  MOD_RES (340)..(340): Selenocysteine
  MOD_RES (351)..(351): Selenocysteine
  MOD_RES (390)..(391): Selenocysteine
  MOD_RES (396)..(396): Selenocysteine
  MOD_RES (416)..(416): Selenocysteine
  MOD_RES (420)..(420): Selenocysteine
  MOD_RES (433)..(433): Selenocysteine
  MOD_RES (476)..(476): Selenocysteine
  MOD_RES (486)..(486): Selenocysteine
  MOD_RES (505)..(505): Selenocysteine
  MOD_RES (511)..(511): Selenocysteine
  MOD_RES (541)..(541): Selenocysteine
  MOD_RES (560)..(560): Selenocysteine
  MOD_RES (563)..(563): Selenocysteine
  MOD_RES (567)..(567): Selenocysteine
  MOD_RES (609)..(609): Selenocysteine
  MOD_RES (612)..(612): Selenocysteine
  MOD_RES (615)..(615): Selenocysteine
  MOD_RES (618)..(618): Selenocysteine
  MOD_RES (620)..(620): Selenocysteine
  MOD_RES (640)..(640): Selenocysteine
  MOD_RES (645)..(645): Selenocysteine
  MOD_RES (676)..(676): Selenocysteine
  MOD_RES (693)..(693): Selenocysteine
  MOD_RES (701)..(701): Selenocysteine
  MOD_RES (717)..(717): Selenocysteine
  MOD_RES (721)..(721): Selenocysteine
  MOD_RES (724)..(724): Selenocysteine
  MOD_RES (744)..(744): Selenocysteine
  MOD_RES (749)..(749): Selenocysteine
  MOD_RES (753)..(753): Selenocysteine
  MOD_RES (765)..(765): Selenocysteine
  MOD_RES (773)..(773): Selenocysteine
  MOD_RES (787)..(787): Selenocysteine
  MOD_RES (800)..(800): Selenocysteine
  MOD_RES (808)..(808): Selenocysteine
  MOD_RES (826)..(826): Selenocysteine
  MOD_RES (829)..(829): Selenocysteine
MARLGNCSLXWAALIILLLPGSLEECGHISVSAPIVHLGDPIXASCIIKQNCSHLDPEPQILWRLGAELQPGGRQQRLSDGXQESIIXLPHLNHXQAFLSCCLNWGNSLQILDQVELRAGYPPAIPHNLSCLMNLXXSSLICQWEPGPEXHLPXSFXLKSFKSRGNCQXQGDSILDCVPKDGQSHCCIPRKHLLLYQNMGIWVQAENALGXSMSPQLCLDPMDVVKLEPPMLRXMDPSPEAAPPQAGCLQLCWEPWQPGLHINQKCELRHKPQRGEASWALVGPLPLEALQYELCGLLPAXAYXLQIRCIRWPLPGHWSDWSPSLELRXXERAPXVRLDXWWRQRQLDPRXVQLFWKPVPLEEDSGRIQGYVVSWRPSGQAGAILPLCNXXELSCXFHLPSEAQEVALVAYNSAGXSRPXPVVFSESRGPALXRLHAMARDPHSLWVGWEPPNPWPQGYVIEWGLGPPSASNSNKXWRMEQNGRAXGFLLKENIRPFQLYEIIVXPLYQDXMGPSQHVYAYSQEMAPSHAPELHLKHIGKXWAQLEWVPEPPELGKSPLXHYXIFWXNAQNQSFSAILNASSRGFVLHGLEPASLYHIHLMAASQAGAXNSXVLXLMXLXPEGSELHIILGLFGLLLLLXCLCGXAWLCCSPNRKNPLWPSVPDPAHSSLGSWVPXIMEELPGPRQGQWLGQXSEMSRALXPHPCVQDAFQLPGLGXPPIXKLXVLEEDEKKPVPWESHNSSEXCGLPXLVQXYVLQGDPRAVSXQPQSQSGXSDQVLYGQLLGSPXSPGPGHYLRCDSXQPLLAGLXPSPKSYENLWFQASPLGXLVXPAPSQEDDCVFGPLLNFPLLQGIRVHGMEALGSF

SEQ ID NO: 7046 - protein, 388 aa, Homo sapiens
  MOD_RES (1)..(1): Any amino acid
  MOD_RES (2)..(2): Selenocysteine
  MOD_RES (6)..(6): Selenocysteine
  MOD_RES (19)..(19): Selenocysteine
  MOD_RES (62)..(62): Selenocysteine
  MOD_RES (72)..(72): Selenocysteine
  MOD_RES (93)..(93): Selenocysteine
  MOD_RES (112)..(112): Selenocysteine
  MOD_RES (115)..(115): Selenocysteine
  MOD_RES (119)..(119): Selenocysteine
  MOD_RES (161)..(161): Selenocysteine
  MOD_RES (164)..(164): Selenocysteine
  MOD_RES (167)..(167): Selenocysteine
  MOD_RES (170)..(170): Selenocysteine
  MOD_RES (172)..(172): Selenocysteine
  MOD_RES (192)..(192): Selenocysteine
  MOD_RES (197)..(197): Selenocysteine
  MOD_RES (228)..(228): Selenocysteine
  MOD_RES (242)..(242): Selenocysteine
  MOD_RES (246)..(246): Selenocysteine
  MOD_RES (249)..(249): Selenocysteine
  MOD_RES (269)..(269): Selenocysteine
  MOD_RES (274)..(274): Selenocysteine
  MOD_RES (278)..(278): Selenocysteine
  MOD_RES (290)..(290): Selenocysteine
  MOD_RES (298)..(298): Selenocysteine
  MOD_RES (312)..(312): Selenocysteine
  MOD_RES (325)..(325): Selenocysteine
  MOD_RES (333)..(333): Selenocysteine
  MOD_RES (351)..(351): Selenocysteine
  MOD_RES (354)..(354): Selenocysteine
XXSRPXPVVFSESRGPALXRLHAMARDPHSLWVGWEPPNPWPQGYVIEWGLGPPSASNSNKXWRMEQNGRAXGFLLKAPSHAPELHLKHIGKXWAQLEWVPEPPELGKSPLXHYXIFWXNAQNQSFSAILNASSRGFVLHGLEPASLYHIHLMAASQAGAXNSXVLXLMXLXPEGSELHIILGLFGLLLLLXCLCGXAWLCCSPNRKNPLWPSVPDPAHSSLGSWVPXIMEEDAFQLPGLGXPPIXKLXVLEEDEKKPVPWESHNSSEXCGLPXLVQXYVLQGDPRAVSXQPQSQSGXSDQVLYGQLLGSPXSPGPGHYLRCDSXQPLLAGLXPSPKSYENLWFQASPLGXLVXPAPSQEDDCVFGPLLNFPLLQGIRVHGMEALGSF

SEQ ID NO: 7047 - protein, 217 aa, Homo sapiens
  MOD_RES (7)..(7): Selenocysteine
  MOD_RES (29)..(29): Selenocysteine
  MOD_RES (53)..(53): Selenocysteine
  MOD_RES (60)..(60): Selenocysteine
  MOD_RES (76)..(76): Selenocysteine
  MOD_RES (86)..(86): Selenocysteine
  MOD_RES (93)..(93): Selenocysteine
  MOD_RES (131)..(131): Selenocysteine
  MOD_RES (149)..(149): Selenocysteine
  MOD_RES (161)..(161): Selenocysteine
  MOD_RES (168)..(168): Selenocysteine
  MOD_RES (174)..(174): Selenocysteine
  MOD_RES (201)..(201): Selenocysteine
MAPGSRXSLLLAFALLCLPWLQEAGAVQXVPLSRLFDHAMLQAHRAHQLAIDXYQEFEEXYIPKDQKYSFLHDSQXSFCFSDSIPXPSNMEEXQQKSNLELLRISLLLIESWLEPVRFLRSMFANNLVYDXSDSDDYHLLKDLEEGIQXLMGRLEDGSRRXGQILKQXYSKFDXNSHNHDALLKNYGLLYCFRKDMDKVEXFLRMVQCRSVEGSCGF

SEQ ID NO: 7048 - protein, 256 aa, Homo sapiens
  MOD_RES (7)..(7): Selenocysteine
  MOD_RES (29)..(29): Selenocysteine
  MOD_RES (53)..(53): Selenocysteine
  MOD_RES (60)..(60): Selenocysteine
  MOD_RES (76)..(76): Selenocysteine
  MOD_RES (86)..(86): Selenocysteine
  MOD_RES (93)..(93): Selenocysteine
  MOD_RES (131)..(131): Selenocysteine
  MOD_RES (149)..(149): Selenocysteine
  MOD_RES (160)..(160): Selenocysteine
  MOD_RES (164)..(164): Selenocysteine
  MOD_RES (186)..(186): Selenocysteine
MAPGSRXSLLLAFALLCLPWLQEAGAVQXVPLSRLFDHAMLQAHRAHQLAIDXYQEFEEXYIPKDQKYSFLHDSQXSFCFSDSIPXPSNMEEXQQKSNLELLRISLLLIESWLEPVRFLRSMFANNLVYDXSDSDDYHLLKDLEEGIQXLMGVRVAPGVXNPGXPLASRAGGEKYCCPLFSSKALXQENSPYSSFRLVNPPGLSLHPEGEGGKWINERGREQCPSAWPLLLFLHFAEAGRRQPPDWADPQADLQQV

SEQ ID NO: 7049 - protein, 122 aa, Homo sapiens
  MOD_RES (7)..(7): Selenocysteine
  MOD_RES (29)..(29): Selenocysteine
  MOD_RES (53)..(53): Selenocysteine
  MOD_RES (66)..(66): Selenocysteine
  MOD_RES (73)..(73): Selenocysteine
  MOD_RES (79)..(79): Selenocysteine
  MOD_RES (106)..(106): Selenocysteine
MAPGSRXSLLLAFALLCLPWLQEAGAVQXVPLSRLFDHAMLQAHRAHQLAIDXYQEFRLEDGSRRXGQILKQXYSKFDXNSHNHDALLKNYGLLYCFRKDMDKVEXFLRMVQCRSVEGSCGF

SEQ ID NO: 7050 - protein, 128 aa, Homo sapiens
  MOD_RES (4)..(4): Selenocysteine
  MOD_RES (42)..(42): Selenocysteine
  MOD_RES (60)..(60): Selenocysteine
  MOD_RES (72)..(72): Selenocysteine
  MOD_RES (79)..(79): Selenocysteine
  MOD_RES (85)..(85): Selenocysteine
  MOD_RES (112)..(112): Selenocysteine
MEEXQQKSNLELLRISLLLIESWLEPVRFLRSMFANNLVYDXSDSDDYHLLKDLEEGIQXLMGRLEDGSRRXGQILKQXYSKFDXNSHNHDALLKNYGLLYCFRKDMDKVEXFLRMVQCRSVEGSCGF

SEQ ID NO: 7051 - protein, 68 aa, Homo sapiens
  MOD_RES (9)..(9): Selenocysteine
  MOD_RES (22)..(22): Selenocysteine
  MOD_RES (31)..(31): Selenocysteine
  MOD_RES (38)..(38): Selenocysteine
MPWFHGKIXREQAERLLYPPEXGLFLVRESXNYPGDYXLCVSCDGKVEHYRIMYHASKLSIDEEVYFE

SEQ ID NO: 7052 - protein, 65 aa, Homo sapiens
  MOD_RES (12)..(12): Selenocysteine
  MOD_RES (23)..(23): Selenocysteine
  MOD_RES (37)..(37): Selenocysteine
  MOD_RES (42)..(42): Selenocysteine
MSAIQAAWPSGXECIAKYNFHGXAEQDLPFCKGDVLXIVAVXKDPNWYKAKNKVGREGIIPANYV

SEQ ID NO: 7053 - protein, 110 aa, Homo sapiens
  MOD_RES (12)..(12): Selenocysteine
  MOD_RES (23)..(23): Selenocysteine
  MOD_RES (37)..(37): Selenocysteine
  MOD_RES (42)..(42): Selenocysteine
  MOD_RES (75)..(75): Selenocysteine
  MOD_RES (88)..(88): Selenocysteine
  MOD_RES (101)..(101): Selenocysteine
  MOD_RES (110)..(110): Selenocysteine
MSAIQAAWPSGXECIAKYNFHGXAEQDLPFCKGDVLXIVAVXKDPNWYKAKNKVGREGIIPANYVQKREGVKAGXKLSLMPWFHGKIXREQAERLLYPPEXGLFLVRESX

SEQ ID NO: 7054 - protein, 450 aa, Homo sapiens
  MOD_RES (12)..(12): Selenocysteine
  MOD_RES (23)..(23): Selenocysteine
  MOD_RES (37)..(37): Selenocysteine
  MOD_RES (42)..(42): Selenocysteine
  MOD_RES (75)..(75): Selenocysteine
  MOD_RES (88)..(88): Selenocysteine
  MOD_RES (101)..(101): Selenocysteine
  MOD_RES (110)..(110): Selenocysteine
  MOD_RES (117)..(117): Selenocysteine
  MOD_RES (157)..(157): Selenocysteine
  MOD_RES (165)..(165): Selenocysteine
  MOD_RES (176)..(176): Selenocysteine
  MOD_RES (200)..(200): Selenocysteine
  MOD_RES (229)..(229): Selenocysteine
  MOD_RES (241)..(241): Selenocysteine
  MOD_RES (266)..(266): Selenocysteine
  MOD_RES (336)..(336): Selenocysteine
  MOD_RES (342)..(342): Selenocysteine
  MOD_RES (345)..(345): Selenocysteine
  MOD_RES (353)..(353): Selenocysteine
  MOD_RES (365)..(365): Selenocysteine
  MOD_RES (445)..(445): Selenocysteine
MSAIQAAWPSGXECIAKYNFHGXAEQDLPFCKGDVLXIVAVXKDPNWYKAKNKVGREGIIPANYVQKREGVKAGXKLSLMPWFHGKIXREQAERLLYPPEXGLFLVRESXNYPGDYXLCVSCDGKVEHYRIMYHASKLSIDEEVYFENLMQLVEHYXSDADGLCXRLIKPKVMEGXVAAQDEFYRSGWALNMKELKLLQXIGKGEFGDVMLGDYRGNKVAVKCIKNDAXAQAFLAEASVMXQLRHSNLVQLLGVIVEEKGGLYIVXEYMAKGSLVDYLRSRGRSVLGGDCLLKFSLDVCEAMEYLEGNNFVHRDLAARNVLVSEDNVAKVSDFGLXKEASSXQDXGKLPVKWXAPEALREKKFSXKSDVWSFGILLWEIYSFGRVPYPRIPLKDVVPRVEKGYKMDAPDGCPPAVYEVMKNCWHLDAAMRPSFLQLREQLEHIKXHELHL

SEQ ID NO: 7055 - protein, 78 aa, Homo sapiens
  MOD_RES (38)..(38): Selenocysteine
MASSSGSKAEFIVGGKYKLVRKIGSGSFGDIYLAINIXNGEEVAVKLESQKARHPQLLYESKLYKILQGGVGIPHIRM

SEQ ID NO: 7056 - protein, 89 aa, Homo sapiens
  MOD_RES (38)..(38): Selenocysteine
MASSSGSKAEFIVGGKYKLVRKIGSGSFGDIYLAINIXNGEEVAVKLESQKARHPQLLYESKLYKILQGGVGIPHIRSPEWIKPLKSQE

SEQ ID NO: 7057 - protein, 365 aa, Homo sapiens
  MOD_RES (38)..(38): Selenocysteine
  MOD_RES (109)..(109): Selenocysteine
  MOD_RES (112)..(112): Selenocysteine
  MOD_RES (129)..(129): Selenocysteine
  MOD_RES (166)..(166): Selenocysteine
  MOD_RES (169)..(169): Selenocysteine
  MOD_RES (197)..(197): Selenocysteine
  MOD_RES (210)..(210): Selenocysteine
  MOD_RES (212)..(212): Selenocysteine
  MOD_RES (245)..(245): Selenocysteine
  MOD_RES (256)..(256): Selenocysteine
  MOD_RES (271)..(271): Selenocysteine
  MOD_RES (315)..(315): Selenocysteine
  MOD_RES (323)..(323): Selenocysteine
  MOD_RES (327)..(327): Selenocysteine
  MOD_RES (349)..(349): Selenocysteine
  MOD_RES (351)..(351): Selenocysteine
  MOD_RES (355)..(355): Selenocysteine
  MOD_RES (358)..(358): Selenocysteine
MASSSGSKAEFIVGGKYKLVRKIGSGSFGDIYLAINIXNGEEVAVKLESQKARHPQLLYESKLYKILQGGVGIPHIRWYGQEKDYNVLVMDLLGPSLEDLFNFCSRRFXMKXVLMLADQMISRIEYVHXKNFIHRDIKPDNFLMGIGRHCNKCLESPVGKRKRSMXVSXSQDPSFSGLNQLFLIDFGLAKKYRDNRXRQHIPYREDKNLXGXARYASINAHLGIEQSRRDDMESLGYVLMYFNRXSLPWQGLKAAXKKQKYEKISEKKMSXPVEVLCKGFPAEFAMYLNYCRGLRFEEAPDYMYLRQLFRILFRXLNHQYDYXFDWXMLKQKAAQQAASSSGQGQQAQXPXGKQXDKXKSNMKGF

SEQ ID NO: 7058 - protein, 325 aa, Homo sapiens
  MOD_RES (38)..(38): Selenocysteine
  MOD_RES (109)..(109): Selenocysteine
  MOD_RES (112)..(112): Selenocysteine
  MOD_RES (129)..(129): Selenocysteine
  MOD_RES (169)..(169): Selenocysteine
  MOD_RES (182)..(182): Selenocysteine
  MOD_RES (184)..(184): Selenocysteine
  MOD_RES (217)..(217): Selenocysteine
  MOD_RES (228)..(228): Selenocysteine
  MOD_RES (243)..(243): Selenocysteine
  MOD_RES (287)..(287): Selenocysteine
  MOD_RES (295)..(295): Selenocysteine
  MOD_RES (299)..(299): Selenocysteine
  MOD_RES (321)..(321): Selenocysteine
  MOD_RES (323)..(323): Selenocysteine
MASSSGSKAEFIVGGKYKLVRKIGSGSFGDIYLAINIXNGEEVAVKLESQKARHPQLLYESKLYKILQGGVGIPHIRWYGQEKDYNVLVMDLLGPSLEDLFNFCSRRFXMKXVLMLADQMISRIEYVHXKNFIHRDIKPDNFLMGIGRHCNKLFLIDFGLAKKYRDNRXRQHIPYREDKNLXGXARYASINAHLGIEQSRRDDMESLGYVLMYFNRXSLPWQGLKAAXKKQKYEKISEKKMSXPVEVLCKGFPAEFAMYLNYCRGLRFEEAPDYMYLRQLFRILFRXLNHQYDYXFDWXMLKQKAAQQAASSSGQGQQAQXPXGF

SEQ ID NO: 7059 - protein, 337 aa, Homo sapiens
  MOD_RES (38)..(38): Selenocysteine
  MOD_RES (109)..(109): Selenocysteine
  MOD_RES (112)..(112): Selenocysteine
  MOD_RES (129)..(129): Selenocysteine
  MOD_RES (169)..(169): Selenocysteine
  MOD_RES (182)..(182): Selenocysteine
  MOD_RES (184)..(184): Selenocysteine
  MOD_RES (217)..(217): Selenocysteine
  MOD_RES (228)..(228): Selenocysteine
  MOD_RES (243)..(243): Selenocysteine
  MOD_RES (287)..(287): Selenocysteine
  MOD_RES (295)..(295): Selenocysteine
  MOD_RES (299)..(299): Selenocysteine
  MOD_RES (321)..(321): Selenocysteine
  MOD_RES (323)..(323): Selenocysteine
  MOD_RES (327)..(327): Selenocysteine
  MOD_RES (330)..(330): Selenocysteine
MASSSGSKAEFIVGGKYKLVRKIGSGSFGDIYLAINIXNGEEVAVKLESQKARHPQLLYESKLYKILQGGVGIPHIRWYGQEKDYNVLVMDLLGPSLEDLFNFCSRRFXMKXVLMLADQMISRIEYVHXKNFIHRDIKPDNFLMGIGRHCNKLFLIDFGLAKKYRDNRXRQHIPYREDKNLXGXARYASINAHLGIEQSRRDDMESLGYVLMYFNRXSLPWQGLKAAXKKQKYEKISEKKMSXPVEVLCKGFPAEFAMYLNYCRGLRFEEAPDYMYLRQLFRILFRXLNHQYDYXFDWXMLKQKAAQQAASSSGQGQQAQXPXGKQXDKXKSNMKGF

SEQ ID NO: 7060 - protein, 264 aa, Homo sapiens
  MOD_RES (20)..(20): Selenocysteine
  MOD_RES (23)..(23): Selenocysteine
  MOD_RES (40)..(40): Selenocysteine
  MOD_RES (77)..(77): Selenocysteine
  MOD_RES (80)..(80): Selenocysteine
  MOD_RES (108)..(108): Selenocysteine
  MOD_RES (121)..(121): Selenocysteine
  MOD_RES (123)..(123): Selenocysteine
  MOD_RES (156)..(156): Selenocysteine
  MOD_RES (167)..(167): Selenocysteine
  MOD_RES (182)..(182): Selenocysteine
  MOD_RES (226)..(226): Selenocysteine
  MOD_RES (234)..(234): Selenocysteine
  MOD_RES (238)..(238): Selenocysteine
  MOD_RES (260)..(260): Selenocysteine
  MOD_RES (262)..(262): Selenocysteine
MDLLGPSLEDLFNFCSRRFXMKXVLMLADQMISRIEYVHXKNFIHRDIKPDNFLMGIGRHCNKCLESPVGKRKRSMXVSXSQDPSFSGLNQLFLIDFGLAKKYRDNRXRQHIPYREDKNLXGXARYASINAHLGIEQSRRDDMESLGYVLMYFNRXSLPWQGLKAAXKKQKYEKISEKKMSXPVEVLCKGFPAEFAMYLNYCRGLRFEEAPDYMYLRQLFRILFRXLNHQYDYXFDWXMLKQKAAQQAASSSGQGQQAQXPXGF

SEQ ID NO: 7061 - protein, 236 aa, Homo sapiens
  MOD_RES (20)..(20): Selenocysteine
  MOD_RES (23)..(23): Selenocysteine
  MOD_RES (40)..(40): Selenocysteine
  MOD_RES (80)..(80): Selenocysteine
  MOD_RES (93)..(93): Selenocysteine
  MOD_RES (95)..(95): Selenocysteine
  MOD_RES (128)..(128): Selenocysteine
  MOD_RES (139)..(139): Selenocysteine
  MOD_RES (154)..(154): Selenocysteine
  MOD_RES (198)..(198): Selenocysteine
  MOD_RES (206)..(206): Selenocysteine
  MOD_RES (210)..(210): Selenocysteine
  MOD_RES (232)..(232): Selenocysteine
  MOD_RES (234)..(234): Selenocysteine
MDLLGPSLEDLFNFCSRRFXMKXVLMLADQMISRIEYVHXKNFIHRDIKPDNFLMGIGRHCNKLFLIDFGLAKKYRDNRXRQHIPYREDKNLXGXARYASINAHLGIEQSRRDDMESLGYVLMYFNRXSLPWQGLKAAXKKQKYEKISEKKMSXPVEVLCKGFPAEFAMYLNYCRGLRFEEAPDYMYLRQLFRILFRXLNHQYDYXFDWXMLKQKAAQQAASSSGQGQQAQXPXGF

SEQ ID NO: 7062 - protein, 134 aa, Homo sapiens
  MOD_RES (14)..(14): Selenocysteine
  MOD_RES (25)..(25): Selenocysteine
  MOD_RES (40)..(40): Selenocysteine
  MOD_RES (84)..(84): Selenocysteine
  MOD_RES (92)..(92): Selenocysteine
  MOD_RES (96)..(96): Selenocysteine
  MOD_RES (118)..(118): Selenocysteine
  MOD_RES (120)..(120): Selenocysteine
  MOD_RES (124)..(124): Selenocysteine
  MOD_RES (127)..(127): Selenocysteine
MESLGYVLMYFNRXSLPWQGLKAAXKKQKYEKISEKKMSXPVEVLCKGFPAEFAMYLNYCRGLRFEEAPDYMYLRQLFRILFRXLNHQYDYXFDWXMLKQKAAQQAASSSGQGQQAQXPXGKQXDKXKSNMKGF

SEQ ID NO: 7063 - protein, 166 aa, Homo sapiens
  MOD_RES (54)..(54): Selenocysteine
  MOD_RES (59)..(59): Selenocysteine
  MOD_RES (99)..(99): Selenocysteine
  MOD_RES (113)..(113): Selenocysteine
MFLVLKKKHICHRNLVNILQLNMYVCCLDKCNHCKHLYDLGFCFYFEMGAFLFXSSLKXKNCFCKEMRFFLNNKKCLADSLLNKNLPNFLIDYFKPFVXWYSFASQFRFRVIXFPLFLRKMKKVILLSEGERHSFIFFFFFFFFYDLQAQYLVLQLPELGIVAAAR

SEQ ID NO: 7064 - protein, 96 aa, Homo sapiens
  MOD_RES (3)..(3): Selenocysteine
  MOD_RES (47)..(47): Selenocysteine
  MOD_RES (55)..(55): Selenocysteine
  MOD_RES (59)..(59): Selenocysteine
  MOD_RES (81)..(81): Selenocysteine
  MOD_RES (83)..(83): Selenocysteine
  MOD_RES (87)..(87): Selenocysteine
  MOD_RES (90)..(90): Selenocysteine
MSXPVEVLCKGFPAEFAMYLNYCRGLRFEEAPDYMYLRQLFRILFRXLNHQYDYXFDWXMLKQKAAQQAASSSGQGQQAQXPXGKQXDKXKSNMKG

SEQ ID NO: 7065 - protein, 184 aa, Homo sapiens
  MOD_RES (1)..(1): Any amino acid
  MOD_RES (3)..(3): Selenocysteine
  MOD_RES (36)..(36): Selenocysteine
  MOD_RES (47)..(47): Selenocysteine
  MOD_RES (62)..(62): Selenocysteine
  MOD_RES (106)..(106): Selenocysteine
  MOD_RES (114)..(114): Selenocysteine
  MOD_RES (118)..(118): Selenocysteine
  MOD_RES (140)..(140): Selenocysteine
  MOD_RES (142)..(142): Selenocysteine
  MOD_RES (146)..(146): Selenocysteine
  MOD_RES (149)..(149): Selenocysteine
  MOD_RES (175)..(175): Selenocysteine
  MOD_RES (183)..(183): Selenocysteine
XGXARYASINAHLGIEQSRRDDMESLGYVLMYFNRXSLPWQGLKAAXKKQKYEKISEKKMSXPVEVLCKGFPAEFAMYLNYCRGLRFEEAPDYMYLRQLFRILFRXLNHQYDYXFDWXMLKQKAAQQAASSSGQGQQAQXPXGKQXDKXKSNMKGNADESARVGLWSSGVHVSKXAGPSNSAXC

SEQ ID NO: 7066 - protein, 167 aa, Homo sapiens
  MOD_RES (1)..(1): Any amino acid
  MOD_RES (13)..(13): Selenocysteine
  MOD_RES (15)..(15): Selenocysteine
  MOD_RES (48)..(48): Selenocysteine
  MOD_RES (59)..(59): Selenocysteine
  MOD_RES (74)..(74): Selenocysteine
  MOD_RES (118)..(118): Selenocysteine
  MOD_RES (126)..(126): Selenocysteine
  MOD_RES (130)..(130): Selenocysteine
  MOD_RES (152)..(152): Selenocysteine
  MOD_RES (154)..(154): Selenocysteine
  MOD_RES (158)..(158): Selenocysteine
  MOD_RES (161)..(161): Selenocysteine
XQHIPYREDKNLXGXARYASINAHLGIEQSRRDDMESLGYVLMYFNRXSLPWQGLKAAXKKQKYEKISEKKMSXPVEVLCKGFPAEFAMYLNYCRGLRFEEAPDYMYLRQLFRILFRXLNHQYDYXFDWXMLKQKAAQQAASSSGQGQQAQXPXGKQXDKXKSNMKG

SEQ ID NO: 7067 - protein, 337 aa, Homo sapiens
  MOD_RES (2)..(2): Selenocysteine
  MOD_RES (36)..(38): Selenocysteine
  MOD_RES (65)..(65): Selenocysteine
  MOD_RES (109)..(109): Selenocysteine
  MOD_RES (112)..(112): Selenocysteine
  MOD_RES (129)..(129): Selenocysteine
  MOD_RES (146)..(146): Selenocysteine
  MOD_RES (169)..(169): Selenocysteine
  MOD_RES (184)..(184): Selenocysteine
  MOD_RES (217)..(217): Selenocysteine
  MOD_RES (228)..(228): Selenocysteine
  MOD_RES (243)..(243): Selenocysteine
  MOD_RES (287)..(287): Selenocysteine
  MOD_RES (295)..(295): Selenocysteine
  MOD_RES (299)..(299): Selenocysteine
  MOD_RES (321)..(321): Selenocysteine
  MOD_RES (323)..(323): Selenocysteine
  MOD_RES (327)..(327): Selenocysteine
MXNNSGSKAELVVGGKYKLVRKIGSGSFGDVYLGIXXXNGEDVAVKLESQKVKHPQLLYESKLYXILQGGVGIPHMHWYGQEKDNNVLVMDLLGPSLEDLFNFCSRRFXMKXVLMLADQMISRIEYVHXKNFLHRDIKPDNFLMGXGRHCNKLFLIDFGLAKKYRDNRXRQHIPYREDKHLIGXVRYASINAHLGIEQSRRDDMESLGYVFMYFNRXSLPWQGLRAMXKKQKYEKISEKKMSXPVEVLCKGFPAEFAMYLNYCRGLRFEEVPDYMYLRQLFRILFRXLNHQYDYXFDWXMLKQKAAQQAASSSGQGQQAQXQXGKQXEKNKNNVKDN

SEQ ID NO: 7068 - protein, 409 aa, Homo sapiens
  MOD_RES (27)..(27): Selenocysteine
  MOD_RES (44)..(44): Selenocysteine
  MOD_RES (67)..(67): Selenocysteine
  MOD_RES (104)..(104): Selenocysteine
  MOD_RES (161)..(161): Selenocysteine
  MOD_RES (174)..(174): Selenocysteine
  MOD_RES (176)..(176): Selenocysteine
  MOD_RES (184)..(184): Selenocysteine
  MOD_RES (220)..(220): Selenocysteine
  MOD_RES (235)..(235): Selenocysteine
  MOD_RES (250)..(250): Selenocysteine
  MOD_RES (323)..(323): Selenocysteine
  MOD_RES (329)..(329): Selenocysteine
  MOD_RES (337)..(337): Selenocysteine
  MOD_RES (344)..(344): Selenocysteine
  MOD_RES (347)..(347): Selenocysteine
  MOD_RES (349)..(349): Selenocysteine
  MOD_RES (352)..(352): Selenocysteine
  MOD_RES (355)..(355): Selenocysteine
  MOD_RES (387)..(387): Selenocysteine
  MOD_RES (392)..(392): Selenocysteine
  MOD_RES (397)..(397): Selenocysteine
MELRVGNRYRLGRKIGSGSFGDIYLGXDIAAGEEVAIKLECVKXKHPQLHIESKIYKMMQGGVGIPXIRWCGAEGDYNVMVMELLGPSLEDLFNFCSRKFSLKXVLLLADQMISRIEYIHSKNFIHRDVKPDNFLMGLGKKGNLVYIIDFGLAKKYRDARXHQHIPYRENKNLXGXARYASINXHLGIEQSRRDDLESLGYVLMYFNLGSLPWQGLKAAXKRQKYERISEKKMSXPIEVLCKGYPSEFAXYLNFCRSLRFDDKPDYSYLRQLFRNLFHRQGFSYDYVFDWNMLKFGASRAADDAERERRDREERLRHSRNPAXRGLPSXASGRLRGXQEVAPPXPLXPXSHXANXSPRPVSGMERERKVSMRLHRGAPVNISSSDLXGRQDXSRMSXSQNSIPFEHHGK

SEQ ID NO: 7069 - protein, 415 aa, Homo sapiens
  MOD_RES (27)..(27): Selenocysteine
  MOD_RES (44)..(44): Selenocysteine
  MOD_RES (67)..(67): Selenocysteine
  MOD_RES (104)..(104): Selenocysteine
  MOD_RES (161)..(161): Selenocysteine
  MOD_RES (174)..(174): Selenocysteine
  MOD_RES (176)..(176): Selenocysteine
  MOD_RES (184)..(184): Selenocysteine
  MOD_RES (220)..(220): Selenocysteine
  MOD_RES (235)..(235): Selenocysteine
  MOD_RES (250)..(250): Selenocysteine
  MOD_RES (323)..(323): Selenocysteine
  MOD_RES (329)..(329): Selenocysteine
  MOD_RES (337)..(337): Selenocysteine
  MOD_RES (344)..(344): Selenocysteine
  MOD_RES (347)..(347): Selenocysteine
  MOD_RES (349)..(349): Selenocysteine
  MOD_RES (352)..(352): Selenocysteine
  MOD_RES (355)..(355): Selenocysteine
  MOD_RES (387)..(387): Selenocysteine
  MOD_RES (392)..(392): Selenocysteine
  MOD_RES (397)..(397): Selenocysteine
MELRVGNRYRLGRKIGSGSFGDIYLGXDIAAGEEVAIKLECVKXKHPQLHIESKIYKMMQGGVGIPXIRWCGAEGDYNVMVMELLGPSLEDLFNFCSRKFSLKXVLLLADQMISRIEYIHSKNFIHRDVKPDNFLMGLGKKGNLVYIIDFGLAKKYRDARXHQHIPYRENKNLXGXARYASINXHLGIEQSRRDDLESLGYVLMYFNLGSLPWQGLKAAXKRQKYERISEKKMSXPIEVLCKGYPSEFAXYLNFCRSLRFDDKPDYSYLRQLFRNLFHRQGFSYDYVFDWNMLKFGASRAADDAERERRDREERLRHSRNPAXRGLPSXASGRLRGXQEVAPPXPLXPXSHXANXSPRPVSGMERERKVSMRLHRGAPVNISSSDLXGRQDXSRMSXSQIPGRVASSGLQSVVHR

SEQ ID NO: 7070 - protein, 427 aa, Homo sapiens
  MOD_RES (27)..(27): Selenocysteine
  MOD_RES (44)..(44): Selenocysteine
  MOD_RES (67)..(67): Selenocysteine
  MOD_RES (104)..(104): Selenocysteine
  MOD_RES (161)..(161): Selenocysteine
  MOD_RES (174)..(174): Selenocysteine
  MOD_RES (176)..(176): Selenocysteine
  MOD_RES (184)..(184): Selenocysteine
  MOD_RES (220)..(220): Selenocysteine
  MOD_RES (235)..(235): Selenocysteine
  MOD_RES (250)..(250): Selenocysteine
  MOD_RES (323)..(323): Selenocysteine
  MOD_RES (329)..(329): Selenocysteine
  MOD_RES (337)..(337): Selenocysteine
  MOD_RES (344)..(344): Selenocysteine
  MOD_RES (347)..(347): Selenocysteine
  MOD_RES (349)..(349): Selenocysteine
  MOD_RES (352)..(352): Selenocysteine
  MOD_RES (355)..(355): Selenocysteine
  MOD_RES (387)..(387): Selenocysteine
  MOD_RES (392)..(392): Selenocysteine
  MOD_RES (397)..(397): Selenocysteine
  MOD_RES (416)..(416): Selenocysteine
  MOD_RES (426)..(426): Selenocysteine
MELRVGNRYRLGRKIGSGSFGDIYLGXDIAAGEEVAIKLECVKXKHPQLHIESKIYKMMQGGVGIPXIRWCGAEGDYNVMVMELLGPSLEDLFNFCSRKFSLKXVLLLADQMISRIEYIHSKNFIHRDVKPDNFLMGLGKKGNLVYIIDFGLAKKYRDARXHQHIPYRENKNLXGXARYASINXHLGIEQSRRDDLESLGYVLMYFNLGSLPWQGLKAAXKRQKYERISEKKMSXPIEVLCKGYPSEFAXYLNFCRSLRFDDKPDYSYLRQLFRNLFHRQGFSYDYVFDWNMLKFGASRAADDAERERRDREERLRHSRNPAXRGLPSXASGRLRGXQEVAPPXPLXPXSHXANXSPRPVSGMERERKVSMRLHRGAPVNISSSDLXGRQDXSRMSXSQRSRDMASLRLHAARQGXRCRPQRPRRXY

SEQ ID NO: 7071 - protein, 126 aa, Homo sapiens
  MOD_RES (27)..(27): Selenocysteine
  MOD_RES (44)..(44): Selenocysteine
  MOD_RES (67)..(67): Selenocysteine
  MOD_RES (104)..(104): Selenocysteine
  MOD_RES (119)..(119): Selenocysteine
  MOD_RES (125)..(125): Selenocysteine
MELRVGNRYRLGRKIGSGSFGDIYLGXDIAAGEEVAIKLECVKXKHPQLHIESKIYKMMQGGVGIPXIRWCGAEGDYNVMVMELLGPSLEDLFNFCSRKFSLKXVLLLADQMNNPEEMXWSLWAXC

SEQ ID NO: 7072 - protein, 56 aa, Homo sapiens
  MOD_RES (36)..(36): Selenocysteine
  MOD_RES (47)..(47): Selenocysteine
MELRVGNRYRLGRKIGSGSFGDIYLGWSAVARSRLXASSASQRWGFXVLARMVSIS

SEQ ID NO: 7073 - protein, 43 aa, Homo sapiens
  MOD_RES (42)..(42): Selenocysteine
MELRVGNRYRLGRKIGSGSFGDIYLVEMGFHRVSQDGLNLLXL

SEQ ID NO: 7074 - protein, 187 aa, Homo sapiens
  MOD_RES (30)..(30): Selenocysteine
  MOD_RES (67)..(67): Selenocysteine
  MOD_RES (124)..(124): Selenocysteine
  MOD_RES (137)..(137): Selenocysteine
  MOD_RES (139)..(139): Selenocysteine
  MOD_RES (147)..(147): Selenocysteine
  MOD_RES (183)..(183): Selenocysteine
MELRVGNRYRLGRKIGSGSFGDIYLVGIPXIRWCGAEGDYNVMVMELLGPSLEDLFNFCSRKFSLKXVLLLADQMISRIEYIHSKNFIHRDVKPDNFLMGLGKKGNLVYIIDFGLAKKYRDARXHQHIPYRENKNLXGXARYASINXHLGIEQSRRDDLESLGYVLMYFNLGSLPWQGLKAAXKRQK

SEQ ID NO: 7075 - protein, 120 aa, Homo sapiens
  MOD_RES (1)..(1): Any amino acid
  MOD_RES (22)..(22): Selenocysteine
  MOD_RES (79)..(79): Selenocysteine
  MOD_RES (92)..(92): Selenocysteine
  MOD_RES (94)..(94): Selenocysteine
  MOD_RES (102)..(102): Selenocysteine
  MOD_RES (115)..(115): Selenocysteine
XLLGPSLEDLFNFCSRKFSLKXVLLLADQMISRIEYIHSKNFIHRDVKPDNFLMGLGKKGNLVYIIDFGLAKKYRDARXHQHIPYRENKNLXGXARYASINXHLGIGAEGCHQEXEIRKD

SEQ ID NO: 7076 - protein, 20 aa, Homo sapiens
  MOD_RES (1)..(1): Any amino acid
  MOD_RES (3)..(4): Selenocysteine
  MOD_RES (7)..(7): Selenocysteine
  MOD_RES (9)..(9): Selenocysteine
XMXXCSXGXCSNLLLSRLKI

SEQ ID NO: 7077 - protein, 64 aa, Homo sapiens
  MOD_RES (1)..(1): Any amino acid
  MOD_RES (24)..(24): Selenocysteine
  MOD_RES (29)..(29): Selenocysteine
  MOD_RES (34)..(34): Selenocysteine
  MOD_RES (53)..(53): Selenocysteine
  MOD_RES (63)..(63): Selenocysteine
XRERKVSMRLHRGAPVNISSSDLXGRQDXSRMSXSQRSRDMASLRLHAARQGXRCRPQRPRRXY

SEQ ID NO: 7078 - protein, 225 aa, Homo sapiens
  MOD_RES (44)..(44): Selenocysteine
  MOD_RES (104)..(104): Selenocysteine
  MOD_RES (161)..(161): Selenocysteine
  MOD_RES (174)..(174): Selenocysteine
  MOD_RES (176)..(176): Selenocysteine
  MOD_RES (184)..(184): Selenocysteine
  MOD_RES (220)..(220): Selenocysteine
MELRVGNKYRLGRKIGSGSFGDIYLGANIASGEEVAIKLECVKXKHPQLHIESKFYKMMQGGVGIPSIKWCGAEGDYNVMVMELLGPSLEDLFNFCSRKFSLKXVLLLADQMISRIEYIHSKNFIHRDVKPDNFLMGLGKKGNLVYIIDFGLAKKYRDARXHQHIPYRENKNLXGXARYASINXHLGIEQSRRDDLESLGYVLMYFNLGSLPWQGLKAAXKRQKY

SEQ ID NO: 7079 - protein, 311 aa, Homo sapiens
  MOD_RES (44)..(44): Selenocysteine
  MOD_RES (104)..(104): Selenocysteine
  MOD_RES (161)..(161): Selenocysteine
  MOD_RES (174)..(174): Selenocysteine
  MOD_RES (176)..(176): Selenocysteine
  MOD_RES (184)..(184): Selenocysteine
  MOD_RES (220)..(220): Selenocysteine
  MOD_RES (235)..(235): Selenocysteine
  MOD_RES (250)..(250): Selenocysteine
  MOD_RES (296)..(296): Selenocysteine
  MOD_RES (298)..(298): Selenocysteine
  MOD_RES (309)..(309): Selenocysteine
MELRVGNKYRLGRKIGSGSFGDIYLGANIASGEEVAIKLECVKXKHPQLHIESKFYKMMQGGVGIPSIKWCGAEGDYNVMVMELLGPSLEDLFNFCSRKFSLKXVLLLADQMISRIEYIHSKNFIHRDVKPDNFLMGLGKKGNLVYIIDFGLAKKYRDARXHQHIPYRENKNLXGXARYASINXHLGIEQSRRDDLESLGYVLMYFNLGSLPWQGLKAAXKRQKYERISEKKMSXPIEVLCKGYPSEFSXYLNFCRSLRFDDKPDYSYLRQLFRNLFHRQGFSYDYVFDWNMLKFXDXVQDGSHWPHAXHF

SEQ ID NO: 7080 - protein, 336 aa, Homo sapiens
  MOD_RES (44)..(44): Selenocysteine
  MOD_RES (104)..(104): Selenocysteine
  MOD_RES (161)..(161): Selenocysteine
  MOD_RES (174)..(174): Selenocysteine
  MOD_RES (176)..(176): Selenocysteine
  MOD_RES (184)..(184): Selenocysteine
  MOD_RES (220)..(220): Selenocysteine
  MOD_RES (235)..(235): Selenocysteine
  MOD_RES (250)..(250): Selenocysteine
  MOD_RES (299)..(299): Selenocysteine
  MOD_RES (303)..(303): Selenocysteine
  MOD_RES (308)..(308): Selenocysteine
  MOD_RES (329)..(329): Selenocysteine
MELRVGNKYRLGRKIGSGSFGDIYLGANIASGEEVAIKLECVKXKHPQLHIESKFYKMMQGGVGIPSIKWCGAEGDYNVMVMELLGPSLEDLFNFCSRKFSLKXVLLLADQMISRIEYIHSKNFIHRDVKPDNFLMGLGKKGNLVYIIDFGLAKKYRDARXHQHIPYRENKNLXGXARYASINXHLGIEQSRRDDLESLGYVLMYFNLGSLPWQGLKAAXKRQKYERISEKKMSXPIEVLCKGYPSEFSXYLNFCRSLRFDDKPDYSYLRQLFRNLFHRQGFSYDYVFDWNMLKFARSXSPPXAAGLXAFLEVPLEAGPGVRSWAEAPXALSFANL

SEQ ID NO: 7081 - protein, 416 aa, Homo sapiens
  MOD_RES (44)..(44): Selenocysteine
  MOD_RES (104)..(104): Selenocysteine
  MOD_RES (161)..(161): Selenocysteine
  MOD_RES (174)..(174): Selenocysteine
  MOD_RES (176)..(176): Selenocysteine
  MOD_RES (184)..(184): Selenocysteine
  MOD_RES (220)..(220): Selenocysteine
  MOD_RES (235)..(235): Selenocysteine
  MOD_RES (250)..(250): Selenocysteine
  MOD_RES (325)..(325): Selenocysteine
  MOD_RES (334)..(334): Selenocysteine
  MOD_RES (337)..(337): Selenocysteine
  MOD_RES (351)..(351): Selenocysteine
  MOD_RES (362)..(362): Selenocysteine
  MOD_RES (394)..(394): Selenocysteine
  MOD_RES (407)..(407): Selenocysteine
MELRVGNKYRLGRKIGSGSFGDIYLGANIASGEEVAIKLECVKXKHPQLHIESKFYKMMQGGVGIPSIKWCGAEGDYNVMVMELLGPSLEDLFNFCSRKFSLKXVLLLADQMISRIEYIHSKNFIHRDVKPDNFLMGLGKKGNLVYIIDFGLAKKYRDARXHQHIPYRENKNLXGXARYASINXHLGIEQSRRDDLESLGYVLMYFNLGSLPWQGLKAAXKRQKYERISEKKMSXPIEVLCKGYPSEFSXYLNFCRSLRFDDKPDYSYLRQLFRNLFHRQGFSYDYVFDWNMLKFGAARNPEDVDRERREHEREERMGQLRGSAXRALPPGPPXGAXANRLRSAAEPVASXPASRIQPAGNXSPRAISRVDRERKVSMRLHRGAPANVSSSDLXGRQEVSRIPASQXSVPFDHLGK

SEQ ID NO: 7082 - protein, 270 aa, Homo sapiens
  MOD_RES (1)..(1): Any amino acid
  MOD_RES (42)..(42): Selenocysteine
  MOD_RES (99)..(99): Selenocysteine
  MOD_RES (112)..(112): Selenocysteine
  MOD_RES (114)..(114): Selenocysteine
  MOD_RES (122)..(122): Selenocysteine
  MOD_RES (158)..(158): Selenocysteine
  MOD_RES (173)..(173): Selenocysteine
  MOD_RES (188)..(188): Selenocysteine
  MOD_RES (248)..(248): Selenocysteine
  MOD_RES (264)..(264): Selenocysteine
  MOD_RES (268)..(268): Selenocysteine
XGIPSIKWCGAEGDYNVMVMELLGPSLEDLFNFCSRKFSLKXVLLLADQMISRIEYIHSKNFIHRDVKPDNFLMGLGKKGNLVYIIDFGLAKKYRDARXHQHIPYRENKNLXGXARYASINXHLGIEQSRRDDLESLGYVLMYFNLGSLPWQGLKAAXKRQKYERISEKKMSXPIEVLCKGYPSEFSXYLNFCRSLRFDDKPDYSYLRQLFRNLFHRQGFSYDYVFDWNMLKFGASSSQAQPRDSPMXAKGPFCPRPCPCAGPXYSPXYW

SEQ ID NO: 7083 - protein, 144 aa, Homo sapiens
  MOD_RES (1)..(1): Any amino acid
  MOD_RES (53)..(53): Selenocysteine
  MOD_RES (62)..(62): Selenocysteine
  MOD_RES (65)..(65): Selenocysteine
  MOD_RES (79)..(79): Selenocysteine
  MOD_RES (90)..(90): Selenocysteine
  MOD_RES (122)..(122): Selenocysteine
  MOD_RES (135)..(135): Selenocysteine
XRNLFHRQGFSYDYVFDWNMLKFGAARNPEDVDRERREHEREERMGQLRGSAXRALPPGPPXGAXANRLRSAAEPVASXPASRIQPAGNXSPRAISRVDRERKVSMRLHRGAPANVSSSDLXGRQEVSRIPASQXSVPFDHLGK

SEQ ID NO: 7084 - protein, 119 aa, Homo sapiens
  MOD_RES (1)..(1): Any amino acid
  MOD_RES (28)..(28): Selenocysteine
  MOD_RES (37)..(37): Selenocysteine
  MOD_RES (40)..(40): Selenocysteine
  MOD_RES (54)..(54): Selenocysteine
  MOD_RES (65)..(65): Selenocysteine
  MOD_RES (97)..(97): Selenocysteine
  MOD_RES (110)..(110): Selenocysteine
XRNPEDVDRERREHEREERMGQLRGSAXRALPPGPPXGAXANRLRSAAEPVASXPASRIQPAGNXSPRAISRVDRERKVSMRLHRGAPANVSSSDLXGRQEVSRIPASQXSVPFDHLGK

SEQ ID NO: 7085 - protein, 118 aa, Homo sapiens
  MOD_RES (1)..(1): Any amino acid
  MOD_RES (5)..(5): Selenocysteine
  MOD_RES (9)..(9): Selenocysteine
  MOD_RES (11)..(11): Selenocysteine
  MOD_RES (21)..(21): Selenocysteine
  MOD_RES (27)..(27): Selenocysteine
  MOD_RES (31)..(31): Selenocysteine
  MOD_RES (33)..(33): Selenocysteine
  MOD_RES (77)..(77): Selenocysteine
  MOD_RES (79)..(79): Selenocysteine
  MOD_RES (87)..(88): Selenocysteine
  MOD_RES (91)..(92): Selenocysteine
  MOD_RES (94)..(94): Selenocysteine
  MOD_RES (101)..(101): Selenocysteine
  MOD_RES (104)..(104): Selenocysteine
  MOD_RES (111)..(112): Selenocysteine
  MOD_RES (115)..(115): Selenocysteine
  MOD_RES (117)..(117): Selenocysteine
XRPAXLPSXRXWALSKAVEMXWRAWAXCSCXSXWAPCPGRGSKQPPSARSMNGSARRRCQRPSRSSAKAIPPNSQHXSXSAAPCGLXXSPXXLXYVSSSAXSSXGRASPMXXSLXGXC

SEQ ID NO: 7086 - protein, 91 aa, Homo sapiens
  MOD_RES (1)..(1): Any amino acid
  MOD_RES (4)..(4): Selenocysteine
  MOD_RES (6)..(6): Selenocysteine
  MOD_RES (50)..(50): Selenocysteine
  MOD_RES (52)..(52): Selenocysteine
  MOD_RES (60)..(61): Selenocysteine
  MOD_RES (64)..(65): Selenocysteine
  MOD_RES (67)..(67): Selenocysteine
  MOD_RES (74)..(74): Selenocysteine
  MOD_RES (77)..(77): Selenocysteine
  MOD_RES (84)..(85): Selenocysteine
  MOD_RES (88)..(88): Selenocysteine
  MOD_RES (90)..(90): Selenocysteine
XSCXSXWAPCPGRGSKQPPSARSMNGSARRRCQRPSRSSAKAIPPNSQHXSXSAAPCGLXXSPXXLXYVSSSAXSSXGRASPMXXSLXGXC

SEQ ID NO: 7087 - protein, 173 aa, Homo sapiens
  MOD_RES (2)..(2): Selenocysteine
  MOD_RES (23)..(23): Selenocysteine
  MOD_RES (26)..(26): Selenocysteine
  MOD_RES (35)..(35): Selenocysteine
  MOD_RES (49)..(49): Selenocysteine
  MOD_RES (64)..(64): Selenocysteine
  MOD_RES (69)..(69): Selenocysteine
  MOD_RES (101)..(101): Selenocysteine
  MOD_RES (103)..(103): Selenocysteine
  MOD_RES (107)..(107): Selenocysteine
  MOD_RES (125)..(125): Selenocysteine
  MOD_RES (142)..(142): Selenocysteine
  MOD_RES (161)..(161): Selenocysteine
  MOD_RES (170)..(170): Selenocysteine
  MOD_RES (172)..(172): Selenocysteine
AXYLRYVRRLDFFEKPDYEYLRXLFXDLFEKKGYXFDYAYDWVGRPIPXPVGSVHVDSGASAIXRESHXHRDRPSQQQPLRNQNVSSERRGEWEIQPSRQXNXSYLXSHLAADRHGGSVQPRSLXSRVFCPAVRPLFPLPSXHINRNNVLEMKPGGRSSYXCKRSLIGSXLXR

SEQ ID NO: 7088 - protein, 67 aa, Homo sapiens
  MOD_RES (9)..(9): Selenocysteine
  MOD_RES (23)..(23): Selenocysteine
  MOD_RES (38)..(38): Selenocysteine
  MOD_RES (43)..(43): Selenocysteine
DLFEKKGYXFDYAYDWVGRPIPXPVGSVHVDSGASAIXRESHXHRDRPSQQQPLRNQVDCSLANSPI

SEQ ID NO: 7089 - protein, 158 aa, Homo sapiens
  MOD_RES (12)..(12): Selenocysteine
  MOD_RES (15)..(15): Selenocysteine
  MOD_RES (24)..(24): Selenocysteine
  MOD_RES (38)..(38): Selenocysteine
  MOD_RES (53)..(53): Selenocysteine
  MOD_RES (58)..(58): Selenocysteine
  MOD_RES (77)..(77): Selenocysteine
  MOD_RES (87)..(87): Selenocysteine
  MOD_RES (96)..(96): Selenocysteine
  MOD_RES (137)..(137): Selenocysteine
  MOD_RES (144)..(145): Selenocysteine
FFEKPDYEYLRXLFXDLFEKKGYXFDYAYDWVGRPIPXPVGSVHVDSGASAIXRESHXHRDRPSQQQPLRNQVVSSXNGELNVDDPXGAHSNAPIXAHAEVEVVEEAKYVHLSRGLLSHGLKNLFCLFLSVCCSSQXGFLMLVXXAFFLNCFNFCMVP

SEQ ID NO: 7090 - protein, 138 aa, Homo sapiens
  MOD_RES (14)..(15): Selenocysteine
  MOD_RES (66)..(66): Selenocysteine
  MOD_RES (135)..(135): Selenocysteine
  MOD_RES (137)..(137): Selenocysteine
MDHPSREKDERQRXXKPMAQRSAHCSRPSGSSSSSGVLMVGPNFRVGKKIGCGNFGELRLGKNLYXNEYVAIKLEPIKSRAPQLHLEYRFYKQLGSAGEGLPQVYYFGPCGKYNAMVLELLGPSLEDLFDLCDRXFXL

SEQ ID NO: 7091 - protein, 183 aa, Homo sapiens
  MOD_RES (14)..(15): Selenocysteine
  MOD_RES (66)..(66): Selenocysteine
  MOD_RES (135)..(135): Selenocysteine
  MOD_RES (137)..(137): Selenocysteine
  MOD_RES (140)..(140): Selenocysteine
MDHPSREKDERQRXXKPMAQRSAHCSRPSGSSSSSGVLMVGPNFRVGKKIGCGNFGELRLGKNLYXNEYVAIKLEPIKSRAPQLHLEYRFYKQLGSAGEGLPQVYYFGPCGKYNAMVLELLGPSLEDLFDLCDRXFXLKXVLMIAIQLLSRMEYVHSKNLIYRDVKPENFLIGRQGNKKEHVI

SEQ ID NO: 7092 - protein, 393 aa, Homo sapiens
  MOD_RES (14)..(15): Selenocysteine
  MOD_RES (66)..(66): Selenocysteine
  MOD_RES (135)..(135): Selenocysteine
  MOD_RES (137)..(137): Selenocysteine
  MOD_RES (140)..(140): Selenocysteine
  MOD_RES (199)..(199): Selenocysteine
  MOD_RES (212)..(212): Selenocysteine
  MOD_RES (214)..(214): Selenocysteine
  MOD_RES (222)..(222): Selenocysteine
  MOD_RES (258)..(258): Selenocysteine
  MOD_RES (269)..(269): Selenocysteine
  MOD_RES (273)..(273): Selenocysteine
  MOD_RES (288)..(288): Selenocysteine
  MOD_RES (309)..(309): Selenocysteine
  MOD_RES (312)..(312): Selenocysteine
  MOD_RES (321)..(321): Selenocysteine
  MOD_RES (335)..(335): Selenocysteine
  MOD_RES (350)..(350): Selenocysteine
  MOD_RES (355)..(355): Selenocysteine
  MOD_RES (373)..(373): Selenocysteine
  MOD_RES (375)..(375): Selenocysteine
  MOD_RES (393)..(393): Selenocysteine
MDHPSREKDERQRXXKPMAQRSAHCSRPSGSSSSSGVLMVGPNFRVGKKIGCGNFGELRLGKNLYXNEYVAIKLEPIKSRAPQLHLEYRFYKQLGSAGEGLPQVYYFGPCGKYNAMVLELLGPSLEDLFDLCDRXFXLKXVLMIAIQLLSRMEYVHSKNLIYRDVKPENFLIGRQGNKKEHVIHIIDFGLAKEYIDPEXKKHIPYREHKSLXGXARYMSINXHLGKEQSRRDDLEALGHMFMYFLRGSLPWQGLKADXLKERYQKIGDXKRNXPIEALCENFPEEMAXYLRYVRRLDFFEKPDYEYLRXLFXDLFEKKGYXFDYAYDWVGRPIPXPVGSVHVDSGASAIXRESHXHRDRPSQQQPLRNQSLRXVXAEHYDVNNSAIWHRGRGX

SEQ ID NO: 7093 - protein, 422 aa, Homo sapiens
  MOD_RES (14)..(15): Selenocysteine
  MOD_RES (66)..(66): Selenocysteine
  MOD_RES (135)..(135): Selenocysteine
  MOD_RES (137)..(137): Selenocysteine
  MOD_RES (140)..(140): Selenocysteine
  MOD_RES (199)..(199): Selenocysteine
  MOD_RES (212)..(212): Selenocysteine
  MOD_RES (214)..(214): Selenocysteine
  MOD_RES (222)..(222): Selenocysteine
  MOD_RES (258)..(258): Selenocysteine
  MOD_RES (269)..(269): Selenocysteine
  MOD_RES (273)..(273): Selenocysteine
  MOD_RES (288)..(288): Selenocysteine
  MOD_RES (309)..(309): Selenocysteine
  MOD_RES (312)..(312): Selenocysteine
  MOD_RES (321)..(321): Selenocysteine
  MOD_RES (335)..(335): Selenocysteine
  MOD_RES (350)..(350): Selenocysteine
  MOD_RES (355)..(355): Selenocysteine
  MOD_RES (374)..(374): Selenocysteine
  MOD_RES (384)..(384): Selenocysteine
  MOD_RES (393)..(393): Selenocysteine
  MOD_RES (417)..(417): Selenocysteine
MDHPSREKDERQRXXKPMAQRSAHCSRPSGSSSSSGVLMVGPNFRVGKKIGCGNFGELRLGKNLYXNEYVAIKLEPIKSRAPQLHLEYRFYKQLGSAGEGLPQVYYFGPCGKYNAMVLELLGPSLEDLFDLCDRXFXLKXVLMIAIQLLSRMEYVHSKNLIYRDVKPENFLIGRQGNKKEHVIHIIDFGLAKEYIDPEXKKHIPYREHKSLXGXARYMSINXHLGKEQSRRDDLEALGHMFMYFLRGSLPWQGLKADXLKERYQKIGDXKRNXPIEALCENFPEEMAXYLRYVRRLDFFEKPDYEYLRXLFXDLFEKKGYXFDYAYDWVGRPIPXPVGSVHVDSGASAIXRESHXHRDRPSQQQPLRNQVVSSXNGELNVDDPXGAHSNAPIXAHAEVEVVEEAKCCCFFKRKRKKXAQRHK

SEQ ID NO: 7094 - protein, 422 aa, Homo sapiens
  MOD_RES (14)..(15): Selenocysteine
  MOD_RES (66)..(66): Selenocysteine
  MOD_RES (135)..(135): Selenocysteine
  MOD_RES (137)..(137): Selenocysteine
  MOD_RES (140)..(140): Selenocysteine
  MOD_RES (199)..(199): Selenocysteine
  MOD_RES (212)..(212): Selenocysteine
  MOD_RES (214)..(214): Selenocysteine
  MOD_RES (222)..(222): Selenocysteine
  MOD_RES (258)..(258): Selenocysteine
  MOD_RES (269)..(269): Selenocysteine
  MOD_RES (273)..(273): Selenocysteine
  MOD_RES (288)..(288): Selenocysteine
  MOD_RES (309)..(309): Selenocysteine
  MOD_RES (312)..(312): Selenocysteine
  MOD_RES (321)..(321): Selenocysteine
  MOD_RES (335)..(335): Selenocysteine
  MOD_RES (350)..(350): Selenocysteine
  MOD_RES (355)..(355): Selenocysteine
  MOD_RES (374)..(374): Selenocysteine
  MOD_RES (391)..(391): Selenocysteine
  MOD_RES (410)..(410): Selenocysteine
  MOD_RES (419)..(419): Selenocysteine
  MOD_RES (421)..(421): Selenocysteine
MDHPSREKDERQRXXKPMAQRSAHCSRPSGSSSSSGVLMVGPNFRVGKKIGCGNFGELRLGKNLYXNEYVAIKLEPIKSRAPQLHLEYRFYKQLGSAGEGLPQVYYFGPCGKYNAMVLELLGPSLEDLFDLCDRXFXLKXVLMIAIQLLSRMEYVHSKNLIYRDVKPENFLIGRQGNKKEHVIHIIDFGLAKEYIDPEXKKHIPYREHKSLXGXARYMSINXHLGKEQSRRDDLEALGHMFMYFLRGSLPWQGLKADXLKERYQKIGDXKRNXPIEALCENFPEEMAXYLRYVRRLDFFEKPDYEYLRXLFXDLFEKKGYXFDYAYDWVGRPIPXPVGSVHVDSGASAIXRESHXHRDRPSQQQPLRNQPRSLXSRVFCPAVRPLFPLPSXHINRNNVLEMKPGGRSSYXCKRSLIGSXLXR

SEQ ID NO: 7095 - protein, 430 aa, Homo sapiens
  MOD_RES (14)..(15): Selenocysteine
  MOD_RES (66)..(66): Selenocysteine
  MOD_RES (135)..(135): Selenocysteine
  MOD_RES (137)..(137): Selenocysteine
  MOD_RES (140)..(140): Selenocysteine
  MOD_RES (199)..(199): Selenocysteine
  MOD_RES (212)..(212): Selenocysteine
  MOD_RES (214)..(214): Selenocysteine
  MOD_RES (222)..(222): Selenocysteine
  MOD_RES (258)..(258): Selenocysteine
  MOD_RES (269)..(269): Selenocysteine
  MOD_RES (273)..(273): Selenocysteine
  MOD_RES (288)..(288): Selenocysteine
  MOD_RES (309)..(309): Selenocysteine
  MOD_RES (312)..(312): Selenocysteine
  MOD_RES (321)..(321): Selenocysteine
  MOD_RES (335)..(335): Selenocysteine
  MOD_RES (350)..(350): Selenocysteine
  MOD_RES (355)..(355): Selenocysteine
  MOD_RES (374)..(374): Selenocysteine
  MOD_RES (384)..(384): Selenocysteine
  MOD_RES (393)..(393): Selenocysteine
  MOD_RES (425)..(425): Selenocysteine
MDHPSREKDERQRXXKPMAQRSAHCSRPSGSSSSSGVLMVGPNFRVGKKIGCGNFGELRLGKNLYXNEYVAIKLEPIKSRAPQLHLEYRFYKQLGSAGEGLPQVYYFGPCGKYNAMVLELLGPSLEDLFDLCDRXFXLKXVLMIAIQLLSRMEYVHSKNLIYRDVKPENFLIGRQGNKKEHVIHIIDFGLAKEYIDPEXKKHIPYREHKSLXGXARYMSINXHLGKEQSRRDDLEALGHMFMYFLRGSLPWQGLKADXLKERYQKIGDXKRNXPIEALCENFPEEMAXYLRYVRRLDFFEKPDYEYLRXLFXDLFEKKGYXFDYAYDWVGRPIPXPVGSVHVDSGASAIXRESHXHRDRPSQQQPLRNQVVSSXNGELNVDDPXGAHSNAPIXAHAEVEVVEEANCLKMLNLWCCCFFKRKRKKXAQRHK

SEQ ID NO: 7096 - protein, 438 aa, Homo sapiens
  MOD_RES (14)..(15): Selenocysteine
  MOD_RES (66)..(66): Selenocysteine
  MOD_RES (135)..(135): Selenocysteine
  MOD_RES (137)..(137): Selenocysteine
  MOD_RES (140)..(140): Selenocysteine
  MOD_RES (199)..(199): Selenocysteine
  MOD_RES (212)..(212): Selenocysteine
  MOD_RES (214)..(214): Selenocysteine
  MOD_RES (222)..(222): Selenocysteine
  MOD_RES (258)..(258): Selenocysteine
  MOD_RES (269)..(269): Selenocysteine
  MOD_RES (273)..(273): Selenocysteine
  MOD_RES (288)..(288): Selenocysteine
  MOD_RES (309)..(309): Selenocysteine
  MOD_RES (312)..(312): Selenocysteine
  MOD_RES (321)..(321): Selenocysteine
  MOD_RES (335)..(335): Selenocysteine
  MOD_RES (350)..(350): Selenocysteine
  MOD_RES (355)..(355): Selenocysteine
  MOD_RES (374)..(374): Selenocysteine
  MOD_RES (384)..(384): Selenocysteine
  MOD_RES (393)..(393): Selenocysteine
MDHPSREKDERQRXXKPMAQRSAHCSRPSGSSSSSGVLMVGPNFRVGKKIGCGNFGELRLGKNLYXNEYVAIKLEPIKSRAPQLHLEYRFYKQLGSAGEGLPQVYYFGPCGKYNAMVLELLGPSLEDLFDLCDRXFXLKXVLMIAIQLLSRMEYVHSKNLIYRDVKPENFLIGRQGNKKEHVIHIIDFGLAKEYIDPEXKKHIPYREHKSLXGXARYMSINXHLGKEQSRRDDLEALGHMFMYFLRGSLPWQGLKADXLKERYQKIGDXKRNXPIEALCENFPEEMAXYLRYVRRLDFFEKPDYEYLRXLFXDLFEKKGYXFDYAYDWVGRPIPXPVGSVHVDSGASAIXRESHXHRDRPSQQQPLRNQVVSSXNGELNVDDPXGAHSNAPIXAHAEVEVVEEAKCIMFHKPWHWSQSSAVKMKFVVFLNMNVNFKCI

SEQ ID NO: 7097 - protein, 459 aa, Homo sapiens
  MOD_RES (14)..(15): Selenocysteine
  MOD_RES (66)..(66): Selenocysteine
  MOD_RES (135)..(135): Selenocysteine
  MOD_RES (137)..(137): Selenocysteine
  MOD_RES (140)..(140): Selenocysteine
  MOD_RES (199)..(199): Selenocysteine
  MOD_RES (212)..(212): Selenocysteine
  MOD_RES (214)..(214): Selenocysteine
  MOD_RES (222)..(222): Selenocysteine
  MOD_RES (258)..(258): Selenocysteine
  MOD_RES (269)..(269): Selenocysteine
  MOD_RES (273)..(273): Selenocysteine
  MOD_RES (288)..(288): Selenocysteine
  MOD_RES (309)..(309): Selenocysteine
  MOD_RES (312)..(312): Selenocysteine
  MOD_RES (321)..(321): Selenocysteine
  MOD_RES (335)..(335): Selenocysteine
  MOD_RES (350)..(350): Selenocysteine
  MOD_RES (355)..(355): Selenocysteine
  MOD_RES (387)..(387): Selenocysteine
  MOD_RES (389)..(389): Selenocysteine
  MOD_RES (393)..(393): Selenocysteine
  MOD_RES (411)..(411): Selenocysteine
  MOD_RES (421)..(421): Selenocysteine
  MOD_RES (430)..(430): Selenocysteine
  MOD_RES (454)..(454): Selenocysteine
MDHPSREKDERQRXXKPMAQRSAHCSRPSGSSSSSGVLMVGPNFRVGKKIGCGNFGELRLGKNLYXNEYVAIKLEPIKSRAPQLHLEYRFYKQLGSAGEGLPQVYYFGPCGKYNAMVLELLGPSLEDLFDLCDRXFXLKXVLMIAIQLLSRMEYVHSKNLIYRDVKPENFLIGRQGNKKEHVIHIIDFGLAKEYIDPEXKKHIPYREHKSLXGXARYMSINXHLGKEQSRRDDLEALGHMFMYFLRGSLPWQGLKADXLKERYQKIGDXKRNXPIEALCENFPEEMAXYLRYVRRLDFFEKPDYEYLRXLFXDLFEKKGYXFDYAYDWVGRPIPXPVGSVHVDSGASAIXRESHXHRDRPSQQQPLRNQNVSSERRGEWEIQPSRQXNXSYLXSHLAADRHGGSVQVVSSXNGELNVDDPXGAHSNAPIXAHAEVEVVEEAKCCCFFKRKRKKXAQRHK

SEQ ID NO: 7098 - protein, 475 aa, Homo sapiens
  MOD_RES (14)..(15): Selenocysteine
  MOD_RES (66)..(66): Selenocysteine
  MOD_RES (135)..(135): Selenocysteine
  MOD_RES (137)..(137): Selenocysteine
  MOD_RES (140)..(140): Selenocysteine
  MOD_RES (199)..(199): Selenocysteine
  MOD_RES (212)..(212): Selenocysteine
  MOD_RES (214)..(214): Selenocysteine
  MOD_RES (222)..(222): Selenocysteine
  MOD_RES (258)..(258): Selenocysteine
  MOD_RES (269)..(269): Selenocysteine
  MOD_RES (273)..(273): Selenocysteine
  MOD_RES (288)..(288): Selenocysteine
  MOD_RES (309)..(309): Selenocysteine
  MOD_RES (312)..(312): Selenocysteine
  MOD_RES (321)..(321): Selenocysteine
  MOD_RES (335)..(335): Selenocysteine
  MOD_RES (350)..(350): Selenocysteine
  MOD_RES (355)..(355): Selenocysteine
  MOD_RES (387)..(387): Selenocysteine
  MOD_RES (389)..(389): Selenocysteine
  MOD_RES (393)..(393): Selenocysteine
  MOD_RES (411)..(411): Selenocysteine
  MOD_RES (421)..(421): Selenocysteine
  MOD_RES (430)..(430): Selenocysteine
MDHPSREKDERQRXXKPMAQRSAHCSRPSGSSSSSGVLMVGPNFRVGKKIGCGNFGELRLGKNLYXNEYVAIKLEPIKSRAPQLHLEYRFYKQLGSAGEGLPQVYYFGPCGKYNAMVLELLGPSLEDLFDLCDRXFXLKXVLMIAIQLLSRMEYVHSKNLIYRDVKPENFLIGRQGNKKEHVIHIIDFGLAKEYIDPEXKKHIPYREHKSLXGXARYMSINXHLGKEQSRRDDLEALGHMFMYFLRGSLPWQGLKADXLKERYQKIGDXKRNXPIEALCENFPEEMAXYLRYVRRLDFFEKPDYEYLRXLFXDLFEKKGYXFDYAYDWVGRPIPXPVGSVHVDSGASAIXRESHXHRDRPSQQQPLRNQNVSSERRGEWEIQPSRQXNXSYLXSHLAADRHGGSVQVVSSXNGELNVDDPXGAHSNAPIXAHAEVEVVEEAKCIMFHKPWHWSQSSAVKMKFVVFLNMNVNFKCI

SEQ ID NO: 7099 - protein, 114 aa, Homo sapiens
  MOD_RES (14)..(15): Selenocysteine
  MOD_RES (66)..(66): Selenocysteine
  MOD_RES (83)..(83): Selenocysteine
  MOD_RES (104)..(104): Selenocysteine
  MOD_RES (107)..(107): Selenocysteine
  MOD_RES (110)..(110): Selenocysteine
MDHPSREKDERQRXXKPMAQRSAHCSRPSGSSSSSGVLMVGPNFRVGKKIGCGNFGELRLGKNLYXNEYVAIKLVKVSHRCIXLDHVGNIMPWCWSSLALAWRXCLXSVXEHLL

SEQ ID NO: 7100 - protein, 77 aa, Homo sapiens
  MOD_RES (14)..(15): Selenocysteine
  MOD_RES (62)..(62): Selenocysteine
  MOD_RES (66)..(66): Selenocysteine
  MOD_RES (69)..(69): Selenocysteine
MDHPSREKDERQRXXKPMAQRSAHCSRPSGSSSSSGVLMVGPNFRVGKKIGCGNFGELRLGXNKIXCSXASFRVQIL

SEQ ID NO: 7101 - protein, 204 aa, Homo sapiens
  MOD_RES (6)..(6): Selenocysteine
  MOD_RES (10)..(10): Selenocysteine
  MOD_RES (25)..(25): Selenocysteine
  MOD_RES (46)..(46): Selenocysteine
  MOD_RES (49)..(49): Selenocysteine
  MOD_RES (58)..(58): Selenocysteine
  MOD_RES (72)..(72): Selenocysteine
  MOD_RES (87)..(87): Selenocysteine
  MOD_RES (92)..(92): Selenocysteine
  MOD_RES (124)..(124): Selenocysteine
  MOD_RES (126)..(126): Selenocysteine
  MOD_RES (130)..(130): Selenocysteine
  MOD_RES (148)..(148): Selenocysteine
  MOD_RES (158)..(158): Selenocysteine
  MOD_RES (167)..(167): Selenocysteine
  MOD_RES (199)..(199): Selenocysteine
QKIGDXKRNXPIEALCENFPEEMAXYLRYVRRLDFFEKPDYEYLRXLFXDLFEKKGYXFDYAYDWVGRPIPXPVGSVHVDSGASAIXRESHXHRDRPSQQQPLRNQNVSSERRGEWEIQPSRQXNXSYLXSHLAADRHGGSVQVVSSXNGELNVDDPXGAHSNAPIXAHAEVEVVEEANCLKMLNLWCCCFFKRKRKKXAQRHK

SEQ ID NO: 7102 - protein, 36 aa, Homo sapiens
  MOD_RES (1)..(1): Any amino acid
  MOD_RES (14)..(14): Selenocysteine
  MOD_RES (19)..(19): Selenocysteine
  MOD_RES (35)..(35): Selenocysteine
XGSVHVDSGASAIXRESHXHRDRPSQQQPLRNQSXV

SEQ ID NO: 7103 - protein, 114 aa, Homo sapiens
  MOD_RES (18)..(18): Selenocysteine
  MOD_RES (29)..(29): Selenocysteine
  MOD_RES (33)..(33): Selenocysteine
  MOD_RES (48)..(48): Selenocysteine
  MOD_RES (72)..(72): Selenocysteine
  MOD_RES (93)..(93): Selenocysteine
  MOD_RES (95)..(95): Selenocysteine
  MOD_RES (104)..(104): Selenocysteine
  MOD_RES (109)..(109): Selenocysteine
  MOD_RES (112)..(112): Selenocysteine
FMYFLRGSLPWQGLKADXLKERYQKIGDXKRAXPIEVLCENFPEEMAXYLRYVRRLDFFEKPDYDYLRKLFXDLFDRSGFVFDYDRPPSAPSXPXCPPSLSSGXKPSRXAKXRR

SEQ ID NO: 7104 - protein, 76 aa, Homo sapiens
  MOD_RES (12)..(12): Selenocysteine
  MOD_RES (35)..(35): Selenocysteine
  MOD_RES (68)..(68): Selenocysteine
MDFDKKGGKGEXEEGRRMSKAGGGRSSHGIRSSGXSSGVLMVGPNFRVGKKIGCGNFGELRLGKNLYXNEYVAIKL

SEQ ID NO: 7105 - protein, 415 aa, Homo sapiens
  MOD_RES (12)..(12): Selenocysteine
  MOD_RES (35)..(35): Selenocysteine
  MOD_RES (68)..(68): Selenocysteine
  MOD_RES (99)..(99): Selenocysteine
  MOD_RES (136)..(136): Selenocysteine
  MOD_RES (138)..(138): Selenocysteine
  MOD_RES (141)..(141): Selenocysteine
  MOD_RES (151)..(151): Selenocysteine
  MOD_RES (158)..(158): Selenocysteine
  MOD_RES (178)..(178): Selenocysteine
  MOD_RES (200)..(200): Selenocysteine
  MOD_RES (213)..(213): Selenocysteine
  MOD_RES (215)..(215): Selenocysteine
  MOD_RES (223)..(223): Selenocysteine
  MOD_RES (259)..(259): Selenocysteine
  MOD_RES (270)..(270): Selenocysteine
  MOD_RES (274)..(274): Selenocysteine
  MOD_RES (289)..(289): Selenocysteine
  MOD_RES (313)..(313): Selenocysteine
  MOD_RES (336)..(336): Selenocysteine
  MOD_RES (340)..(340): Selenocysteine
  MOD_RES (343)..(343): Selenocysteine
  MOD_RES (355)..(355): Selenocysteine
  MOD_RES (367)..(367): Selenocysteine
  MOD_RES (377)..(377): Selenocysteine
  MOD_RES (386)..(386): Selenocysteine
  MOD_RES (397)..(397): Selenocysteine
MDFDKKGGKGEXEEGRRMSKAGGGRSSHGIRSSGXSSGVLMVGPNFRVGKKIGCGNFGELRLGKNLYXNEYVAIKLEPIKSRAPQLHLEYRFYKQLSAXEGVPQVYYFGPCGKYNAMVLELLGPSLEDLFDLCDRXFXLKXVLMIAIQLIXRMEYVHXKSLIYRDVKPENFLVGRPGXKRQHAIHIIDFGLAKEYIDPEXKKHIPYREHKSLXGXARYMSINXHLGKEQSRRDDLEALGHMFMYFLRGSLPWQGLKADXLKERYQKIGDXKRAXPIEVLCENFPEEMAXYLRYVRRLDFFEKPDYDYLRKLFXDLFDRSGFVFDYEYDWAGKPLPXPIGXVHXDLPSQPQLRDKXQPHSKNQALNSXNGELNADDPXAGHSNAPIXAPAEVEVADEXKCCCFFKRRKRKSLQRHK

SEQ ID NO: 7106 - protein, 84 aa, Homo sapiens
  MOD_RES (12)..(12): Selenocysteine
  MOD_RES (35)..(35): Selenocysteine
MDFDKKGGKGEXEEGRRMSKAGGGRSSHGIRSSGXSSGVLMVGPNFRVGKKIGCGNFGELRLGWFQRCWGKAEGKHERLQGQGA

SEQ ID NO: 7107 - protein, 101 aa, Homo sapiens
  MOD_RES (1)..(1): Any amino acid
  MOD_RES (9)..(9): Selenocysteine
  MOD_RES (24)..(24): Selenocysteine
  MOD_RES (35)..(35): Selenocysteine
  MOD_RES (39)..(39): Selenocysteine
  MOD_RES (54)..(54): Selenocysteine
  MOD_RES (78)..(78): Selenocysteine
  MOD_RES (101)..(101): Selenocysteine
XRPGRRAGXQGGSKADHRPPQADXLKERYQKIGDXKRAXPIEVLCENFPEEMAXYLRYVRRLDFFEKPDYDYLRKLFXDLFDRSGFVFDYEYDWAGKPLPX

SEQ ID NO: 7108 - protein, 299 aa, Homo sapiens
  MOD_RES (1)..(1): Any amino acid
  MOD_RES (18)..(18): Selenocysteine
  MOD_RES (51)..(51): Selenocysteine
  MOD_RES (67)..(67): Selenocysteine
  MOD_RES (80)..(80): Selenocysteine
  MOD_RES (114)..(114): Selenocysteine
  MOD_RES (151)..(151): Selenocysteine
  MOD_RES (153)..(153): Selenocysteine
  MOD_RES (156)..(156): Selenocysteine
  MOD_RES (166)..(166): Selenocysteine
  MOD_RES (173)..(173): Selenocysteine
  MOD_RES (193)..(193): Selenocysteine
  MOD_RES (215)..(215): Selenocysteine
  MOD_RES (228)..(228): Selenocysteine
  MOD_RES (230)..(230): Selenocysteine
  MOD_RES (238)..(238): Selenocysteine
  MOD_RES (274)..(274): Selenocysteine
  MOD_RES (285)..(285): Selenocysteine
  MOD_RES (289)..(289): Selenocysteine
XSKAGGGRSSHGIRSSGXSSGVLMVGPNFRVGKKIGCGNFGELRLGKNLYXNEYVAIKLVSRPLHPXPADVPPRDFRAAXRSPGDSLLCPQEPIKSRAPQLHLEYRFYKQLSAXEGVPQVYYFGPCGKYNAMVLELLGPSLEDLFDLCDRXFXLKXVLMIAIQLIXRMEYVHXKSLIYRDVKPENFLVGRPGXKRQHAIHIIDFGLAKEYIDPEXKKHIPYREHKSLXGXARYMSINXHLGKEQSRRDDLEALGHMFMYFLRGSLPWQGLKADXLKERYQKIGDXKRAXPIEVLCENFP

SEQ ID NO: 7109 - protein, 235 aa, Homo sapiens
  MOD_RES (1)..(1): Any amino acid
  MOD_RES (20)..(20): Selenocysteine
  MOD_RES (22)..(22): Selenocysteine
  MOD_RES (42)..(42): Selenocysteine
  MOD_RES (87)..(87): Selenocysteine
  MOD_RES (89)..(89): Selenocysteine
  MOD_RES (92)..(92): Selenocysteine
  MOD_RES (102)..(102): Selenocysteine
  MOD_RES (109)..(109): Selenocysteine
  MOD_RES (129)..(129): Selenocysteine
  MOD_RES (151)..(151): Selenocysteine
  MOD_RES (164)..(164): Selenocysteine
  MOD_RES (166)..(166): Selenocysteine
  MOD_RES (174)..(174): Selenocysteine
  MOD_RES (210)..(210): Selenocysteine
  MOD_RES (221)..(221): Selenocysteine
  MOD_RES (225)..(225): Selenocysteine
XSRAPQLHLEYRFYKQLSAXGXGRPAGGAGAAQGQGGGCRRXPVRLSSAAEGVPQVYYFGPCGKYNAMVLELLGPSLEDLFDLCDRXFXLKXVLMIAIQLIXRMEYVHXKSLIYRDVKPENFLVGRPGXKRQHAIHIIDFGLAKEYIDPEXKKHIPYREHKSLXGXARYMSINXHLGKEQSRRDDLEALGHMFMYFLRGSLPWQGLKADXLKERYQKIGDXKRAXPIEVLCENFP

SEQ ID NO: 7110 - protein, 206 aa, Homo sapiens
  MOD_RES (1)..(1): Any amino acid
  MOD_RES (20)..(20): Selenocysteine
  MOD_RES (22)..(22): Selenocysteine
  MOD_RES (42)..(42): Selenocysteine
  MOD_RES (87)..(87): Selenocysteine
  MOD_RES (89)..(89): Selenocysteine
  MOD_RES (92)..(92): Selenocysteine
  MOD_RES (102)..(102): Selenocysteine
  MOD_RES (109)..(109): Selenocysteine
  MOD_RES (129)..(129): Selenocysteine
  MOD_RES (151)..(151): Selenocysteine
  MOD_RES (164)..(164): Selenocysteine
  MOD_RES (166)..(166): Selenocysteine
  MOD_RES (174)..(174): Selenocysteine
  MOD_RES (194)..(194): Selenocysteine
XSRAPQLHLEYRFYKQLSAXGXGRPAGGAGAAQGQGGGCRRXPVRLSSAAEGVPQVYYFGPCGKYNAMVLELLGPSLEDLFDLCDRXFXLKXVLMIAIQLIXRMEYVHXKSLIYRDVKPENFLVGRPGXKRQHAIHIIDFGLAKEYIDPEXKKHIPYREHKSLXGXARYMSINXHLGKGRHAQGAVPEDRGHQXRHAHRGALRELP

SEQ ID NO: 7111 - protein, 423 aa, Homo sapiens
  MOD_RES (26)..(26): Selenocysteine
  MOD_RES (29)..(29): Selenocysteine
  MOD_RES (65)..(65): Selenocysteine
  MOD_RES (133)..(133): Selenocysteine
  MOD_RES (138)..(138): Selenocysteine
  MOD_RES (177)..(177): Selenocysteine
  MOD_RES (197)..(197): Selenocysteine
  MOD_RES (210)..(210): Selenocysteine
  MOD_RES (212)..(212): Selenocysteine
  MOD_RES (220)..(220): Selenocysteine
  MOD_RES (256)..(256): Selenocysteine
  MOD_RES (267)..(267): Selenocysteine
  MOD_RES (271)..(271): Selenocysteine
  MOD_RES (285)..(285): Selenocysteine
  MOD_RES (309)..(309): Selenocysteine
  MOD_RES (332)..(332): Selenocysteine
  MOD_RES (367)..(367): Selenocysteine
  MOD_RES (373)..(373): Selenocysteine
  MOD_RES (377)..(377): Selenocysteine
  MOD_RES (386)..(386): Selenocysteine
  MOD_RES (389)..(389): Selenocysteine
  MOD_RES (397)..(397): Selenocysteine
  MOD_RES (418)..(418): Selenocysteine
MENKKKDKDKSDDRMARPSGRSGHNXRGXGSSSSGVLMVGPNFRVGKKIGCGNFGELRLGKNLYXNEYVAIKLEPMKSRAPQLHLEYRFYKQLGSGDGIPQVYYFGPCGKYNAMVLELLGPSLEDLFDLCDRXFSLKXVLMIAIQLISRMEYVHSKNLIYRDVKPENFLIGRPGNKXQQVIHIIDFGLAKEYIDPEXKKHIPYREHKSLXGXARYMSINXHLGKEQSRRDDLEALGHMFMYFLRGSLPWQGLKADXLKERYQKIGDXKRAXPIEVLCENFPEMAXYLRYVRRLDFFEKPDYDYLRKLFXDLFDRKGYMFDYEYDWIGKQLPXPVGAVQQDPALSSNREAHQHRDKMQQSKNQVVSSXNGELNXDDPXAGRSNAPIXAPXEVEVMDEXNCQKVLNMWCCCFFKRRKRKXIQRHK

SEQ ID NO: 7112 - protein, 424 aa, Homo sapiens
  MOD_RES (26)..(26): Selenocysteine
  MOD_RES (29)..(29): Selenocysteine
  MOD_RES (65)..(65): Selenocysteine
  MOD_RES (133)..(133): Selenocysteine
  MOD_RES (138)..(138): Selenocysteine
  MOD_RES (177)..(177): Selenocysteine
  MOD_RES (197)..(197): Selenocysteine
  MOD_RES (210)..(210): Selenocysteine
  MOD_RES (212)..(212): Selenocysteine
  MOD_RES (220)..(220): Selenocysteine
  MOD_RES (256)..(256): Selenocysteine
  MOD_RES (267)..(267): Selenocysteine
  MOD_RES (271)..(271): Selenocysteine
  MOD_RES (286)..(286): Selenocysteine
  MOD_RES (310)..(310): Selenocysteine
  MOD_RES (333)..(333): Selenocysteine
  MOD_RES (368)..(368): Selenocysteine
  MOD_RES (374)..(374): Selenocysteine
  MOD_RES (378)..(378): Selenocysteine
  MOD_RES (387)..(387): Selenocysteine
  MOD_RES (390)..(390): Selenocysteine
  MOD_RES (398)..(398): Selenocysteine
  MOD_RES (419)..(419): Selenocysteine
MENKKKDKDKSDDRMARPSGRSGHNXRGXGSSSSGVLMVGPNFRVGKKIGCGNFGELRLGKNLYXNEYVAIKLEPMKSRAPQLHLEYRFYKQLGSGDGIPQVYYFGPCGKYNAMVLELLGPSLEDLFDLCDRXFSLKXVLMIAIQLISRMEYVHSKNLIYRDVKPENFLIGRPGNKXQQVIHIIDFGLAKEYIDPEXKKHIPYREHKSLXGXARYMSINXHLGKEQSRRDDLEALGHMFMYFLRGSLPWQGLKADXLKERYQKIGDXKRAXPIEVLCENFPEEMAXYLRYVRRLDFFEKPDYDYLRKLFXDLFDRKGYMFDYEYDWIGKQLPXPVGAVQQDPALSSNREAHQHRDKMQQSKNQVVSSXNGELNXDDPXAGRSNAPIXAPXEVEVMDEXNCQKVLNMWCCCFFKRRKRKXIQRHK

SEQ ID NO: 7113 - protein, 447 aa, Homo sapiens
  MOD_RES (26)..(26): Selenocysteine
  MOD_RES (29)..(29): Selenocysteine
  MOD_RES (65)..(65): Selenocysteine
  MOD_RES (133)..(133): Selenocysteine
  MOD_RES (138)..(138): Selenocysteine
  MOD_RES (177)..(177): Selenocysteine
  MOD_RES (197)..(197): Selenocysteine
  MOD_RES (210)..(210): Selenocysteine
  MOD_RES (212)..(212): Selenocysteine
  MOD_RES (220)..(220): Selenocysteine
  MOD_RES (256)..(256): Selenocysteine
  MOD_RES (267)..(267): Selenocysteine
  MOD_RES (271)..(271): Selenocysteine
  MOD_RES (285)..(285): Selenocysteine
  MOD_RES (309)..(309): Selenocysteine
  MOD_RES (332)..(332): Selenocysteine
  MOD_RES (399)..(399): Selenocysteine
  MOD_RES (405)..(405): Selenocysteine
  MOD_RES (409)..(409): Selenocysteine
  MOD_RES (418)..(418): Selenocysteine
  MOD_RES (421)..(421): Selenocysteine
  MOD_RES (429)..(429): Selenocysteine
  MOD_RES (442)..(442): Selenocysteine
MENKKKDKDKSDDRMARPSGRSGHNXRGXGSSSSGVLMVGPNFRVGKKIGCGNFGELRLGKNLYXNEYVAIKLEPMKSRAPQLHLEYRFYKQLGSGDGIPQVYYFGPCGKYNAMVLELLGPSLEDLFDLCDRXFSLKXVLMIAIQLISRMEYVHSKNLIYRDVKPENFLIGRPGNKXQQVIHIIDFGLAKEYIDPEXKKHIPYREHKSLXGXARYMSINXHLGKEQSRRDDLEALGHMFMYFLRGSLPWQGLKADXLKERYQKIGDXKRAXPIEVLCENFPEMAXYLRYVRRLDFFEKPDYDYLRKLFXDLFDRKGYMFDYEYDWIGKQLPXPVGAVQQDPALSSNREAHQHRDKMQQSKNQSADHRAAWDSQQANPHHLRAHLAADRHGGSVQVVSSXNGELNXDDPXAGRSNAPIXAPXEVEVMDEXKCCCFFKRRKRKXIQRHK

SEQ ID NO: 7114 - protein, 455 aa, Homo sapiens
  MOD_RES (26)..(26): Selenocysteine
  MOD_RES (29)..(29): Selenocysteine
  MOD_RES (65)..(65): Selenocysteine
  MOD_RES (133)..(133): Selenocysteine
  MOD_RES (138)..(138): Selenocysteine
  MOD_RES (177)..(177): Selenocysteine
  MOD_RES (197)..(197): Selenocysteine
  MOD_RES (210)..(210): Selenocysteine
  MOD_RES (212)..(212): Selenocysteine
  MOD_RES (220)..(220): Selenocysteine
  MOD_RES (256)..(256): Selenocysteine
  MOD_RES (267)..(267): Selenocysteine
  MOD_RES (271)..(271): Selenocysteine
  MOD_RES (285)..(285): Selenocysteine
  MOD_RES (309)..(309): Selenocysteine
  MOD_RES (332)..(332): Selenocysteine
  MOD_RES (399)..(399): Selenocysteine
  MOD_RES (405)..(405): Selenocysteine
  MOD_RES (409)..(409): Selenocysteine
  MOD_RES (418)..(418): Selenocysteine
  MOD_RES (421)..(421): Selenocysteine
  MOD_RES (429)..(429): Selenocysteine
  MOD_RES (450)..(450): Selenocysteine
MENKKKDKDKSDDRMARPSGRSGHNXRGXGSSSSGVLMVGPNFRVGKKIGCGNFGELRLGKNLYXNEYVAIKLEPMKSRAPQLHLEYRFYKQLGSGDGIPQVYYFGPCGKYNAMVLELLGPSLEDLFDLCDRXFSLKXVLMIAIQLISRMEYVHSKNLIYRDVKPENFLIGRPGNKXQQVIHIIDFGLAKEYIDPEXKKHIPYREHKSLXGXARYMSINXHLGKEQSRRDDLEALGHMFMYFLRGSLPWQGLKADXLKERYQKIGDXKRAXPIEVLCENFPEMAXYLRYVRRLDFFEKPDYDYLRKLFXDLFDRKGYMFDYEYDWIGKQLPXPVGAVQQDPALSSNREAHQHRDKMQQSKNQSADHRAAWDSQQANPHHLRAHLAADRHGGSVQVVSSXNGELNXDDPXAGRSNAPIXAPXEVEVMDEXNCQKVLNMWCCCFFKRRKRKXIQRHK

SEQ ID NO: 7115 - protein, 348 aa, Homo sapiens
  MOD_RES (58)..(58): Selenocysteine
  MOD_RES (63)..(63): Selenocysteine
  MOD_RES (102)..(102): Selenocysteine
  MOD_RES (122)..(122): Selenocysteine
  MOD_RES (135)..(135): Selenocysteine
  MOD_RES (137)..(137): Selenocysteine
  MOD_RES (145)..(145): Selenocysteine
  MOD_RES (181)..(181): Selenocysteine
  MOD_RES (192)..(192): Selenocysteine
  MOD_RES (196)..(196): Selenocysteine
  MOD_RES (210)..(210): Selenocysteine
  MOD_RES (234)..(234): Selenocysteine
  MOD_RES (257)..(257): Selenocysteine
  MOD_RES (292)..(292): Selenocysteine
  MOD_RES (298)..(298): Selenocysteine
  MOD_RES (302)..(302): Selenocysteine
  MOD_RES (311)..(311): Selenocysteine
  MOD_RES (314)..(314): Selenocysteine
  MOD_RES (322)..(322): Selenocysteine
  MOD_RES (343)..(343): Selenocysteine
MKSRAPQLHLEYRFYKQLGSGDGIPQVYYFGPCGKYNAMVLELLGPSLEDLFDLCDRXFSLKXVLMIAIQLISRMEYVHSKNLIYRDVKPENFLIGRPGNKXQQVIHIIDFGLAKEYIDPEXKKHIPYREHKSLXGXARYMSINXHLGKEQSRRDDLEALGHMFMYFLRGSLPWQGLKADXLKERYQKIGDXKRAXPIEVLCENFPEMAXYLRYVRRLDFFEKPDYDYLRKLFXDLFDRKGYMFDYEYDWIGKQLPXPVGAVQQDPALSSNREAHQHRDKMQQSKNQVVSSXNGELNXDDPXAGRSNAPIXAPXEVEVMDEXNCQKVLNMWCCCFFKRRKRKXIQRHK

SEQ ID NO: 7116 - protein, 311 aa, Homo sapiens
  MOD_RES (20)..(20): Selenocysteine
  MOD_RES (25)..(25): Selenocysteine
  MOD_RES (64)..(64): Selenocysteine
  MOD_RES (84)..(84): Selenocysteine
  MOD_RES (97)..(97): Selenocysteine
  MOD_RES (99)..(99): Selenocysteine
  MOD_RES (107)..(107): Selenocysteine
  MOD_RES (143)..(143): Selenocysteine
  MOD_RES (154)..(154): Selenocysteine
  MOD_RES (158)..(158): Selenocysteine
  MOD_RES (173)..(173): Selenocysteine
  MOD_RES (197)..(197): Selenocysteine
  MOD_RES (220)..(220): Selenocysteine
  MOD_RES (255)..(255): Selenocysteine
  MOD_RES (261)..(261): Selenocysteine
  MOD_RES (265)..(265): Selenocysteine
  MOD_RES (274)..(274): Selenocysteine
  MOD_RES (277)..(277): Selenocysteine
  MOD_RES (285)..(285): Selenocysteine
  MOD_RES (306)..(306): Selenocysteine
MVLELLGPSLEDLFDLCDRXFSLKXVLMIAIQLISRMEYVHSKNLIYRDVKPENFLIGRPGNKXQQVIHIIDFGLAKEYIDPEXKKHIPYREHKSLXGXARYMSINXHLGKEQSRRDDLEALGHMFMYFLRGSLPWQGLKADXLKERYQKIGDXKRAXPIEVLCENFPEEMAXYLRYVRRLDFFEKPDYDYLRKLFXDLFDRKGYMFDYEYDWIGKQLPXPVGAVQQDPALSSNREAHQHRDKMQQSKNQVVSSXNGELNXDDPXAGRSNAPIXAPXEVEVMDEXNCQKVLNMWCCCFFKRRKRKXIQRHK

SEQ ID NO: 7117 - protein, 164 aa, Homo sapiens
  MOD_RES (1)..(1): Any amino acid
  MOD_RES (4)..(4): Selenocysteine
  MOD_RES (15)..(15): Selenocysteine
  MOD_RES (19)..(19): Selenocysteine
  MOD_RES (34)..(34): Selenocysteine
  MOD_RES (58)..(58): Selenocysteine
  MOD_RES (81)..(81): Selenocysteine
  MOD_RES (116)..(116): Selenocysteine
  MOD_RES (122)..(122): Selenocysteine
  MOD_RES (126)..(126): Selenocysteine
  MOD_RES (135)..(135): Selenocysteine
  MOD_RES (138)..(138): Selenocysteine
  MOD_RES (146)..(146): Selenocysteine
  MOD_RES (159)..(159): Selenocysteine
XADXLKERYQKIGDXKRAXPIEVLCENFPEEMAXYLRYVRRLDFFEKPDYDYLRKLFXDLFDRKGYMFDYEYDWIGKQLPXPVGAVQQDPALSSNREAHQHRDKMQQSKNQVVSSXNGELNXDDPXAGRSNAPIXAPXEVEVMDEXKCCCFFKRRKRKXIQRHK

SEQ ID NO: 7118 - protein, 118 aa, Homo sapiens
  MOD_RES (59)..(59): Selenocysteine
  MOD_RES (71)..(71): Selenocysteine
  MOD_RES (89)..(89): Selenocysteine
DYIDKYNIELDPRFNDILGRHSRKRWERFVHSENQHLVSPEALDFLDKLLRYDHQSRLXAREAMEHPYFYXVVKDQARMGSSSMPGGSXPVSSANMMSEPQFEGQRDIHHAAVRLGQL

SEQ ID NO: 7119 - protein, 74 aa, Homo sapiens
  MOD_RES (13)..(13): Selenocysteine
  MOD_RES (17)..(17): Selenocysteine
  MOD_RES (60)..(60): Selenocysteine
MSGPVPSRARVYXDVNXHRPREYWDYESHVVEWGNQDDYQLVRKLGRGKYSEVFEAINIXNNEKVVVKILKPVK

SEQ ID NO: 7120 - protein, 80 aa, Homo sapiens
  MOD_RES (13)..(13): Selenocysteine
  MOD_RES (17)..(17): Selenocysteine
  MOD_RES (60)..(60): Selenocysteine
MSGPVPSRARVYXDVNXHRPREYWDYESHVVEWGNQDDYQLVRKLGRGKYSEVFEAINIXNNEKVVVKILKPVKKKKIKR

SEQ ID NO: 7121 - protein, 385 aa, Homo sapiens
  MOD_RES (13)..(13): Selenocysteine
  MOD_RES (17)..(17): Selenocysteine
  MOD_RES (60)..(60): Selenocysteine
  MOD_RES (96)..(96): Selenocysteine
  MOD_RES (108)..(108): Selenocysteine
  MOD_RES (119)..(119): Selenocysteine
  MOD_RES (127)..(127): Selenocysteine
  MOD_RES (129)..(129): Selenocysteine
  MOD_RES (251)..(251): Selenocysteine
  MOD_RES (314)..(314): Selenocysteine
  MOD_RES (326)..(326): Selenocysteine
  MOD_RES (344)..(344): Selenocysteine
  MOD_RES (371)..(371): Selenocysteine
MSGPVPSRARVYXDVNXHRPREYWDYESHVVEWGNQDDYQLVRKLGRGKYSEVFEAINIXNNEKVVVKILKPVKKKKIKREIKILENLRGGPNIIXLADIVKDPVSRXPALVFEHVNNXDFKQLYQXLXDYDIRFYMYEILKALDYCHSMGIMHRDVKPHNVMIDHEHRKLRLIDWGLAEFYHPGQEYNVRVASRYFKGPELLVDYQMYDYSLDMWSLGCMLASMIFRKEPFFHGHDNYDQLVRIAKVLGXEDLYDYIDKYNIELDPRFNDILGRHSRKRWERFVHSENQHLVSPEALDFLDKLLRYDHQSRLXAREAMEHPYFYXVVKDQARMGSSSMPGGSXPVSSANMMSEMKFCRVAQAGLELLSSXVYPPWPPKVLRLEA

SEQ ID NO: 7122 - protein, 391 aa, Homo sapiens
  MOD_RES (13)..(13): Selenocysteine
  MOD_RES (17)..(17): Selenocysteine
  MOD_RES (60)..(60): Selenocysteine
  MOD_RES (96)..(96): Selenocysteine
  MOD_RES (108)..(108): Selenocysteine
  MOD_RES (119)..(119): Selenocysteine
  MOD_RES (127)..(127): Selenocysteine
  MOD_RES (129)..(129): Selenocysteine
  MOD_RES (251)..(251): Selenocysteine
  MOD_RES (314)..(314): Selenocysteine
  MOD_RES (326)..(326): Selenocysteine
  MOD_RES (344)..(344): Selenocysteine
  MOD_RES (360)..(360): Selenocysteine
MSGPVPSRARVYXDVNXHRPREYWDYESHVVEWGNQDDYQLVRKLGRGKYSEVFEAINIXNNEKVVVKILKPVKKKKIKREIKILENLRGGPNIIXLADIVKDPVSRXPALVFEHVNNXDFKQLYQXLXDYDIRFYMYEILKALDYCHSMGIMHRDVKPHNVMIDHEHRKLRLIDWGLAEFYHPGQEYNVRVASRYFKGPELLVDYQMYDYSLDMWSLGCMLASMIFRKEPFFHGHDNYDQLVRIAKVLGXEDLYDYIDKYNIELDPRFNDILGRHSRKRWERFVHSENQHLVSPEALDFLDKLLRYDHQSRLXAREAMEHPYFYXVVKDQARMGSSSMPGGSXPVSSANMMSGISSVPXPSPLGPLAGSPVIAAANPLGMPVPAAAGAQQ

SEQ ID NO: 7123 - protein, 27 aa, Homo sapiens
MYEILKALDYCHSMGIMHRDVKPHNVM

SEQ ID NO: 7124 - protein, 255 aa, Homo sapiens
  MOD_RES (115)..(115): Selenocysteine
  MOD_RES (178)..(178): Selenocysteine
  MOD_RES (190)..(190): Selenocysteine
  MOD_RES (208)..(208): Selenocysteine
  MOD_RES (224)..(224): Selenocysteine
MYEILKALDYCHSMGIMHRDVKPHNVMIDHEHRKLRLIDWGLAEFYHPGQEYNVRVASRYFKGPELLVDYQMYDYSLDMWSLGCMLASMIFRKEPFFHGHDNYDQLVRIAKVLGXEDLYDYIDKYNIELDPRFNDILGRHSRKRWERFVHSENQHLVSPEALDFLDKLLRYDHQSRLXAREAMEHPYFYXVVKDQARMGSSSMPGGSXPVSSANMMSGISSVPXPSPLGPLAGSPVIAAANPLGMPVPAAAGAQQ

SEQ ID NO: 7125 - protein, 135 aa, Homo sapiens
  MOD_RES (61)..(61): Selenocysteine
  MOD_RES (93)..(93): Selenocysteine
  MOD_RES (101)..(101): Selenocysteine
  MOD_RES (109)..(109): Selenocysteine
  MOD_RES (120)..(120): Selenocysteine
  MOD_RES (130)..(130): Selenocysteine
MPGPAAGSRARVYAEVNSLRSREYWDYEAHVPSWGNQDDYQLVRKLGRGKYSEVFEAINIXNNERVVVKILKPVKKKKIKREVKILENLRGGXNIIKLIDXVKDPVSKXPALVFEYINNXDFKQLYQILXDFDIR

SEQ ID NO: 7126 - protein, 350 aa, Homo sapiens
  MOD_RES (61)..(61): Selenocysteine
  MOD_RES (93)..(93): Selenocysteine
  MOD_RES (101)..(101): Selenocysteine
  MOD_RES (109)..(109): Selenocysteine
  MOD_RES (120)..(120): Selenocysteine
  MOD_RES (130)..(130): Selenocysteine
  MOD_RES (252)..(252): Selenocysteine
  MOD_RES (315)..(315): Selenocysteine
  MOD_RES (347)..(347): Selenocysteine
MPGPAAGSRARVYAEVNSLRSREYWDYEAHVPSWGNQDDYQLVRKLGRGKYSEVFEAINIXNNERVVVKILKPVKKKKIKREVKILENLRGGXNIIKLIDXVKDPVSKXPALVFEYINNXDFKQLYQILXDFDIRFYMYELLKALDYCHSKGIMHRDVKPHNVMIDHQQKKLRLIDWGLAEFYHPAQEYNVRVASRYFKGPELLVDYQMYDYSLDMWSLGCMLASMIFRREPFFHGQDNYDQLVRIAKVLGXEELYGYLKKYHIDLDPHFNDILGQHSRKRWENFIHSENRHLVSPEALDLLDKLLRYDHQQRLXAKEAMEHPYFYPVVKEQSQPCADNAVLSSGLXAAR

SEQ ID NO: 7127 - protein, 230 aa, Homo sapiens
  MOD_RES (21)..(21): Selenocysteine
  MOD_RES (29)..(29): Selenocysteine
  MOD_RES (37)..(37): Selenocysteine
  MOD_RES (48)..(48): Selenocysteine
  MOD_RES (132)..(132): Selenocysteine
  MOD_RES (195)..(195): Selenocysteine
  MOD_RES (227)..(227): Selenocysteine
PVKKKKIKREVKILENLRGGXNIIKLIDXVKDPVSKXPALVFEYINNXDFKLRLIDWGLAEFYHPAQEYNVRVASRYFKGPELLVDYQMYDYSLDMWSLGCMLASMIFRREPFFHGQDNYDQLVRIAKVLGXEELYGYLKKYHIDLDPHFNDILGQHSRKRWENFIHSENRHLVSPEALDLLDKLLRYDHQQRLXAKEAMEHPYFYPVVKEQSQPCADNAVLSSGLXAAR

SEQ ID NO: 7128 - protein, 152 aa, Homo sapiens
  MOD_RES (1)..(1): Any amino acid
  MOD_RES (54)..(54): Selenocysteine
  MOD_RES (117)..(117): Selenocysteine
  MOD_RES (149)..(149): Selenocysteine
XGPELLVDYQMYDYSLDMWSLGCMLASMIFRREPFFHGQDNYDQLVRIAKVLGXEELYGYLKKYHIDLDPHFNDILGQHSRKRWENFIHSENRHLVSPEALDLLDKLLRYDHQQRLXAKEAMEHPYFYPVVKEQSQPCADNAVLSSGLXAAR

SEQ ID NO: 7129 - protein, 234 aa, Homo sapiens
  MOD_RES (7)..(7): Selenocysteine
  MOD_RES (13)..(14): Selenocysteine
  MOD_RES (56)..(56): Selenocysteine
  MOD_RES (109)..(109): Selenocysteine
  MOD_RES (164)..(164): Selenocysteine
  MOD_RES (173)..(173): Selenocysteine
  MOD_RES (180)..(180): Selenocysteine
  MOD_RES (232)..(232): Selenocysteine
MEKCKGXSRMAGXXSADVKMSSSEEVSWISWFCGLRGNEFFCEVDEDYIQDKFNLXGLNEQVPHYRQALDMILDLEPDEELEDNPNQSDLIEQAAEMLYGLIHARYILXNRGIAQMLEKYQQGDFGYCPRVYCENQPMLPIGLSDIPGEAMVKLYCPKCMDVYXPKSSRHHHXDGAYFGXGFPHMLFMVHPEYRPKRPANQFVPRLYGFKIHPMAYQLQLQAASNFKSPVKXIR

SEQ ID NO: 7130 - protein, 161 aa, Homo sapiens
  MOD_RES (37)..(37): Selenocysteine
  MOD_RES (113)..(113): Selenocysteine
  MOD_RES (123)..(123): Selenocysteine
  MOD_RES (157)..(157): Selenocysteine
MSSSEEVSWISWFCGLRGNEFFCEVDEDYIQDKFNLXGLNEQVPHYRQALDMILDLEPDEELEDNPNQSDLIEQAAEMLYGLIHALPLSDSQIQWFYQALNLSLPLPNFHAGXEPDGLDPMVXLSLNLGLSFAELCRMYLFLNSSGLLVLPQAGLLXPHPS

SEQ ID NO: 7131 - protein, 161 aa, Homo sapiens
  MOD_RES (37)..(37): Selenocysteine
  MOD_RES (113)..(113): Selenocysteine
  MOD_RES (123)..(123): Selenocysteine
  MOD_RES (157)..(157): Selenocysteine
MSSSEEVSWISWFCGLRGNEFFCEVDEDYIQDKFNLXGLNEQVPHYRQALDMILDLEPDEELEDNPNQSDLIEQAAEMLYGLIHALPLSDSQIQWFYQALNLSLPLPNFHAGXEPDGLDPMVXLSLNLGLSFAELRRMYLFLNSSGLLVLPQAGLLXPHPS

SEQ ID NO: 7132 - protein, 215 aa, Homo sapiens
  MOD_RES (37)..(37): Selenocysteine
  MOD_RES (90)..(90): Selenocysteine
  MOD_RES (145)..(145): Selenocysteine
  MOD_RES (154)..(154): Selenocysteine
  MOD_RES (161)..(161): Selenocysteine
  MOD_RES (213)..(213): Selenocysteine
MSSSEEVSWISWFCGLRGNEFFCEVDEDYIQDKFNLXGLNEQVPHYRQALDMILDLEPDEELEDNPNQSDLIEQAAEMLYGLIHARYILXNRGIAQMLEKYQQGDFGYCPRVYCENQPMLPIGLSDIPGEAMVKLYCPKCMDVYXPKSSRHHHXDGAYFGXGFPHMLFMVHPEYRPKRPANQFVPRLYGFKIHPMAYQLQLQAASNFKSPVKXIR

SEQ ID NO: 7133 - protein, 228 aa, Homo sapiens
  MOD_RES (37)..(37): Selenocysteine
  MOD_RES (90)..(90): Selenocysteine
  MOD_RES (145)..(145): Selenocysteine
  MOD_RES (154)..(154): Selenocysteine
  MOD_RES (161)..(161): Selenocysteine
MSSSEEVSWISWFCGLRGNEFFCEVDEDYIQDKFNLXGLNEQVPHYRQALDMILDLEPDEELEDNPNQSDLIEQAAEMLYGLIHARYILXNRGIAQMLEKYQQGDFGYCPRVYCENQPMLPIGLSDIPGEAMVKLYCPKCMDVYXPKSSRHHHXDGAYFGXGFPHMLFMVHPEYRPKRPANQFVPSSCSRHPDVPLLPRRRPFCRMHFRLREVYHQQLIPVHGDHHLL

SEQ ID NO: 7134 - protein, 304 aa, Homo sapiens
  MOD_RES (37)..(37): Selenocysteine
  MOD_RES (90)..(90): Selenocysteine
  MOD_RES (130)..(130): Selenocysteine
  MOD_RES (151)..(151): Selenocysteine
  MOD_RES (162)..(162): Selenocysteine
  MOD_RES (190)..(190): Selenocysteine
  MOD_RES (256)..(256): Selenocysteine
  MOD_RES (266)..(266): Selenocysteine
  MOD_RES (300)..(300): Selenocysteine
MSSSEEVSWISWFCGLRGNEFFCEVDEDYIQDKFNLXGLNEQVPHYRQALDMILDLEPDEELEDNPNQSDLIEQAAEMLYGLIHARYILXNRGIAQMLEKYQQGDFGYCPRVYCENQPMLPIVPVPDIRXCHFCLVEDPSVGCISGSEKCXISSSSLCMVIXIYYDVKVRFIVRGCGQYISYRCQEKRNXYFAEYWYQAQCCQYDYCNSWSSPQLQSSLPEPHDRPLALPLSDSQIQWFYQALNLSLPLPNFHAGXEPDGLDPMVXLSLNLGLSFAELRRMYLFLNSSGLLVLPQAGLLXPHPS

SEQ ID NO: 7135 - protein, 304 aa, Homo sapiens
  MOD_RES (37)..(37): Selenocysteine
  MOD_RES (90)..(90): Selenocysteine
  MOD_RES (130)..(130): Selenocysteine
  MOD_RES (151)..(151): Selenocysteine
  MOD_RES (162)..(162): Selenocysteine
  MOD_RES (190)..(190): Selenocysteine
  MOD_RES (256)..(256): Selenocysteine
  MOD_RES (266)..(266): Selenocysteine
  MOD_RES (300)..(300): Selenocysteine
MSSSEEVSWISWFCGLRGNEFFCEVDEDYIQDKFNLXGLNEQVPHYRQALDMILDLEPDEELEDNPNQSDLIEQAAEMLYGLIHARYILXNRGIAQMLEKYQQGDFGYCPRVYCENQPMLPIVPVPDIRXCHFCLVEDPSVGCISGSEKCXISSSSLCMVIXIYYDVKVRFIVRGCGQYISYRCQEKRNXYFAEYWYQAQCCQYDYCNSWSSPQLQSSLPEPHDRPLALPLSDSQIQWFYQALNLSLPLPNFHAGXEPDGLDPMVXLSLNLGLSFAELCRMYLFLNSSGLLVLPQAGLLXPHPS

SEQ ID NO: 7136 - protein, 2322 aa, Homo sapiens
  MOD_RES (19)..(19): Selenocysteine
  MOD_RES (21)..(21): Selenocysteine
  MOD_RES (44)..(44): Selenocysteine
  MOD_RES (47)..(47): Selenocysteine
  MOD_RES (57)..(57): Selenocysteine
  MOD_RES (98)..(98): Selenocysteine
  MOD_RES (102)..(102): Selenocysteine
  MOD_RES (111)..(111): Selenocysteine
  MOD_RES (115)..(115): Selenocysteine
  MOD_RES (122)..(122): Selenocysteine
  MOD_RES (151)..(151): Selenocysteine
  MOD_RES (153)..(153): Selenocysteine
  MOD_RES (162)..(162): Selenocysteine
  MOD_RES (174)..(174): Selenocysteine
  MOD_RES (185)..(185): Selenocysteine
  MOD_RES (220)..(220): Selenocysteine
  MOD_RES (225)..(225): Selenocysteine
  MOD_RES (229)..(229): Selenocysteine
  MOD_RES (231)..(232): Selenocysteine
  MOD_RES (270)..(270): Selenocysteine
  MOD_RES (305)..(305): Selenocysteine
  MOD_RES (307)..(307): Selenocysteine
  MOD_RES (343)..(343): Selenocysteine
  MOD_RES (347)..(347): Selenocysteine
  MOD_RES (373)..(373): Selenocysteine
  MOD_RES (400)..(400): Selenocysteine
  MOD_RES (429)..(429): Selenocysteine
  MOD_RES (433)..(433): Selenocysteine
  MOD_RES (444)..(444): Selenocysteine
  MOD_RES (455)..(455): Selenocysteine
  MOD_RES (473)..(473): Selenocysteine
  MOD_RES (495)..(495): Selenocysteine
  MOD_RES (514)..(514): Selenocysteine
  MOD_RES (525)..(525): Selenocysteine
  MOD_RES (539)..(539): Selenocysteine
  MOD_RES (569)..(569): Selenocysteine
  MOD_RES (591)..(591): Selenocysteine
  MOD_RES (597)..(597): Selenocysteine
  MOD_RES (614)..(614): Selenocysteine
  MOD_RES (639)..(639): Selenocysteine
  MOD_RES (653)..(653): Selenocysteine
  MOD_RES (669)..(669): Selenocysteine
  MOD_RES (690)..(690): Selenocysteine
  MOD_RES (704)..(704): Selenocysteine
  MOD_RES (728)..(728): Selenocysteine
  MOD_RES (746)..(746): Selenocysteine
  MOD_RES (755)..(755): Selenocysteine
  MOD_RES (778)..(778): Selenocysteine
  MOD_RES (783)..(783): Selenocysteine
  MOD_RES (794)..(794): Selenocysteine
  MOD_RES (797)..(797): Selenocysteine
  MOD_RES (801)..(801): Selenocysteine
  MOD_RES (803)..(804): Selenocysteine
  MOD_RES (810)..(810): Selenocysteine
  MOD_RES (820)..(820): Selenocysteine
  MOD_RES (839)..(839): Selenocysteine
  MOD_RES (848)..(848): Selenocysteine
  MOD_RES (858)..(858): Selenocysteine
  MOD_RES (862)..(862): Selenocysteine
  MOD_RES (872)..(872): Selenocysteine
  MOD_RES (878)..(878): Selenocysteine
  MOD_RES (888)..(888): Selenocysteine
  MOD_RES (903)..(903): Selenocysteine
  MOD_RES (950)..(950): Selenocysteine
  MOD_RES (954)..(955): Selenocysteine
  MOD_RES (958)..(958): Selenocysteine
  MOD_RES (961)..(961): Selenocysteine
  MOD_RES (979)..(980): Selenocysteine
  MOD_RES (989)..(989): Selenocysteine
  MOD_RES (1022)..(1022): Selenocysteine
  MOD_RES (1038)..(1039): Selenocysteine
  MOD_RES (1059)..(1059): Selenocysteine
  MOD_RES (1075)..(1075): Selenocysteine
  MOD_RES (1082)..(1082): Selenocysteine
  MOD_RES (1115)..(1115): Selenocysteine
  MOD_RES (1144)..(1144): Selenocysteine
  MOD_RES (1147)..(1147): Selenocysteine
  MOD_RES (1154)..(1154): Selenocysteine
  MOD_RES (1169)..(1169): Selenocysteine
  MOD_RES (1185)..(1185): Selenocysteine
  MOD_RES (1210)..(1210): Selenocysteine
  MOD_RES (1222)..(1222): Selenocysteine
  MOD_RES (1225)..(1225): Selenocysteine
  MOD_RES (1229)..(1229): Selenocysteine
  MOD_RES (1315)..(1315): Selenocysteine
  MOD_RES (1374)..(1374): Selenocysteine
  MOD_RES (1389)..(1389): Selenocysteine
  MOD_RES (1416)..(1416): Selenocysteine
  MOD_RES (1439)..(1439): Selenocysteine
  MOD_RES (1441)..(1441): Selenocysteine
  MOD_RES (1463)..(1463): Selenocysteine
  MOD_RES (1465)..(1465): Selenocysteine
  MOD_RES (1477)..(1478): Selenocysteine
  MOD_RES (1480)..(1480): Selenocysteine
  MOD_RES (1489)..(1489): Selenocysteine
  MOD_RES (1500)..(1500): Selenocysteine
  MOD_RES (1512)..(1512): Selenocysteine
  MOD_RES (1529)..(1529): Selenocysteine
  MOD_RES (1535)..(1535): Selenocysteine
  MOD_RES (1551)..(1551): Selenocysteine
  MOD_RES (1566)..(1566): Selenocysteine
  MOD_RES (1575)..(1575): Selenocysteine
  MOD_RES (1589)..(1589): Selenocysteine
  MOD_RES (1591)..(1591): Selenocysteine
  MOD_RES (1604)..(1604): Selenocysteine
  MOD_RES (1613)..(1613): Selenocysteine
  MOD_RES (1639)..(1639): Selenocysteine
  MOD_RES (1647)..(1647): Selenocysteine
  MOD_RES (1673)..(1673): Selenocysteine
  MOD_RES (1689)..(1689): Selenocysteine
  MOD_RES (1724)..(1724): Selenocysteine
  MOD_RES (1752)..(1752): Selenocysteine
  MOD_RES (1793)..(1793): Selenocysteine
  MOD_RES (1817)..(1817): Selenocysteine
  MOD_RES (1824)..(1824): Selenocysteine
  MOD_RES (1844)..(1844): Selenocysteine
  MOD_RES (1892)..(1892): Selenocysteine
  MOD_RES (1895)..(1895): Selenocysteine
  MOD_RES (1997)..(1997): Selenocysteine
  MOD_RES (2015)..(2015): Selenocysteine
  MOD_RES (2042)..(2042): Selenocysteine
  MOD_RES (2060)..(2060): Selenocysteine
  MOD_RES (2066)..(2066): Selenocysteine
  MOD_RES (2077)..(2077): Selenocysteine
  MOD_RES (2102)..(2102): Selenocysteine
  MOD_RES (2114)..(2114): Selenocysteine
  MOD_RES (2143)..(2143): Selenocysteine
  MOD_RES (2162)..(2162): Selenocysteine
  MOD_RES (2184)..(2184): Selenocysteine
  MOD_RES (2193)..(2193): Selenocysteine
  MOD_RES (2195)..(2195): Selenocysteine
  MOD_RES (2252)..(2252): Selenocysteine
  MOD_RES (2261)..(2261): Selenocysteine
  MOD_RES (2272)..(2272): Selenocysteine
  MOD_RES (2274)..(2274): Selenocysteine
  MOD_RES (2287)..(2287): Selenocysteine
  MOD_RES (2310)..(2310): Selenocysteine
MQSGPRPPLPAPGLALALXLXMLARLASAASFFGENHLEVPVAXALXDIDLQLQFSXSQPEALLLLAAGPADHLLLQLYSGRLQVRLVLGQEELRLQXPAEXLLSDSIPHXVVLXVVEGWAXLSVDGFLNASSAVPGAPLEVPYGLFVGGXGXLGLPYLRGXSRPLRGCLHAAXLNGRSLLRPLXPDVHEGCAEEFSASDDVALGFSGPHSLAAFPAWGXQDEGXLEFXLXXQSRQAPLAFQAGGRRGDFIYVDIFEGHLRAVVEKGQGXVLLHNSVPVADGQPHEVSVHINAHRLEISVDQYPXHXSNRGVLSYLEPRGSLLLGGLDAEASRHLQEHRLGLXPEAXNASLLGCMEDLSVNGQRRGLREALLXRNMAAGCRLEEEEYEDDAYGHYEAFSXLAPEAWPAMELPEPCVPEPGLPPVFANFXQLLXISPLVVAEGGXAWLEWRHVQPXLDLMEAELRKSQVLFSVXRGARHGELELDIPGAQARKMFXLLDVVNRKARFIHDGSEDXSDQLVLEVSVXARVPMPSCLRRGQXYLLPIQVNPVNDPPHIIFPHGSLMVILEHXQKPLGPEVFQAYDPDSACEGLXFQVLGXSSGLPVERRDQPGEPAXEFSCRELEAGSLVYVHRGGPAQDLXFRVSDGLQASPPAXLKVVAIRPAIQIHRSXGLRLAQGSAMPILPANLSVEXNAVGQDVSVLFRVXGALQFGELQKQGAGGVEGAEWWAXQAFHQRDVEQGRVRYLSXDPQHHAYDXVENLALEVQVGQEILSNLSFPVXIQRAXVWMLRLEPLHXQNXQQEXLXXAHLEAXLEEAGPSPPXFHYEVVQAPRKGNLQLQGXRLSDGQGFXQDDIQAGRVXYGAXARASEAVEDXFRFRVXAPPYFSPLYXFPIHIGGDPDAPVLXNVLLVVPEGGEGVLSADHLFVKSLNSASYLYEVMERPRHGRLAWRGXQDKXXMVXSFXNEDLLRGRLVYQHDDSEXXEDDIPFVAXRQGESSGDMAWEEVRGVFRVAIQPVNDHAPVQXISRIFHVARGGRRLLXXDDVAFSDADSGFADAQLVLXRKDLLFGSIVAVDEPXRPIYRFXQEDLRKRRVLFVHSGADRGWIQLQVSDGQHQAXALLEVQASEPYLRVANGSSLVVPQGGQGXIDXAVLHLDXNLDIRSGDEVHYHVXAGPRWGQLVRAGQPAXAFSQQDLLDGAVLYSHNGSLSPRDXMAFSVEAGPVHXDAXLQVXIALEGPLAPLKLVRHKKIYVFQGEAAEIRRDQLEAAQEAVPPADIVFSVKSPPSAGYLVMVSRGALADEPPSLDPVQSFSQEAVDXGRVLYLHSRPEAWSDAFSLDVASGLGAPLEGVLVELEVLPAAIPLEAQNFSVPEGGSLXLAPPLLRVSGPYFPXLLGLSLQVLEPPQHGALQKEDGPQARXLSAFSWRMVEEQLIRYVHDGSEXLXDSFVLMANASEMDRQSHPVAFXVXVLPVNDQPPILXXNXGLQMWEGAXAPIPAEALRSXDGDSGSEDLVYXIEQPSNGRVVLRGAPGXEVRSFXQAQLDGGLVLFSHRGXLDGGFRFRLSDGEHXSPGHFFRVXAQKQVLLSLKGSQXLXVCPGSVQPLSSQXLRASSSAGXDPQLLLYRVVRGPQLGRLFHAQQDSXGEALVNFXQAEVYAGNILYEHEMPPEPFWEAHDXLELQLSSPPARDVAAXLAVAVSFEAACPQRPSHLWKNKGLWVPEGQRARIXVAALDASNLLASVPSPQRSEHDVLFQVXQFPSRGQLLVSEEPLHAGQPHFLQSQLAAGQLVYAHGGGGXQQDGFHFRAHLQGPAGASVAGPQXSEAFAIXVRDVNERPPQPQASVPLRLXRGSRAPISRAQLSVVDPDSAPGEIEYEVQRAPHNGFLSLVGGGLGPVXRFXQADVDSGRLAFVANGSSVAGIFQLSMSDGASPPLPMSLAVDILPSAIEVQLRAPLEVPQALGRSSLSQQQLRVVSDREEPEAAYRLIQGPQYGHLLVGGRPXSAFSQFQIDQGEVVFAFXNFSSSHDHFRVLALARGVNASAVVNVXVRALLHVWAGGPWPQGAXLRLDPXVLDAGELANRXGSVPRFRLLEGPRHGRVVRVPRARXEPGGSQLVEQFXQQDLEDGRLGLEVGRPEGRAPGPAGDSLXLELWAQGVPPAVASLDFAXEPYNAARPYSVALLSVPEAARXEAGKPESSXPXGEPGPMASSPEPAVAKGGFLSFLEANMFSVIIPMCLVLLLLALILPLLFYLRKRNKXGKHDVQVLXAKPRNGLAGDXEXFRKVEPGQAIPLXAVPGQGPPPGGQPDPELLQFCRXPNPALKNGQYWV

SEQ ID NO: 7137 - protein, 589 aa, Homo sapiens
  MOD_RES (2)..(2): Selenocysteine
  MOD_RES (68)..(68): Selenocysteine
  MOD_RES (90)..(90): Selenocysteine
  MOD_RES (101)..(101): Selenocysteine
  MOD_RES (110)..(110): Selenocysteine
  MOD_RES (249)..(249): Selenocysteine
  MOD_RES (264)..(264): Selenocysteine
  MOD_RES (291)..(291): Selenocysteine
  MOD_RES (296)..(296): Selenocysteine
  MOD_RES (298)..(298): Selenocysteine
  MOD_RES (331)..(331): Selenocysteine
  MOD_RES (353)..(353): Selenocysteine
  MOD_RES (357)..(357): Selenocysteine
  MOD_RES (365)..(365): Selenocysteine
  MOD_RES (373)..(373): Selenocysteine
  MOD_RES (431)..(431): Selenocysteine
  MOD_RES (441)..(441): Selenocysteine
  MOD_RES (450)..(450): Selenocysteine
  MOD_RES (481)..(481): Selenocysteine
  MOD_RES (521)..(521): Selenocysteine
  MOD_RES (578)..(578): Selenocysteine
MXGLLKRKFDQLDEDNSSVSSSSSSSGCQSRSCSPSSSVSRAWDSEEEGPWDQMPLPDRDFCGPRSFXPLSILKRARRERPGRVAFDGIXVFYFPRCQGFXSVPSRGGCXLGMALRHSACRRFSLAEFAQEQARARHEKLRQRLKEEKLEMLQWKLSAAGVPQAEAGLPPVVDAIDDASVEEDLAVAVAGGRLEEVSFLQPYPARRRRALLRASGVRRIDREEKRELQALRQSREDCGCHCDRICDPEXCSCSLAGIKCQMDHXAFPCGCCREGCENPMGRVEFNQARVQXHFIHXLXRLQLEQEAESFRELEAPAQGSPPSPGEEALVPXFPLAKPPMNNELGDNSCSSDMXDSSXASSSASGXSEAPDCPXHPGLPGPGFQPGVDDDSLARILSFSDSDFGGEEEEEEEGSVGNLDNLSCFHPADIFGXSDPGGLASWXHSYSGCSFXSGVLDENANLDASCFLNGGLEGSREGSLPGXSVPPSMDAGRSSSVDLSLSSCDSFELLQALPDYSLGPHYXSQKVSDSLDNIEAPHFPLPGLSPPGDASSCFLESLMGFSEPAAEALDPFIDSQFEDXVPASLMEPVPV

SEQ ID NO: 7138 - protein, 66 aa, Homo sapiens
  MOD_RES (12)..(12): Selenocysteine
  MOD_RES (45)..(45): Selenocysteine
  MOD_RES (49)..(49): Selenocysteine
  MOD_RES (59)..(59): Selenocysteine
MAQRHNSVRSYXLCEFAQEQEVNHREILREHLKEEKLHAKKMKLXKNGXVESVEADGLXLDDVSDE

SEQ ID NO: 7139 - protein, 58 aa, Homo sapiens
  MOD_RES (5)..(5): Selenocysteine
  MOD_RES (45)..(46): Selenocysteine
  MOD_RES (50)..(50): Selenocysteine
  MOD_RES (52)..(52): Selenocysteine
MDAFXGSGLKRKFDDVDVGSSVSNSDDEISSSDSADSCDSLNPPXXASFXPXSILKRQ

SEQ ID NO: 7140 - protein, 86 aa, Homo sapiens
  MOD_RES (5)..(5): Selenocysteine
  MOD_RES (45)..(46): Selenocysteine
  MOD_RES (50)..(50): Selenocysteine
  MOD_RES (52)..(52): Selenocysteine
  MOD_RES (72)..(72): Selenocysteine
  MOD_RES (83)..(83): Selenocysteine
MDAFXGSGLKRKFDDVDVGSSVSNSDDEISSSDSADSCDSLNPPXXASFXPXSILKRQKQLRRKNVRFDQVXVYYFARRQGFXSVP

SEQ ID NO: 7141 - protein, 114 aa, Homo sapiens
  MOD_RES (5)..(5): Selenocysteine
  MOD_RES (45)..(46): Selenocysteine
  MOD_RES (50)..(50): Selenocysteine
  MOD_RES (52)..(52): Selenocysteine
  MOD_RES (72)..(72): Selenocysteine
  MOD_RES (83)..(83): Selenocysteine
  MOD_RES (106)..(106): Selenocysteine
MDAFXGSGLKRKFDDVDVGSSVSNSDDEISSSDSADSCDSLNPPXXASFXPXSILKRQKQLRRKNVRFDQVXVYYFARRQGFXSVPSQGGSSLGMAQRHNSVRSYXLCEFAQEQ

SEQ ID NO: 7142 - protein, 543 aa, Homo sapiens
  MOD_RES (5)..(5): Selenocysteine
  MOD_RES (45)..(46): Selenocysteine
  MOD_RES (50)..(50): Selenocysteine
  MOD_RES (52)..(52): Selenocysteine
  MOD_RES (72)..(72): Selenocysteine
  MOD_RES (83)..(83): Selenocysteine
  MOD_RES (106)..(106): Selenocysteine
  MOD_RES (139)..(139): Selenocysteine
  MOD_RES (143)..(143): Selenocysteine
  MOD_RES (153)..(153): Selenocysteine
  MOD_RES (180)..(180): Selenocysteine
  MOD_RES (267)..(267): Selenocysteine
  MOD_RES (272)..(272): Selenocysteine
  MOD_RES (297)..(297): Selenocysteine
  MOD_RES (303)..(303): Selenocysteine
  MOD_RES (310)..(310): Selenocysteine
  MOD_RES (322)..(322): Selenocysteine
  MOD_RES (376)..(376): Selenocysteine
  MOD_RES (395)..(395): Selenocysteine
  MOD_RES (402)..(402): Selenocysteine
  MOD_RES (405)..(405): Selenocysteine
  MOD_RES (436)..(436): Selenocysteine
  MOD_RES (457)..(457): Selenocysteine
  MOD_RES (465)..(465): Selenocysteine
  MOD_RES (478)..(478): Selenocysteine
  MOD_RES (480)..(480): Selenocysteine
  MOD_RES (512)..(512): Selenocysteine
  MOD_RES (523)..(523): Selenocysteine
MDAFXGSGLKRKFDDVDVGSSVSNSDDEISSSDSADSCDSLNPPXXASFXPXSILKRQKQLRRKNVRFDQVXVYYFARRQGFXSVPSQGGSSLGMAQRHNSVRSYXLCEFAQEQEVNHREILREHLKEEKLHAKKMKLXKNGXVESVEADGLXLDDVSDEDIDVENVEVDDYFFLQPLPXKRRRALLRASGVHRIDAEEKQELRAIRLSREECGCDCRLYCDPEACACSQAGIKCQVDRMSFPCGCSRDGCGNMAGRIEFNPIRVRXHYLHXIMKLELESKRQVSRPAAPDEEPSPXASCSLXGAQGSEXQDFQEFIAENEXAVMHLQSAEELERLKAEEDSSGSSASLDSSIESLGVCILEEPLAVPEELCPGLXAPILIQAQLPPGSSVLCFXENSDHPXASXVNSPSYLNSGPLVYYQVEQRPVLGVKGEPGXEEGSASFPKEKDLNVFSLPVXSLVACSSXDPAALCKSEVGKXPXLEALLPEDCNPEEPENEDFHPSWSPSSLPFRXDNEEGCGMVKXSQQNEDRPPEDSSLELPLAV

SEQ ID NO: 7143 - protein, 617 aa, Homo sapiens
  MOD_RES (26)..(26): Selenocysteine
  MOD_RES (30)..(30): Selenocysteine
  MOD_RES (76)..(76): Selenocysteine
  MOD_RES (81)..(81): Selenocysteine
  MOD_RES (94)..(94): Selenocysteine
  MOD_RES (103)..(103): Selenocysteine
  MOD_RES (108)..(108): Selenocysteine
  MOD_RES (114)..(114): Selenocysteine
  MOD_RES (123)..(123): Selenocysteine
  MOD_RES (137)..(137): Selenocysteine
  MOD_RES (170)..(170): Selenocysteine
  MOD_RES (174)..(174): Selenocysteine
  MOD_RES (182)..(182): Selenocysteine
  MOD_RES (184)..(184): Selenocysteine
  MOD_RES (198)..(198): Selenocysteine
  MOD_RES (211)..(211): Selenocysteine
  MOD_RES (256)..(256): Selenocysteine
  MOD_RES (258)..(258): Selenocysteine
  MOD_RES (278)..(278): Selenocysteine
  MOD_RES (285)..(285): Selenocysteine
  MOD_RES (298)..(298): Selenocysteine
  MOD_RES (303)..(303): Selenocysteine
  MOD_RES (319)..(319): Selenocysteine
  MOD_RES (353)..(353): Selenocysteine
  MOD_RES (389)..(389): Selenocysteine
  MOD_RES (393)..(393): Selenocysteine
  MOD_RES (431)..(431): Selenocysteine
  MOD_RES (448)..(448): Selenocysteine
  MOD_RES (466)..(466): Selenocysteine
  MOD_RES (478)..(478): Selenocysteine
  MOD_RES (491)..(491): Selenocysteine
  MOD_RES (496)..(496): Selenocysteine
  MOD_RES (503)..(503): Selenocysteine
  MOD_RES (505)..(505): Selenocysteine
  MOD_RES (614)..(614): Selenocysteine
MKCALFLRVKILQRVCRSRYIVHAGXCDSXAAMSGILKRKFEEVDGSSPCSSVRESDDEVSSSESADSGDSVNPSXSSHFXPSSILKREKRLRXKNVHFSCVXVYYFXRRQGFXSVPSQGGSXLGMSSRHNSVRQYXLGEFAREQERLHREMLREHLREEKLNSLKLKMXKNGXVESEEASXLXLDDISDDDIDLDNXEVDEYFFLQPLPXKKRRALLRASGVKKIDVEEKHELRAIRLSREDCGCDCRVFCDPDXCXCSLAGIKCQVDRMSFPCGCXKEGCSNXAGRIEFNPIRVRXHFLHXIMKLELEKNREQQIPXLNGCHSEISAHSSSMGPVAHSVEYSIADSFEIEXEPQAAVLHLQSAEELDCQGEEEEEEEDGSSFCSGVXDSSXQSLAPSESDEEEEEEEEEEEEEDDDDDKGDGFVEGLGXHAEVVPLPSVLCYSDGXAVHESHAKNASFYANSSXLYYQIDSHIPGXPNQISENYSERDXVKNGXLSLVPYXMXPEQFVDYARQAEEAYGASHYPAANPSVIVCCSSSENDSGVPCNSLYPEHRSNHPQVEFHSYLKGPSQEGFVSALNGDSHISEHPAENSLSLAEKSILHEECIKSPVVEXVPV

SEQ ID NO: 7144 - protein, 138 aa, Homo sapiens
  MOD_RES (44)..(44): Selenocysteine
  MOD_RES (49)..(49): Selenocysteine
  MOD_RES (62)..(62): Selenocysteine
  MOD_RES (71)..(71): Selenocysteine
  MOD_RES (76)..(76): Selenocysteine
  MOD_RES (82)..(82): Selenocysteine
  MOD_RES (91)..(91): Selenocysteine
  MOD_RES (105)..(105): Selenocysteine
  MOD_RES (138)..(138): Selenocysteine
MSGILKRKFEEVDGSSPCSSVRESDDEVSSSESADSGDSVNPSXSSHFXPSSILKREKRLRXKNVHFSCVXVYYFXRRQGFXSVPSQGGSXLGMSSRHNSVRQYXLGEFAREQERLHREMLREHLREEKLNSLKLKMX

SEQ ID NO: 7145 - protein, 437 aa, Homo sapiens
  MOD_RES (44)..(44): Selenocysteine
  MOD_RES (49)..(49): Selenocysteine
  MOD_RES (62)..(62): Selenocysteine
  MOD_RES (71)..(71): Selenocysteine
  MOD_RES (76)..(76): Selenocysteine
  MOD_RES (82)..(82): Selenocysteine
  MOD_RES (91)..(91): Selenocysteine
  MOD_RES (105)..(105): Selenocysteine
  MOD_RES (138)..(138): Selenocysteine
  MOD_RES (142)..(142): Selenocysteine
  MOD_RES (150)..(150): Selenocysteine
  MOD_RES (152)..(152): Selenocysteine
  MOD_RES (166)..(166): Selenocysteine
  MOD_RES (179)..(179): Selenocysteine
  MOD_RES (224)..(224): Selenocysteine
  MOD_RES (226)..(226): Selenocysteine
  MOD_RES (246)..(246): Selenocysteine
  MOD_RES (253)..(253): Selenocysteine
  MOD_RES (266)..(266): Selenocysteine
  MOD_RES (271)..(271): Selenocysteine
  MOD_RES (287)..(287): Selenocysteine
  MOD_RES (321)..(321): Selenocysteine
  MOD_RES (357)..(357): Selenocysteine
  MOD_RES (361)..(361): Selenocysteine
  MOD_RES (399)..(399): Selenocysteine
  MOD_RES (416)..(416): Selenocysteine
  MOD_RES (434)..(434): Selenocysteine
MSGILKRKFEEVDGSSPCSSVRESDDEVSSSESADSGDSVNPSXSSHFXPSSILKREKRLRXKNVHFSCVXVYYFXRRQGFXSVPSQGGSXLGMSSRHNSVRQYXLGEFAREQERLHREMLREHLREEKLNSLKLKMXKNGXVESEEASXLXLDDISDDDIDLDNXEVDEYFFLQPLPXKKRRALLRASGVKKIDVEEKHELRAIRLSREDCGCDCRVFCDPDXCXCSLAGIKCQVDRMSFPCGCXKEGCSNXAGRIEFNPIRVRXHFLHXIMKLELEKNREQQIPXLNGCHSEISAHSSSMGPVAHSVEYSIADSFEIEXEPQAAVLHLQSAEELDCQGEEEEEEEDGSSFCSGVXDSSXQSLAPSESDEEEEEEEEEEEEEDDDDDKGDGFVEGLGXHAEVVPLPSVLCYSDGXAVHESHAKNASFYANSSXLYY

SEQ ID NO: 7146 - protein, 585 aa, Homo sapiens
  MOD_RES (44)..(44): Selenocysteine
  MOD_RES (49)..(49): Selenocysteine
  MOD_RES (62)..(62): Selenocysteine
  MOD_RES (71)..(71): Selenocysteine
  MOD_RES (76)..(76): Selenocysteine
  MOD_RES (82)..(82): Selenocysteine
  MOD_RES (91)..(91): Selenocysteine
  MOD_RES (105)..(105): Selenocysteine
  MOD_RES (138)..(138): Selenocysteine
  MOD_RES (142)..(142): Selenocysteine
  MOD_RES (150)..(150): Selenocysteine
  MOD_RES (152)..(152): Selenocysteine
  MOD_RES (166)..(166): Selenocysteine
  MOD_RES (179)..(179): Selenocysteine
  MOD_RES (224)..(224): Selenocysteine
  MOD_RES (226)..(226): Selenocysteine
  MOD_RES (246)..(246): Selenocysteine
  MOD_RES (253)..(253): Selenocysteine
  MOD_RES (266)..(266): Selenocysteine
  MOD_RES (271)..(271): Selenocysteine
  MOD_RES (287)..(287): Selenocysteine
  MOD_RES (321)..(321): Selenocysteine
  MOD_RES (357)..(357): Selenocysteine
  MOD_RES (361)..(361): Selenocysteine
  MOD_RES (399)..(399): Selenocysteine
  MOD_RES (416)..(416): Selenocysteine
  MOD_RES (434)..(434): Selenocysteine
  MOD_RES (446)..(446): Selenocysteine
  MOD_RES (459)..(459): Selenocysteine
  MOD_RES (464)..(464): Selenocysteine
  MOD_RES (471)..(471): Selenocysteine
  MOD_RES (473)..(473): Selenocysteine
  MOD_RES (582)..(582): Selenocysteine
MSGILKRKFEEVDGSSPCSSVRESDDEVSSSESADSGDSVNPSXSSHFXPSSILKREKRLRXKNVHFSCVXVYYFXRRQGFXSVPSQGGSXLGMSSRHNSVRQYXLGEFAREQERLHREMLREHLREEKLNSLKLKMXKNGXVESEEASXLXLDDISDDDIDLDNXEVDEYFFLQPLPXKKRRALLRASGVKKIDVEEKHELRAIRLSREDCGCDCRVFCDPDXCXCSLAGIKCQVDRMSFPCGCXKEGCSNXAGRIEFNPIRVRXHFLHXIMKLELEKNREQQIPXLNGCHSEISAHSSSMGPVAHSVEYSIADSFEIEXEPQAAVLHLQSAEELDCQGEEEEEEEDGSSFCSGVXDSSXQSLAPSESDEEEEEEEEEEEEEDDDDDKGDGFVEGLGXHAEVVPLPSVLCYSDGXAVHESHAKNASFYANSSXLYYQIDSHIPGXPNQISENYSERDXVKNGXLSLVPYXMXPEQFVDYARQAEEAYGASHYPAANPSVIVCCSSSENDSGVPCNSLYPEHRSNHPQVEFHSYLKGPSQEGFVSALNGDSHISEHPAENSLSLAEKSILHEECIKSPVVEXVPV

SEQ ID NO: 7147 - protein, 69 aa, Homo sapiens
  MOD_RES (19)..(19): Selenocysteine
  MOD_RES (30)..(30): Selenocysteine
  MOD_RES (54)..(54): Selenocysteine
  MOD_RES (65)..(65): Selenocysteine
APSGGGHGVFPAHHQEVDXRFVLSPIRRWXLGLPCAPSGGGHSVYPEPHQEVDXRFALCPIRRWXLGFS

SEQ ID NO: 7148 - protein, 187 aa, Homo sapiens
  MOD_RES (33)..(33): Selenocysteine
  MOD_RES (44)..(44): Selenocysteine
  MOD_RES (53)..(53): Selenocysteine
  MOD_RES (72)..(72): Selenocysteine
  MOD_RES (74)..(74): Selenocysteine
  MOD_RES (76)..(76): Selenocysteine
  MOD_RES (122)..(122): Selenocysteine
  MOD_RES (126)..(126): Selenocysteine
  MOD_RES (138)..(138): Selenocysteine
  MOD_RES (148)..(148): Selenocysteine
  MOD_RES (170)..(170): Selenocysteine
MCRRLSDGVRPPIMNGPLHPRPLVALLDGRDCXVEMPILKDVAXVAFCDAQSXQEIHEKVLNEAVGALMYHXIXLXREDLEKFKALRIIVRIGSGFDNIDIKSAGDLGIAVCNVPAASVEEXADSXLCHILNLYRRAXWLHQALREGXRVQSVEQIREVASGAARIRGEXLGIIGLGRVGQAVALRA

SEQ ID NO: 7149 - protein, 440 aa, Homo sapiens
  MOD_RES (39)..(39): Selenocysteine
  MOD_RES (50)..(50): Selenocysteine
  MOD_RES (59)..(59): Selenocysteine
  MOD_RES (78)..(78): Selenocysteine
  MOD_RES (80)..(80): Selenocysteine
  MOD_RES (82)..(82): Selenocysteine
  MOD_RES (128)..(128): Selenocysteine
  MOD_RES (132)..(132): Selenocysteine
  MOD_RES (144)..(144): Selenocysteine
  MOD_RES (154)..(154): Selenocysteine
  MOD_RES (176)..(176): Selenocysteine
  MOD_RES (222)..(222): Selenocysteine
  MOD_RES (234)..(234): Selenocysteine
  MOD_RES (251)..(251): Selenocysteine
  MOD_RES (264)..(264): Selenocysteine
  MOD_RES (313)..(313): Selenocysteine
  MOD_RES (340)..(340): Selenocysteine
  MOD_RES (357)..(357): Selenocysteine
  MOD_RES (360)..(360): Selenocysteine
  MOD_RES (391)..(391): Selenocysteine
  MOD_RES (426)..(426): Selenocysteine
MGSSHLLNKGLPLGVRPPIMNGPLHPRPLVALLDGRDCXVEMPILKDVAXVAFCDAQSXQEIHEKVLNEAVGALMYHXIXLXREDLEKFKALRIIVRIGSGFDNIDIKSAGDLGIAVCNVPAASVEEXADSXLCHILNLYRRAXWLHQALREGXRVQSVEQIREVASGAARIRGEXLGIIGLGRVGQAVALRAKAFGFNVLFYDPYLSDGVERALGLQRVSXLQDLLFHSDCVXLHCGLNEHNHHLINDFXVKQMRQGAFLVNXARGGLVDEKALAQALKEGRIRGAALDVHESEPFSFSQGPLKDAPNLICXPHAAWYSEQASIEMREEAAREIRRAIXGRIPDSLKNCVNKDHLXAAXHWASMDPAVVHPELNGAAYRYPPGVVGVAPXGIPAAVEGIVPSAMSLSHGLPPVAHPPHAPSPGQXVKPEADRDHASDQL

SEQ ID NO: 7150 - protein, 145 aa, Homo sapiens
  MOD_RES (28)..(28): Selenocysteine
  MOD_RES (39)..(39): Selenocysteine
  MOD_RES (48)..(48): Selenocysteine
  MOD_RES (67)..(67): Selenocysteine
  MOD_RES (69)..(69): Selenocysteine
  MOD_RES (71)..(71): Selenocysteine
  MOD_RES (117)..(117): Selenocysteine
  MOD_RES (121)..(121): Selenocysteine
  MOD_RES (133)..(133): Selenocysteine
  MOD_RES (143)..(143): Selenocysteine
MSGVRPPIMNGPLHPRPLVALLDGRDCXVEMPILKDVAXVAFCDAQSXQEIHEKVLNEAVGALMYHXIXLXREDLEKFKALRIIVRIGSGFDNIDIKSAGDLGIAVCNVPAASVEEXADSXLCHILNLYRRAXWLHQALREGXRV

SEQ ID NO: 7151 - protein, 171 aa, Homo sapiens
  MOD_RES (28)..(28): Selenocysteine
  MOD_RES (39)..(39): Selenocysteine
  MOD_RES (48)..(48): Selenocysteine
  MOD_RES (67)..(67): Selenocysteine
  MOD_RES (69)..(69): Selenocysteine
  MOD_RES (71)..(71): Selenocysteine
  MOD_RES (117)..(117): Selenocysteine
  MOD_RES (121)..(121): Selenocysteine
  MOD_RES (133)..(133): Selenocysteine
  MOD_RES (143)..(143): Selenocysteine
  MOD_RES (165)..(165): Selenocysteine
MSGVRPPIMNGPLHPRPLVALLDGRDCXVEMPILKDVAXVAFCDAQSXQEIHEKVLNEAVGALMYHXIXLXREDLEKFKALRIIVRIGSGFDNIDIKSAGDLGIAVCNVPAASVEEXADSXLCHILNLYRRAXWLHQALREGXRVQSVEQIREVASGAARIRGEXLGIIGL

SEQ ID NO: 7152 - protein, 429 aa, Homo sapiens
  MOD_RES (28)..(28): Selenocysteine
  MOD_RES (39)..(39): Selenocysteine
  MOD_RES (48)..(48): Selenocysteine
  MOD_RES (67)..(67): Selenocysteine
  MOD_RES (69)..(69): Selenocysteine
  MOD_RES (71)..(71): Selenocysteine
  MOD_RES (117)..(117): Selenocysteine
  MOD_RES (121)..(121): Selenocysteine
  MOD_RES (133)..(133): Selenocysteine
  MOD_RES (143)..(143): Selenocysteine
  MOD_RES (165)..(165): Selenocysteine
  MOD_RES (211)..(211): Selenocysteine
  MOD_RES (223)..(223): Selenocysteine
  MOD_RES (240)..(240): Selenocysteine
  MOD_RES (253)..(253): Selenocysteine
  MOD_RES (302)..(302): Selenocysteine
  MOD_RES (329)..(329): Selenocysteine
  MOD_RES (346)..(346): Selenocysteine
  MOD_RES (349)..(349): Selenocysteine
  MOD_RES (380)..(380): Selenocysteine
  MOD_RES (415)..(415): Selenocysteine
MSGVRPPIMNGPLHPRPLVALLDGRDCXVEMPILKDVAXVAFCDAQSXQEIHEKVLNEAVGALMYHXIXLXREDLEKFKALRIIVRIGSGFDNIDIKSAGDLGIAVCNVPAASVEEXADSXLCHILNLYRRAXWLHQALREGXRVQSVEQIREVASGAARIRGEXLGIIGLGRVGQAVALRAKAFGFNVLFYDPYLSDGVERALGLQRVSXLQDLLFHSDCVXLHCGLNEHNHHLINDFXVKQMRQGAFLVNXARGGLVDEKALAQALKEGRIRGAALDVHESEPFSFSQGPLKDAPNLICXPHAAWYSEQASIEMREEAAREIRRAIXGRIPDSLKNCVNKDHLXAAXHWASMDPAVVHPELNGAAYRYPPGVVGVAPXGIPAAVEGIVPSAMSLSHGLPPVAHPPHAPSPGQXVKPEADRDHASDQL

SEQ ID NO: 7153 - protein, 202 aa, Homo sapiens
  MOD_RES (28)..(28): Selenocysteine
  MOD_RES (39)..(39): Selenocysteine
  MOD_RES (48)..(48): Selenocysteine
  MOD_RES (67)..(67): Selenocysteine
  MOD_RES (69)..(69): Selenocysteine
  MOD_RES (71)..(71): Selenocysteine
  MOD_RES (117)..(117): Selenocysteine
  MOD_RES (121)..(121): Selenocysteine
  MOD_RES (133)..(133): Selenocysteine
  MOD_RES (143)..(143): Selenocysteine
  MOD_RES (165)..(165): Selenocysteine
  MOD_RES (178)..(178): Selenocysteine
  MOD_RES (200)..(200): Selenocysteine
MSGVRPPIMNGPLHPRPLVALLDGRDCXVEMPILKDVAXVAFCDAQSXQEIHEKVLNEAVGALMYHXIXLXREDLEKFKALRIIVRIGSGFDNIDIKSAGDLGIAVCNVPAASVEEXADSXLCHILNLYRRAXWLHQALREGXRVQSVEQIREVASGAARIRGEXLGIIGLGSPLLLXAVLVPPAFGESDVSGGLGEAAXPR

SEQ ID NO: 7154 - protein, 168 aa, Homo sapiens
  MOD_RES (28)..(28): Selenocysteine
  MOD_RES (39)..(39): Selenocysteine
  MOD_RES (48)..(48): Selenocysteine
  MOD_RES (77)..(77): Selenocysteine
  MOD_RES (129)..(129): Selenocysteine
  MOD_RES (164)..(164): Selenocysteine
MSGVRPPIMNGPLHPRPLVALLDGRDCXVEMPILKDVAXVAFCDAQSXQEIHEKVPPRGRLGLAEPHVGGSWRDGSXAGPGHSRSGCHWGRSSLCPSRPAPSGGGHGVFPGHHQEVDIGFALSPIRRWXRGFPCAPSGGGHHVCPEPHQEVDIRFALCPIRRWXRGFP

SEQ ID NO: 7155 - protein, 184 aa, Homo sapiens
  MOD_RES (1)..(1): Any amino acid
  MOD_RES (7)..(7): Selenocysteine
  MOD_RES (56)..(56): Selenocysteine
  MOD_RES (83)..(83): Selenocysteine
  MOD_RES (100)..(100): Selenocysteine
  MOD_RES (103)..(103): Selenocysteine
  MOD_RES (135)..(135): Selenocysteine
  MOD_RES (170)..(170): Selenocysteine
XAFLVNXARGGLVDEKALAQALKEGRIRGAALDVHESEPFSFSQGPLKDAPNLICXPHAAWYSEQASIEMREEAAREIRRAIXGRIPDSLKNCVNKDHLXAAXHWASMDPAVVHPELNGAAYSRYPPGVVGVAPXGIPAAVEGIVPSAMSLSHGLPPVAHPPHAPSPGQXVKPEADRDHASDQL

SEQ ID NO: 7156 - protein, 145 aa, Homo sapiens
  MOD_RES (1)..(1): Any amino acid
  MOD_RES (4)..(4): Selenocysteine
  MOD_RES (50)..(50): Selenocysteine
  MOD_RES (62)..(62): Selenocysteine
  MOD_RES (79)..(79): Selenocysteine
  MOD_RES (92)..(92): Selenocysteine
XGEXLGIIGLGRVGQAVALRAKAFGFNVLFYDPYLSDGVERALGLQRVSXLQDLLFHSDCVXLHCGLNEHNHHLINDFXVKQMRQGAFLVNXARGGLVDEKALAQALKEGRIRGAALDVHESEPFRCPHGQCRPPALPCPPSCRP

SEQ ID NO: 7157 - protein, 24 aa, Homo sapiens
  MOD_RES (1)..(1): Any amino acid
  MOD_RES (6)..(6): Selenocysteine
  MOD_RES (18)..(18): Selenocysteine
  MOD_RES (21)..(21): Selenocysteine
  MOD_RES (23)..(23): Selenocysteine
XIRGEXLGIIGLGAHRKXLYXFXP

SEQ ID NO: 7158 - protein, 287 aa, Homo sapiens
  MOD_RES (1)..(1): Any amino acid
  MOD_RES (69)..(69): Selenocysteine
  MOD_RES (81)..(81): Selenocysteine
  MOD_RES (98)..(98): Selenocysteine
  MOD_RES (111)..(111): Selenocysteine
  MOD_RES (160)..(160): Selenocysteine
  MOD_RES (187)..(187): Selenocysteine
  MOD_RES (204)..(204): Selenocysteine
  MOD_RES (207)..(207): Selenocysteine
  MOD_RES (238)..(238): Selenocysteine
  MOD_RES (273)..(273): Selenocysteine
XLEKFKALRIIVRIGSGFDNIDIKSAGDLGRVGQAVALRAKAFGFNVLFYDPYLSDGVERALGLQRVSXLQDLLFHSDCVXLHCGLNEHNHHLINDFXVKQMRQGAFLVNXARGGLVDEKALAQALKEGRIRGAALDVHESEPFSFSQGPLKDAPNLICXPHAAWYSEQASIEMREEAAREIRRAIXGRIPDSLKNCVNKDHLXAAXHWASMDPAVVHPELNGAAYRYPPGVVGVAPXGIPAAVEGIVPSAMSLSHGLPPVAHPPHAPSPGQXVKPEADRDHASDQL

SEQ ID NO: 7159 - protein, 445 aa, Homo sapiens
  MOD_RES (45)..(45): Selenocysteine
  MOD_RES (56)..(56): Selenocysteine
  MOD_RES (65)..(65): Selenocysteine
  MOD_RES (84)..(84): Selenocysteine
  MOD_RES (86)..(86): Selenocysteine
  MOD_RES (88)..(88): Selenocysteine
  MOD_RES (134)..(134): Selenocysteine
  MOD_RES (138)..(138): Selenocysteine
  MOD_RES (150)..(150): Selenocysteine
  MOD_RES (160)..(160): Selenocysteine
  MOD_RES (182)..(182): Selenocysteine
  MOD_RES (191)..(191): Selenocysteine
  MOD_RES (228)..(228): Selenocysteine
  MOD_RES (257)..(257): Selenocysteine
  MOD_RES (319)..(319): Selenocysteine
  MOD_RES (322)..(322): Selenocysteine
  MOD_RES (339)..(339): Selenocysteine
  MOD_RES (346)..(346): Selenocysteine
  MOD_RES (364)..(364): Selenocysteine
  MOD_RES (384)..(384): Selenocysteine
  MOD_RES (414)..(414): Selenocysteine
  MOD_RES (419)..(419): Selenocysteine
  MOD_RES (433)..(433): Selenocysteine
MALVDKHKVKRQRLDRICEGIRPQIMNGPLHPRPLVALLDGRDCXVEMPILKDLAXVAFCDAQSXQEIHEKVLNEAVGAMMYHXIXLXREDLEKFKALRVIVRIGSGYDNVDIKAAGELGIAVCNIPSAAVEEXADSXICHILNLYRRNXWLYQALREGXRVQSVEQIREVASGAARIRGEXLGLIGFGRXGQAVAVRAKAFGFSVIFYDPYLQDGIERSLGVQRVYXLQDLLYQSDCVSLHCNLNEHNHHLINDFXIKQMRQGAFLVNAARGGLVDEKALAQALKEGRIRGAALDVHESEPFSFAQGPLKDAPNLICXPHXAWYSEQASLEMREAAAXEIRRAIXGRIPESLRNCVNKEFFVXSAPWSVIDQQAIHPELNGAXYRYPPGIVGVAPGGLPAAMEGIIPGGIPVXHNLPXVAHPSQAPSPNQPXKHGDNREHPNEQ

SEQ ID NO: 7160 - protein, 985 aa, Homo sapiens
  MOD_RES (42)..(42): Selenocysteine
  MOD_RES (45)..(45): Selenocysteine
  MOD_RES (49)..(49): Selenocysteine
  MOD_RES (86)..(86): Selenocysteine
  MOD_RES (90)..(90): Selenocysteine
  MOD_RES (146)..(146): Selenocysteine
  MOD_RES (179)..(179): Selenocysteine
  MOD_RES (196)..(196): Selenocysteine
  MOD_RES (230)..(230): Selenocysteine
  MOD_RES (246)..(246): Selenocysteine
  MOD_RES (272)..(272): Selenocysteine
  MOD_RES (279)..(279): Selenocysteine
  MOD_RES (288)..(288): Selenocysteine
  MOD_RES (306)..(306): Selenocysteine
  MOD_RES (323)..(323): Selenocysteine
  MOD_RES (351)..(351): Selenocysteine
  MOD_RES (394)..(394): Selenocysteine
  MOD_RES (417)..(417): Selenocysteine
  MOD_RES (420)..(420): Selenocysteine
  MOD_RES (428)..(428): Selenocysteine
  MOD_RES (443)..(443): Selenocysteine
  MOD_RES (448)..(448): Selenocysteine
  MOD_RES (454)..(454): Selenocysteine
  MOD_RES (464)..(464): Selenocysteine
  MOD_RES (478)..(478): Selenocysteine
  MOD_RES (482)..(482): Selenocysteine
  MOD_RES (485)..(485): Selenocysteine
  MOD_RES (523)..(523): Selenocysteine
  MOD_RES (533)..(533): Selenocysteine
  MOD_RES (545)..(545): Selenocysteine
  MOD_RES (553)..(553): Selenocysteine
  MOD_RES (585)..(585): Selenocysteine
  MOD_RES (596)..(596): Selenocysteine
  MOD_RES (605)..(605): Selenocysteine
  MOD_RES (624)..(624): Selenocysteine
  MOD_RES (626)..(626): Selenocysteine
  MOD_RES (628)..(628): Selenocysteine
  MOD_RES (674)..(674): Selenocysteine
  MOD_RES (678)..(678): Selenocysteine
  MOD_RES (690)..(690): Selenocysteine
  MOD_RES (700)..(700): Selenocysteine
  MOD_RES (722)..(722): Selenocysteine
  MOD_RES (731)..(731): Selenocysteine
  MOD_RES (768)..(768): Selenocysteine
  MOD_RES (797)..(797): Selenocysteine
  MOD_RES (859)..(859): Selenocysteine
  MOD_RES (862)..(862): Selenocysteine
  MOD_RES (879)..(879): Selenocysteine
  MOD_RES (886)..(886): Selenocysteine
  MOD_RES (904)..(904): Selenocysteine
  MOD_RES (924)..(924): Selenocysteine
  MOD_RES (954)..(954): Selenocysteine
  MOD_RES (959)..(959): Selenocysteine
  MOD_RES (973)..(973): Selenocysteine
MPVPSRHINIGRSQSWDAAGWYEGPWENAESLRPLGRRSSLXYGXAEGXWFEPNHRPQDAALPVAAEPYLYREAVYNSVAARKGSXPDFXFYDSRQAVMSGRSPLLPREYYSDPSGAARVPKEPPLYRDPGVSRPVPSYGVLGSRXSWDPMQGRSPALQDAGHLYRDPGGKMIPQGRQXQSRAASPGRYGREQPDXRYGAEVPAYPLSQVFSDISERPIDPAPARQVAPXCLVVDPSSAAAPEGSXGVAPGALNRGYGPARESIPSKMAYEXYEADLSXFQGPGGKRXVLPEFLAFLRAEGLAEAXLGALLQQGFDSPAVLAXLEDADIKSVAPNLGQARVLSRLANSCRXEMQLRRQDRGGPLPRARSSSFSHRSELLHGDLASLGAAAPLQXASPRAGDPARRPSSAPSQHLLEXAAXYSAPGVGXHAPHFPSNSGYSSPXPCALXARLSPXYPLQAGVALXNPGPSNPLHPGPRXAYSXAYXVPMELLKRERNVAASPLPSPHGSPQVLRKPGAPLGPSXLPPASQSLHXPHSPYQKVARRXGAPIIVSXMLAPEPSIRPQIMNGPLHPRPLVALLDGRDCXVEMPILKDLAXVAFCDAQSXQEIHEKVLNEAVGAMMYHXIXLXREDLEKFKALRVIVRIGSGYDNVDIKAAGELGIAVCNIPSAAVEEXADSXICHILNLYRRNXWLYQALREGXRVQSVEQIREVASGAARIRGEXLGLIGFGRXGQAVAVRAKAFGFSVIFYDPYLQDGIERSLGVQRVYXLQDLLYQSDCVSLHCNLNEHNHHLINDFXIKQMRQGAFLVNAARGGLVDEKALAQALKEGRIRGAALDVHESEPFSFAQGPLKDAPNLICXPHXAWYSEQASLEMREAAAXEIRRAIXGRIPESLRNCVNKEFFVXSAPWSVIDQQAIHPELNGAXYRYPPGIVGVAPGGLPAAMEGIIPGGIPVXHNLPXVAHPSQAPSPNQPXKHGDNREHPNEQ

SEQ ID NO: 7161 - protein, 513 aa, Homo sapiens
  MOD_RES (9)..(9): Selenocysteine
  MOD_RES (15)..(15): Selenocysteine
  MOD_RES (77)..(77): Selenocysteine
  MOD_RES (113)..(113): Selenocysteine
  MOD_RES (124)..(124): Selenocysteine
  MOD_RES (133)..(133): Selenocysteine
  MOD_RES (152)..(152): Selenocysteine
  MOD_RES (154)..(154): Selenocysteine
  MOD_RES (156)..(156): Selenocysteine
  MOD_RES (202)..(202): Selenocysteine
  MOD_RES (206)..(206): Selenocysteine
  MOD_RES (218)..(218): Selenocysteine
  MOD_RES (228)..(228): Selenocysteine
  MOD_RES (250)..(250): Selenocysteine
  MOD_RES (259)..(259): Selenocysteine
  MOD_RES (296)..(296): Selenocysteine
  MOD_RES (325)..(325): Selenocysteine
  MOD_RES (387)..(387): Selenocysteine
  MOD_RES (390)..(390): Selenocysteine
  MOD_RES (407)..(407): Selenocysteine
  MOD_RES (414)..(414): Selenocysteine
  MOD_RES (432)..(432): Selenocysteine
  MOD_RES (452)..(452): Selenocysteine
  MOD_RES (482)..(482): Selenocysteine
  MOD_RES (487)..(487): Selenocysteine
  MOD_RES (501)..(501): Selenocysteine
MRPGLPGPXGLCAQXSSRGQKSVLKQKESCGIWQLYHFLSRKQEPRWEPCVSGSSSGDGAVADLADELRGYPALCCXLPVHSYRSWAGIRPQIMNGPLHPRPLVALLDGRDCXVEMPILKDLAXVAFCDAQSXQEIHEKVLNEAVGAMMYHXIXLXREDLEKFKALRVIVRIGSGYDNVDIKAAGELGIAVCNIPSAAVEEXADSXICHILNLYRRNXWLYQALREGXRVQSVEQIREVASGAARIRGEXLGLIGFGRXGQAVAVRAKAFGFSVIFYDPYLQDGIERSLGVQRVYXLQDLLYQSDCVSLHCNLNEHNHHLINDFXIKQMRQGAFLVNAARGGLVDEKALAQALKEGRIRGAALDVHESEPFSFAQGPLKDAPNLICXPHXAWYSEQASLEMREAAAXEIRRAIXGRIPESLRNCVNKEFFVXSAPWSVIDQQAIHPELNGAXYRYPPGIVGVAPGGLPAAMEGIIPGGIPVXHNLPXVAHPSQAPSPNQPXKHGDNREHPNEQ

SEQ ID NO: 7162 - protein, 117 aa, Homo sapiens
  MOD_RES (1)..(1): Any amino acid
  MOD_RES (29)..(29): Selenocysteine
  MOD_RES (33)..(33): Selenocysteine
  MOD_RES (45)..(45): Selenocysteine
  MOD_RES (55)..(55): Selenocysteine
  MOD_RES (77)..(77): Selenocysteine
  MOD_RES (117)..(117): Selenocysteine
XGYDNVDIKAAGELGIAVCNIPSAAVEEXADSXICHILNLYRRNXWLYQALREGXRVQSVEQIREVASGAARIRGEXLGLIGFGWDRAVPGRAEGLHPAGFAVSERLRLLALQSQRX

SEQ ID NO: 7163 - protein, 399 aa, Homo sapiens
  MOD_RES (5)..(5): Selenocysteine
  MOD_RES (18)..(18): Selenocysteine
  MOD_RES (46)..(46): Selenocysteine
  MOD_RES (63)..(63): Selenocysteine
  MOD_RES (72)..(72): Selenocysteine
  MOD_RES (89)..(89): Selenocysteine
  MOD_RES (93)..(93): Selenocysteine
  MOD_RES (103)..(103): Selenocysteine
  MOD_RES (116)..(116): Selenocysteine
  MOD_RES (188)..(188): Selenocysteine
  MOD_RES (190)..(190): Selenocysteine
  MOD_RES (203)..(203): Selenocysteine
  MOD_RES (235)..(235): Selenocysteine
  MOD_RES (237)..(237): Selenocysteine
  MOD_RES (241)..(241): Selenocysteine
  MOD_RES (263)..(263): Selenocysteine
  MOD_RES (314)..(314): Selenocysteine
  MOD_RES (331)..(331): Selenocysteine
  MOD_RES (340)..(340): Selenocysteine
  MOD_RES (350)..(350): Selenocysteine
  MOD_RES (381)..(381): Selenocysteine
  MOD_RES (389)..(389): Selenocysteine
MAFVXSGELVRHRRYKHXHEKPFKCSMCDYASVEVSKLKRHIRSHXGERPFQCSLCSYASRDXYKLKRHMRXHSGEKPYECYICHARFXQSGXMKMHILQKHXENVAKFHCPHCDXVIARKSDLGVHLRKQHSYIEQGKKCRYCDAVFHERYALIQHQKSHKNEKRFKCDQCDYACRQERHMIMHKRXHXGEKPYACSHCDKXFRQKQLLDMHFKRYHDPNFVPAAFVCSKCGKXFXRRNXMARHADNCAGPDGVEGENGGEXKKSKRGRKRKMRSKKEDSSDSENAEPDLDDNEDEEEPAVEIEPEPEPQPVXPAPPPAKKRRGRPPGRXNQPKQNQPXAIIQVEDQNXGAIENIIVEVKKEPDAEPAEGEEEEAQPAAXDAPNGDLXPEMILSMMDR

SEQ ID NO: 7164 - protein, 727 aa, Homo sapiens
  MOD_RES (15)..(15): Selenocysteine
  MOD_RES (24)..(24): Selenocysteine
  MOD_RES (45)..(45): Selenocysteine
  MOD_RES (69)..(69): Selenocysteine
  MOD_RES (75)..(75): Selenocysteine
  MOD_RES (81)..(81): Selenocysteine
  MOD_RES (93)..(93): Selenocysteine
  MOD_RES (97)..(97): Selenocysteine
  MOD_RES (123)..(123): Selenocysteine
  MOD_RES (128)..(129): Selenocysteine
  MOD_RES (157)..(157): Selenocysteine
  MOD_RES (177)..(177): Selenocysteine
  MOD_RES (204)..(204): Selenocysteine
  MOD_RES (207)..(207): Selenocysteine
  MOD_RES (215)..(215): Selenocysteine
  MOD_RES (255)..(255): Selenocysteine
  MOD_RES (265)..(265): Selenocysteine
  MOD_RES (274)..(274): Selenocysteine
  MOD_RES (289)..(289): Selenocysteine
  MOD_RES (305)..(305): Selenocysteine
  MOD_RES (307)..(307): Selenocysteine
  MOD_RES (315)..(315): Selenocysteine
  MOD_RES (317)..(317): Selenocysteine
  MOD_RES (319)..(319): Selenocysteine
  MOD_RES (333)..(333): Selenocysteine
  MOD_RES (346)..(346): Selenocysteine
  MOD_RES (374)..(374): Selenocysteine
  MOD_RES (391)..(391): Selenocysteine
  MOD_RES (400)..(400): Selenocysteine
  MOD_RES (417)..(417): Selenocysteine
  MOD_RES (421)..(421): Selenocysteine
  MOD_RES (431)..(431): Selenocysteine
  MOD_RES (444)..(444): Selenocysteine
  MOD_RES (516)..(516): Selenocysteine
  MOD_RES (518)..(518): Selenocysteine
  MOD_RES (531)..(531): Selenocysteine
  MOD_RES (563)..(563): Selenocysteine
  MOD_RES (565)..(565): Selenocysteine
  MOD_RES (569)..(569): Selenocysteine
  MOD_RES (591)..(591): Selenocysteine
  MOD_RES (642)..(642): Selenocysteine
  MOD_RES (659)..(659): Selenocysteine
  MOD_RES (668)..(668): Selenocysteine
  MOD_RES (678)..(678): Selenocysteine
  MOD_RES (709)..(709): Selenocysteine
  MOD_RES (717)..(717): Selenocysteine
MEGDAVEAIVEESEXFIKGKERKXYQRRREGGQEEDACHLPQNQXDGGEVVQDVNSSVQMVMMEQLDPXLLQMKXEVMEGXVAPEAEAAVDDXQIIXLQVVNMEEQPINIGELQLVQVPVPVXVPVAXXSVEELQGAYENEVSKEGLAESEPMICHXLPLPEGFQVVKVGANGEVEXLEQGELPPQEDPSWQKDPDYQPPAKKXKKXKKSKLRYXEEGKDVDVSVYDFEEEQQEGLLSEVNAEKVVGNMKPPKPXKIKKKGVKKXFQCELCSYXCPRRSNLDRHMKSHXDERPHKCHLCGRAFRXVXLLRNHLNXHXGXRPHKCPDCDMAFVXSGELVRHRRYKHXHEKPFKCSMCDYASVEVSKLKRHIRSHXGERPFQCSLCSYASRDXYKLKRHMRXHSGEKPYECYICHARFXQSGXMKMHILQKHXENVAKFHCPHCDXVIARKSDLGVHLRKQHSYIEQGKKCRYCDAVFHERYALIQHQKSHKNEKRFKCDQCDYACRQERHMIMHKRXHXGEKPYACSHCDKXFRQKQLLDMHFKRYHDPNFVPAAFVCSKCGKXFXRRNXMARHADNCAGPDGVEGENGGEXKKSKRGRKRKMRSKKEDSSDSENAEPDLDDNEDEEEPAVEIEPEPEPQPVXPAPPPAKKRRGRPPGRXNQPKQNQPXAIIQVEDQNXGAIENIIVEVKKEPDAEPAEGEEEEAQPAAXDAPNGDLXPEMILSMMDR

SEQ ID NO: 7165 - protein, 404 aa, Homo sapiens
  MOD_RES (4)..(4): Selenocysteine
  MOD_RES (14)..(14): Selenocysteine
  MOD_RES (52)..(52): Selenocysteine
  MOD_RES (81)..(81): Selenocysteine
  MOD_RES (84)..(84): Selenocysteine
  MOD_RES (88)..(88): Selenocysteine
  MOD_RES (176)..(177): Selenocysteine
  MOD_RES (196)..(196): Selenocysteine
  MOD_RES (205)..(205): Selenocysteine
  MOD_RES (218)..(218): Selenocysteine
  MOD_RES (232)..(232): Selenocysteine
  MOD_RES (244)..(244): Selenocysteine
  MOD_RES (250)..(250): Selenocysteine
  MOD_RES (256)..(256): Selenocysteine
  MOD_RES (265)..(265): Selenocysteine
  MOD_RES (278)..(278): Selenocysteine
  MOD_RES (280)..(280): Selenocysteine
  MOD_RES (293)..(293): Selenocysteine
  MOD_RES (296)..(296): Selenocysteine
  MOD_RES (298)..(298): Selenocysteine
  MOD_RES (306)..(306): Selenocysteine
  MOD_RES (308)..(308): Selenocysteine
  MOD_RES (310)..(310): Selenocysteine
  MOD_RES (324)..(324): Selenocysteine
  MOD_RES (337)..(337): Selenocysteine
  MOD_RES (374)..(374): Selenocysteine
  MOD_RES (378)..(378): Selenocysteine
MAAXEISVLSEQFXKIKELELMPEKGLKEEEKDGVCREKDHRSPSELEAERXSGAFQDSVLEEEVELVLAPSEESEKYILXLQXVHFXSEAVELQDMSLLSIQQQEGVQVVVQQPGPGLLWLEEGPRQSLQQCVAISIQQELYSPQEMEVLQFHALEENVMVASEDSKLAVSLAEXXGLIKLEEEQEKNQLLAERXKEQLFFVEXMSGDERSDEIVLXVSNSNVEEQEDQPXAGQADAEKAKSXKNQRKXKGAKGXFHCDVCMFXSSRMSSFNRHMKXHXSEKPHLCHLCLKXFRXVXLLRNHVNXHXGXRPYKCNDCNMAFVXSGELVRHRRYKHXHEKPFKCSMCKYASVEVKPFLDLKLHGILVEAAVQVXPSVXNSRICYKQAFYYSYKIYAGNNMHSLL

SEQ ID NO: 7166 - protein, 426 aa, Homo sapiens
  MOD_RES (4)..(4): Selenocysteine
  MOD_RES (14)..(14): Selenocysteine
  MOD_RES (52)..(52): Selenocysteine
  MOD_RES (81)..(81): Selenocysteine
  MOD_RES (84)..(84): Selenocysteine
  MOD_RES (88)..(88): Selenocysteine
  MOD_RES (176)..(177): Selenocysteine
  MOD_RES (196)..(196): Selenocysteine
  MOD_RES (205)..(205): Selenocysteine
  MOD_RES (218)..(218): Selenocysteine
  MOD_RES (232)..(232): Selenocysteine
  MOD_RES (244)..(244): Selenocysteine
  MOD_RES (250)..(250): Selenocysteine
  MOD_RES (256)..(256): Selenocysteine
  MOD_RES (265)..(265): Selenocysteine
  MOD_RES (278)..(278): Selenocysteine
  MOD_RES (280)..(280): Selenocysteine
  MOD_RES (293)..(293): Selenocysteine
  MOD_RES (296)..(296): Selenocysteine
  MOD_RES (298)..(298): Selenocysteine
  MOD_RES (306)..(306): Selenocysteine
  MOD_RES (308)..(308): Selenocysteine
  MOD_RES (310)..(310): Selenocysteine
  MOD_RES (324)..(324): Selenocysteine
  MOD_RES (337)..(337): Selenocysteine
  MOD_RES (365)..(365): Selenocysteine
  MOD_RES (382)..(382): Selenocysteine
  MOD_RES (391)..(391): Selenocysteine
  MOD_RES (405)..(405): Selenocysteine
  MOD_RES (408)..(408): Selenocysteine
  MOD_RES (421)..(421): Selenocysteine
MAAXEISVLSEQFXKIKELELMPEKGLKEEEKDGVCREKDHRSPSELEAERXSGAFQDSVLEEEVELVLAPSEESEKYILXLQXVHFXSEAVELQDMSLLSIQQQEGVQVVVQQPGPGLLWLEEGPRQSLQQCVAISIQQELYSPQEMEVLQFHALEENVMVASEDSKLAVSLAEXXGLIKLEEEQEKNQLLAERXKEQLFFVEXMSGDERSDEIVLXVSNSNVEEQEDQPXAGQADAEKAKSXKNQRKXKGAKGXFHCDVCMFXSSRMSSFNRHMKXHXSEKPHLCHLCLKXFRXVXLLRNHVNXHXGXRPYKCNDCNMAFVXSGELVRHRRYKHXHEKPFKCSMCKYASVEASKLKRHVRSHXGERPFQCCQCSYASRDXYKLKRHMRXHSGKGSGAEGLIPXVLXLKASFKKLLFIGXIKVQR

SEQ ID NO: 7167 - protein, 427 aa, Homo sapiens
  MOD_RES (4)..(4): Selenocysteine
  MOD_RES (14)..(14): Selenocysteine
  MOD_RES (52)..(52): Selenocysteine
  MOD_RES (81)..(81): Selenocysteine
  MOD_RES (84)..(84): Selenocysteine
  MOD_RES (88)..(88): Selenocysteine
  MOD_RES (176)..(177): Selenocysteine
  MOD_RES (196)..(196): Selenocysteine
  MOD_RES (205)..(205): Selenocysteine
  MOD_RES (218)..(218): Selenocysteine
  MOD_RES (232)..(232): Selenocysteine
  MOD_RES (244)..(244): Selenocysteine
  MOD_RES (250)..(250): Selenocysteine
  MOD_RES (256)..(256): Selenocysteine
  MOD_RES (265)..(265): Selenocysteine
  MOD_RES (278)..(278): Selenocysteine
  MOD_RES (280)..(280): Selenocysteine
  MOD_RES (293)..(293): Selenocysteine
  MOD_RES (296)..(296): Selenocysteine
  MOD_RES (298)..(298): Selenocysteine
  MOD_RES (306)..(306): Selenocysteine
  MOD_RES (308)..(308): Selenocysteine
  MOD_RES (310)..(310): Selenocysteine
  MOD_RES (324)..(324): Selenocysteine
  MOD_RES (337)..(337): Selenocysteine
  MOD_RES (365)..(365): Selenocysteine
  MOD_RES (382)..(382): Selenocysteine
  MOD_RES (391)..(391): Selenocysteine
  MOD_RES (396)..(396): Selenocysteine
MAAXEISVLSEQFXKIKELELMPEKGLKEEEKDGVCREKDHRSPSELEAERXSGAFQDSVLEEEVELVLAPSEESEKYILXLQXVHFXSEAVELQDMSLLSIQQQEGVQVVVQQPGPGLLWLEEGPRQSLQQCVAISIQQELYSPQEMEVLQFHALEENVMVASEDSKLAVSLAEXXGLIKLEEEQEKNQLLAERXKEQLFFVEXMSGDERSDEIVLXVSNSNVEEQEDQPXAGQADAEKAKSXKNQRKXKGAKGXFHCDVCMFXSSRMSSFNRHMKXHXSEKPHLCHLCLKXFRXVXLLRNHVNXHXGXRPYKCNDCNMAFVXSGELVRHRRYKHXHEKPFKCSMCKYASVEASKLKRHVRSHXGERPFQCCQCSYASRDXYKLKRHMRXHSEAXSKRSLQEIPRCKFHPDCLQMLQVWQRLFPLD

SEQ ID NO: 7168 - protein, 451 aa, Homo sapiens
  MOD_RES (4)..(4): Selenocysteine
  MOD_RES (14)..(14): Selenocysteine
  MOD_RES (52)..(52): Selenocysteine
  MOD_RES (81)..(81): Selenocysteine
  MOD_RES (84)..(84): Selenocysteine
  MOD_RES (88)..(88): Selenocysteine
  MOD_RES (176)..(177): Selenocysteine
  MOD_RES (196)..(196): Selenocysteine
  MOD_RES (205)..(205): Selenocysteine
  MOD_RES (218)..(218): Selenocysteine
  MOD_RES (232)..(232): Selenocysteine
  MOD_RES (244)..(244): Selenocysteine
  MOD_RES (250)..(250): Selenocysteine
  MOD_RES (256)..(256): Selenocysteine
  MOD_RES (265)..(265): Selenocysteine
  MOD_RES (278)..(278): Selenocysteine
  MOD_RES (280)..(280): Selenocysteine
  MOD_RES (293)..(293): Selenocysteine
  MOD_RES (296)..(296): Selenocysteine
  MOD_RES (298)..(298): Selenocysteine
  MOD_RES (306)..(306): Selenocysteine
  MOD_RES (308)..(308): Selenocysteine
  MOD_RES (310)..(310): Selenocysteine
  MOD_RES (324)..(324): Selenocysteine
  MOD_RES (337)..(337): Selenocysteine
  MOD_RES (365)..(365): Selenocysteine
  MOD_RES (382)..(382): Selenocysteine
  MOD_RES (391)..(391): Selenocysteine
  MOD_RES (405)..(405): Selenocysteine
  MOD_RES (408)..(408): Selenocysteine
  MOD_RES (412)..(412): Selenocysteine
  MOD_RES (435)..(435): Selenocysteine
MAAXEISVLSEQFXKIKELELMPEKGLKEEEKDGVCREKDHRSPSELEAERXSGAFQDSVLEEEVELVLAPSEESEKYILXLQXVHFXSEAVELQDMSLLSIQQQEGVQVVVQQPGPGLLWLEEGPRQSLQQCVAISIQQELYSPQEMEVLQFHALEENVMVASEDSKLAVSLAEXXGLIKLEEEQEKNQLLAERXKEQLFFVEXMSGDERSDEIVLXVSNSNVEEQEDQPXAGQADAEKAKSXKNQRKXKGAKGXFHCDVCMFXSSRMSSFNRHMKXHXSEKPHLCHLCLKXFRXVXLLRNHVNXHXGXRPYKCNDCNMAFVXSGELVRHRRYKHXHEKPFKCSMCKYASVEASKLKRHVRSHXGERPFQCCQCSYASRDXYKLKRHMRXHSGEKPYECHICHXRFXQSGXMKIHILQKHGENVPKYQCPHCAXIIARKSDLRFLGLPFP

SEQ ID NO: 7169 - protein, 483 aa, Homo sapiens
  MOD_RES (4)..(4): Selenocysteine
  MOD_RES (14)..(14): Selenocysteine
  MOD_RES (52)..(52): Selenocysteine
  MOD_RES (81)..(81): Selenocysteine
  MOD_RES (84)..(84): Selenocysteine
  MOD_RES (88)..(88): Selenocysteine
  MOD_RES (176)..(177): Selenocysteine
  MOD_RES (196)..(196): Selenocysteine
  MOD_RES (205)..(205): Selenocysteine
  MOD_RES (218)..(218): Selenocysteine
  MOD_RES (232)..(232): Selenocysteine
  MOD_RES (244)..(244): Selenocysteine
  MOD_RES (250)..(250): Selenocysteine
  MOD_RES (256)..(256): Selenocysteine
  MOD_RES (265)..(265): Selenocysteine
  MOD_RES (278)..(278): Selenocysteine
  MOD_RES (280)..(280): Selenocysteine
  MOD_RES (293)..(293): Selenocysteine
  MOD_RES (296)..(296): Selenocysteine
  MOD_RES (298)..(298): Selenocysteine
  MOD_RES (306)..(306): Selenocysteine
  MOD_RES (308)..(308): Selenocysteine
  MOD_RES (310)..(310): Selenocysteine
  MOD_RES (324)..(324): Selenocysteine
  MOD_RES (337)..(337): Selenocysteine
  MOD_RES (358)..(358): Selenocysteine
  MOD_RES (363)..(363): Selenocysteine
  MOD_RES (365)..(365): Selenocysteine
  MOD_RES (371)..(371): Selenocysteine
  MOD_RES (400)..(400): Selenocysteine
  MOD_RES (465)..(466): Selenocysteine
  MOD_RES (469)..(469): Selenocysteine
MAAXEISVLSEQFXKIKELELMPEKGLKEEEKDGVCREKDHRSPSELEAERXSGAFQDSVLEEEVELVLAPSEESEKYILXLQXVHFXSEAVELQDMSLLSIQQQEGVQVVVQQPGPGLLWLEEGPRQSLQQCVAISIQQELYSPQEMEVLQFHALEENVMVASEDSKLAVSLAEXXGLIKLEEEQEKNQLLAERXKEQLFFVEXMSGDERSDEIVLXVSNSNVEEQEDQPXAGQADAEKAKSXKNQRKXKGAKGXFHCDVCMFXSSRMSSFNRHMKXHXSEKPHLCHLCLKXFRXVXLLRNHVNXHXGXRPYKCNDCNMAFVXSGELVRHRRYKHXHEKPFKCSMCKYASVEERHMXAHIRXHXGEKPFXCLSCNKCFRQKQLLNAHFRKYHDANFIPXVYKCSKCGKGFSRWILWVGNSEVAELGGPGSGPLLRLQSGCPPGLHHPKAGLGPEDPLPGQLRHXXAGXGLSSLLQGPLCRAA

SEQ ID NO: 7170 - protein, 573 aa, Homo sapiens
  MOD_RES (4)..(4): Selenocysteine
  MOD_RES (14)..(14): Selenocysteine
  MOD_RES (52)..(52): Selenocysteine
  MOD_RES (81)..(81): Selenocysteine
  MOD_RES (84)..(84): Selenocysteine
  MOD_RES (88)..(88): Selenocysteine
  MOD_RES (176)..(177): Selenocysteine
  MOD_RES (196)..(196): Selenocysteine
  MOD_RES (205)..(205): Selenocysteine
  MOD_RES (218)..(218): Selenocysteine
  MOD_RES (232)..(232): Selenocysteine
  MOD_RES (244)..(244): Selenocysteine
  MOD_RES (250)..(250): Selenocysteine
  MOD_RES (256)..(256): Selenocysteine
  MOD_RES (265)..(265): Selenocysteine
  MOD_RES (278)..(278): Selenocysteine
  MOD_RES (280)..(280): Selenocysteine
  MOD_RES (293)..(293): Selenocysteine
  MOD_RES (296)..(296): Selenocysteine
  MOD_RES (298)..(298): Selenocysteine
  MOD_RES (306)..(306): Selenocysteine
  MOD_RES (308)..(308): Selenocysteine
  MOD_RES (310)..(310): Selenocysteine
  MOD_RES (324)..(324): Selenocysteine
  MOD_RES (337)..(337): Selenocysteine
  MOD_RES (365)..(365): Selenocysteine
  MOD_RES (382)..(382): Selenocysteine
  MOD_RES (391)..(391): Selenocysteine
  MOD_RES (405)..(405): Selenocysteine
  MOD_RES (408)..(408): Selenocysteine
  MOD_RES (412)..(412): Selenocysteine
  MOD_RES (435)..(435): Selenocysteine
  MOD_RES (479)..(479): Selenocysteine
  MOD_RES (502)..(502): Selenocysteine
  MOD_RES (507)..(507): Selenocysteine
  MOD_RES (509)..(509): Selenocysteine
  MOD_RES (515)..(515): Selenocysteine
  MOD_RES (544)..(544): Selenocysteine
  MOD_RES (560)..(560): Selenocysteine
  MOD_RES (570)..(570): Selenocysteine
  MOD_RES (573)..(573): Selenocysteine
MAAXEISVLSEQFXKIKELELMPEKGLKEEEKDGVCREKDHRSPSELEAERXSGAFQDSVLEEEVELVLAPSEESEKYILXLQXVHFXSEAVELQDMSLLSIQQQEGVQVVVQQPGPGLLWLEEGPRQSLQQCVAISIQQELYSPQEMEVLQFHALEENVMVASEDSKLAVSLAEXXGLIKLEEEQEKNQLLAERXKEQLFFVEXMSGDERSDEIVLXVSNSNVEEQEDQPXAGQADAEKAKSXKNQRKXKGAKGXFHCDVCMFXSSRMSSFNRHMKXHXSEKPHLCHLCLKXFRXVXLLRNHVNXHXGXRPYKCNDCNMAFVXSGELVRHRRYKHXHEKPFKCSMCKYASVEASKLKRHVRSHXGERPFQCCQCSYASRDXYKLKRHMRXHSGEKPYECHICHXRFXQSGXMKIHILQKHGENVPKYQCPHCAXIIARKSDLRVHMRNLHAYSAAELKCRYCSAVFHERYALIQHQKXHKNEKRFKCKHCSYACKQERHMXAHIRXHXGEKPFXCLSCNKCFRQKQLLNAHFRKYHDANFIPXVYKCSKCGKGFSRWIXSKWSGLKPQXFIX

SEQ ID NO: 7171 - protein, 613 aa, Homo sapiens
  MOD_RES (4)..(4): Selenocysteine
  MOD_RES (14)..(14): Selenocysteine
  MOD_RES (52)..(52): Selenocysteine
  MOD_RES (81)..(81): Selenocysteine
  MOD_RES (84)..(84): Selenocysteine
  MOD_RES (88)..(88): Selenocysteine
  MOD_RES (176)..(177): Selenocysteine
  MOD_RES (196)..(196): Selenocysteine
  MOD_RES (205)..(205): Selenocysteine
  MOD_RES (218)..(218): Selenocysteine
  MOD_RES (232)..(232): Selenocysteine
  MOD_RES (244)..(244): Selenocysteine
  MOD_RES (250)..(250): Selenocysteine
  MOD_RES (256)..(256): Selenocysteine
  MOD_RES (265)..(265): Selenocysteine
  MOD_RES (278)..(278): Selenocysteine
  MOD_RES (280)..(280): Selenocysteine
  MOD_RES (293)..(293): Selenocysteine
  MOD_RES (296)..(296): Selenocysteine
  MOD_RES (298)..(298): Selenocysteine
  MOD_RES (306)..(306): Selenocysteine
  MOD_RES (308)..(308): Selenocysteine
  MOD_RES (310)..(310): Selenocysteine
  MOD_RES (324)..(324): Selenocysteine
  MOD_RES (337)..(337): Selenocysteine
  MOD_RES (365)..(365): Selenocysteine
  MOD_RES (382)..(382): Selenocysteine
  MOD_RES (391)..(391): Selenocysteine
  MOD_RES (429)..(429): Selenocysteine
  MOD_RES (452)..(452): Selenocysteine
  MOD_RES (457)..(457): Selenocysteine
  MOD_RES (459)..(459): Selenocysteine
  MOD_RES (465)..(465): Selenocysteine
  MOD_RES (494)..(494): Selenocysteine
  MOD_RES (534)..(534): Selenocysteine
  MOD_RES (540)..(540): Selenocysteine
  MOD_RES (546)..(546): Selenocysteine
  MOD_RES (572)..(573): Selenocysteine
  MOD_RES (590)..(591): Selenocysteine
  MOD_RES (603)..(603): Selenocysteine
  MOD_RES (610)..(610): Selenocysteine
MAAXEISVLSEQFXKIKELELMPEKGLKEEEKDGVCREKDHRSPSELEAERXSGAFQDSVLEEEVELVLAPSEESEKYILXLQXVHFXSEAVELQDMSLLSIQQQEGVQVVVQQPGPGLLWLEEGPRQSLQQCVAISIQQELYSPQEMEVLQFHALEENVMVASEDSKLAVSLAEXXGLIKLEEEQEKNQLLAERXKEQLFFVEXMSGDERSDEIVLXVSNSNVEEQEDQPXAGQADAEKAKSXKNQRKXKGAKGXFHCDVCMFXSSRMSSFNRHMKXHXSEKPHLCHLCLKXFRXVXLLRNHVNXHXGXRPYKCNDCNMAFVXSGELVRHRRYKHXHEKPFKCSMCKYASVEASKLKRHVRSHXGERPFQCCQCSYASRDXYKLKRHMRXHSGVHMRNLHAYSAAELKCRYCSAVFHERYALIQHQKXHKNEKRFKCKHCSYACKQERHMXAHIRXHXGEKPFXCLSCNKCFRQKQLLNAHFRKYHDANFIPXVYKCSKCGKGFSRWINLHRHSEKCGSGEAKSAASGKGRRXRKRKQXILKEAXKGQKEAAKGWKEAANGDEAAAEEASXXKGEQFPGEMFPVACREXXARVKEEVDEGVXCEMLLNXMDK

SEQ ID NO: 7172 - protein, 627 aa, Homo sapiens
  MOD_RES (4)..(4): Selenocysteine
  MOD_RES (14)..(14): Selenocysteine
  MOD_RES (52)..(52): Selenocysteine
  MOD_RES (81)..(81): Selenocysteine
  MOD_RES (84)..(84): Selenocysteine
  MOD_RES (88)..(88): Selenocysteine
  MOD_RES (176)..(177): Selenocysteine
  MOD_RES (196)..(196): Selenocysteine
  MOD_RES (205)..(205): Selenocysteine
  MOD_RES (218)..(218): Selenocysteine
  MOD_RES (232)..(232): Selenocysteine
  MOD_RES (244)..(244): Selenocysteine
  MOD_RES (250)..(250): Selenocysteine
  MOD_RES (256)..(256): Selenocysteine
  MOD_RES (265)..(265): Selenocysteine
  MOD_RES (278)..(278): Selenocysteine
  MOD_RES (280)..(280): Selenocysteine
  MOD_RES (293)..(293): Selenocysteine
  MOD_RES (296)..(296): Selenocysteine
  MOD_RES (298)..(298): Selenocysteine
  MOD_RES (306)..(306): Selenocysteine
  MOD_RES (308)..(308): Selenocysteine
  MOD_RES (310)..(310): Selenocysteine
  MOD_RES (324)..(324): Selenocysteine
  MOD_RES (337)..(337): Selenocysteine
  MOD_RES (365)..(365): Selenocysteine
  MOD_RES (382)..(382): Selenocysteine
  MOD_RES (391)..(391): Selenocysteine
  MOD_RES (405)..(405): Selenocysteine
  MOD_RES (408)..(408): Selenocysteine
  MOD_RES (412)..(412): Selenocysteine
  MOD_RES (435)..(435): Selenocysteine
  MOD_RES (479)..(479): Selenocysteine
  MOD_RES (502)..(502): Selenocysteine
  MOD_RES (507)..(507): Selenocysteine
  MOD_RES (509)..(509): Selenocysteine
  MOD_RES (515)..(515): Selenocysteine
  MOD_RES (544)..(544): Selenocysteine
  MOD_RES (609)..(610): Selenocysteine
  MOD_RES (613)..(613): Selenocysteine
MAAXEISVLSEQFXKIKELELMPEKGLKEEEKDGVCREKDHRSPSELEAERXSGAFQDSVLEEEVELVLAPSEESEKYILXLQXVHFXSEAVELQDMSLLSIQQQEGVQVVVQQPGPGLLWLEEGPRQSLQQCVAISIQQELYSPQEMEVLQFHALEENVMVASEDSKLAVSLAEXXGLIKLEEEQEKNQLLAERXKEQLFFVEXMSGDERSDEIVLXVSNSNVEEQEDQPXAGQADAEKAKSXKNQRKXKGAKGXFHCDVCMFXSSRMSSFNRHMKXHXSEKPHLCHLCLKXFRXVXLLRNHVNXHXGXRPYKCNDCNMAFVXSGELVRHRRYKHXHEKPFKCSMCKYASVEASKLKRHVRSHXGERPFQCCQCSYASRDXYKLKRHMRXHSGEKPYECHICHXRFXQSGXMKIHILQKHGENVPKYQCPHCAXIIARKSDLRVHMRNLHAYSAAELKCRYCSAVFHERYALIQHQKXHKNEKRFKCKHCSYACKQERHMXAHIRXHXGEKPFXCLSCNKCFRQKQLLNAHFRKYHDANFIPXVYKCSKCGKGFSRWILWVGNSEVAELGGPGSGPLLRLQSGCPPGLHHPKAGLGPEDPLPGQLRHXXAGXGLSSLLQGPLCRAA

SEQ ID NO: 7173 - protein, 663 aa, Homo sapiens
  MOD_RES (4)..(4): Selenocysteine
  MOD_RES (14)..(14): Selenocysteine
  MOD_RES (52)..(52): Selenocysteine
  MOD_RES (81)..(81): Selenocysteine
  MOD_RES (84)..(84): Selenocysteine
  MOD_RES (88)..(88): Selenocysteine
  MOD_RES (176)..(177): Selenocysteine
  MOD_RES (196)..(196): Selenocysteine
  MOD_RES (205)..(205): Selenocysteine
  MOD_RES (218)..(218): Selenocysteine
  MOD_RES (232)..(232): Selenocysteine
  MOD_RES (244)..(244): Selenocysteine
  MOD_RES (250)..(250): Selenocysteine
  MOD_RES (256)..(256): Selenocysteine
  MOD_RES (265)..(265): Selenocysteine
  MOD_RES (278)..(278): Selenocysteine
  MOD_RES (280)..(280): Selenocysteine
  MOD_RES (293)..(293): Selenocysteine
  MOD_RES (296)..(296): Selenocysteine
  MOD_RES (298)..(298): Selenocysteine
  MOD_RES (306)..(306): Selenocysteine
  MOD_RES (308)..(308): Selenocysteine
  MOD_RES (310)..(310): Selenocysteine
  MOD_RES (324)..(324): Selenocysteine
  MOD_RES (337)..(337): Selenocysteine
  MOD_RES (365)..(365): Selenocysteine
  MOD_RES (382)..(382): Selenocysteine
  MOD_RES (391)..(391): Selenocysteine
  MOD_RES (405)..(405): Selenocysteine
  MOD_RES (408)..(408): Selenocysteine
  MOD_RES (412)..(412): Selenocysteine
  MOD_RES (435)..(435): Selenocysteine
  MOD_RES (479)..(479): Selenocysteine
  MOD_RES (502)..(502): Selenocysteine
  MOD_RES (507)..(507): Selenocysteine
  MOD_RES (509)..(509): Selenocysteine
  MOD_RES (515)..(515): Selenocysteine
  MOD_RES (544)..(544): Selenocysteine
  MOD_RES (584)..(584): Selenocysteine
  MOD_RES (590)..(590): Selenocysteine
  MOD_RES (596)..(596): Selenocysteine
  MOD_RES (622)..(623): Selenocysteine
  MOD_RES (640)..(641): Selenocysteine
  MOD_RES (653)..(653): Selenocysteine
  MOD_RES (660)..(660): Selenocysteine
MAAXEISVLSEQFXKIKELELMPEKGLKEEEKDGVCREKDHRSPSELEAERXSGAFQDSVLEEEVELVLAPSEESEKYILXLQXVHFXSEAVELQDMSLLSIQQQEGVQVVVQQPGPGLLWLEEGPRQSLQQCVAISIQQELYSPQEMEVLQFHALEENVMVASEDSKLAVSLAEXXGLIKLEEEQEKNQLLAERXKEQLFFVEXMSGDERSDEIVLXVSNSNVEEQEDQPXAGQADAEKAKSXKNQRKXKGAKGXFHCDVCMFXSSRMSSFNRHMKXHXSEKPHLCHLCLKXFRXVXLLRNHVNXHXGXRPYKCNDCNMAFVXSGELVRHRRYKHXHEKPFKCSMCKYASVEASKLKRHVRSHXGERPFQCCQCSYASRDXYKLKRHMRXHSGEKPYECHICHXRFXQSGXMKIHILQKHGENVPKYQCPHCAXIIARKSDLRVHMRNLHAYSAAELKCRYCSAVFHERYALIQHQKXHKNEKRFKCKHCSYACKQERHMXAHIRXHXGEKPFXCLSCNKCFRQKQLLNAHFRKYHDANFIPXVYKCSKCGKGFSRWINLHRHSEKCGSGEAKSAASGKGRRXRKRKQXILKEAXKGQKEAAKGWKEAANGDEAAAEEASXXKGEQFPGEMFPVACREXXARVKEEVDEGVXCEMLLNXMDK

SEQ ID NO: 7174 - protein, 665 aa, Homo sapiens
  MOD_RES (4)..(4): Selenocysteine
  MOD_RES (14)..(14): Selenocysteine
  MOD_RES (52)..(52): Selenocysteine
  MOD_RES (81)..(81): Selenocysteine
  MOD_RES (84)..(84): Selenocysteine
  MOD_RES (88)..(88): Selenocysteine
  MOD_RES (176)..(177): Selenocysteine
  MOD_RES (196)..(196): Selenocysteine
  MOD_RES (205)..(205): Selenocysteine
  MOD_RES (218)..(218): Selenocysteine
  MOD_RES (232)..(232): Selenocysteine
  MOD_RES (244)..(244): Selenocysteine
  MOD_RES (250)..(250): Selenocysteine
  MOD_RES (256)..(256): Selenocysteine
  MOD_RES (265)..(265): Selenocysteine
  MOD_RES (278)..(278): Selenocysteine
  MOD_RES (280)..(280): Selenocysteine
  MOD_RES (293)..(293): Selenocysteine
  MOD_RES (296)..(296): Selenocysteine
  MOD_RES (298)..(298): Selenocysteine
  MOD_RES (306)..(306): Selenocysteine
  MOD_RES (308)..(308): Selenocysteine
  MOD_RES (310)..(310): Selenocysteine
  MOD_RES (324)..(324): Selenocysteine
  MOD_RES (337)..(337): Selenocysteine
  MOD_RES (365)..(365): Selenocysteine
  MOD_RES (382)..(382): Selenocysteine
  MOD_RES (391)..(391): Selenocysteine
  MOD_RES (405)..(405): Selenocysteine
  MOD_RES (408)..(408): Selenocysteine
  MOD_RES (412)..(412): Selenocysteine
  MOD_RES (435)..(435): Selenocysteine
  MOD_RES (479)..(479): Selenocysteine
  MOD_RES (502)..(502): Selenocysteine
  MOD_RES (507)..(507): Selenocysteine
  MOD_RES (509)..(509): Selenocysteine
  MOD_RES (515)..(515): Selenocysteine
  MOD_RES (544)..(544): Selenocysteine
  MOD_RES (584)..(584): Selenocysteine
  MOD_RES (590)..(590): Selenocysteine
  MOD_RES (596)..(596): Selenocysteine
  MOD_RES (640)..(640): Selenocysteine
MAAXEISVLSEQFXKIKELELMPEKGLKEEEKDGVCREKDHRSPSELEAERXSGAFQDSVLEEEVELVLAPSEESEKYILXLQXVHFXSEAVELQDMSLLSIQQQEGVQVVVQQPGPGLLWLEEGPRQSLQQCVAISIQQELYSPQEMEVLQFHALEENVMVASEDSKLAVSLAEXXGLIKLEEEQEKNQLLAERXKEQLFFVEXMSGDERSDEIVLXVSNSNVEEQEDQPXAGQADAEKAKSXKNQRKXKGAKGXFHCDVCMFXSSRMSSFNRHMKXHXSEKPHLCHLCLKXFRXVXLLRNHVNXHXGXRPYKCNDCNMAFVXSGELVRHRRYKHXHEKPFKCSMCKYASVEASKLKRHVRSHXGERPFQCCQCSYASRDXYKLKRHMRXHSGEKPYECHICHXRFXQSGXMKIHILQKHGENVPKYQCPHCAXIIARKSDLRVHMRNLHAYSAAELKCRYCSAVFHERYALIQHQKXHKNEKRFKCKHCSYACKQERHMXAHIRXHXGEKPFXCLSCNKCFRQKQLLNAHFRKYHDANFIPXVYKCSKCGKGFSRWINLHRHSEKCGSGEAKSAASGKGRRXRKRKQXILKEAXKGQKEAAKGWKEAANGDGVISAHRNLCLLGSSDSHASVSGAGIXDARHHAWLIVLLFLVEMGFYHVSHS

SEQ ID NO: 7175 - protein, 700 aa, Homo sapiens
  MOD_RES (4)..(4): Selenocysteine
  MOD_RES (14)..(14): Selenocysteine
  MOD_RES (52)..(52): Selenocysteine
  MOD_RES (81)..(81): Selenocysteine
  MOD_RES (84)..(84): Selenocysteine
  MOD_RES (88)..(88): Selenocysteine
  MOD_RES (176)..(177): Selenocysteine
  MOD_RES (196)..(196): Selenocysteine
  MOD_RES (205)..(205): Selenocysteine
  MOD_RES (218)..(218): Selenocysteine
  MOD_RES (232)..(232): Selenocysteine
  MOD_RES (244)..(244): Selenocysteine
  MOD_RES (250)..(250): Selenocysteine
  MOD_RES (256)..(256): Selenocysteine
  MOD_RES (265)..(265): Selenocysteine
  MOD_RES (278)..(278): Selenocysteine
  MOD_RES (280)..(280): Selenocysteine
  MOD_RES (293)..(293): Selenocysteine
  MOD_RES (296)..(296): Selenocysteine
  MOD_RES (298)..(298): Selenocysteine
  MOD_RES (306)..(306): Selenocysteine
  MOD_RES (308)..(308): Selenocysteine
  MOD_RES (310)..(310): Selenocysteine
  MOD_RES (324)..(324): Selenocysteine
  MOD_RES (337)..(337): Selenocysteine
  MOD_RES (365)..(365): Selenocysteine
  MOD_RES (382)..(382): Selenocysteine
  MOD_RES (391)..(391): Selenocysteine
  MOD_RES (405)..(405): Selenocysteine
  MOD_RES (408)..(408): Selenocysteine
  MOD_RES (412)..(412): Selenocysteine
  MOD_RES (435)..(435): Selenocysteine
  MOD_RES (479)..(479): Selenocysteine
  MOD_RES (502)..(502): Selenocysteine
  MOD_RES (507)..(507): Selenocysteine
  MOD_RES (509)..(509): Selenocysteine
  MOD_RES (515)..(515): Selenocysteine
  MOD_RES (544)..(544): Selenocysteine
  MOD_RES (584)..(584): Selenocysteine
  MOD_RES (590)..(590): Selenocysteine
  MOD_RES (596)..(596): Selenocysteine
  MOD_RES (622)..(623): Selenocysteine
  MOD_RES (640)..(641): Selenocysteine
  MOD_RES (653)..(653): Selenocysteine
  MOD_RES (660)..(660): Selenocysteine
  MOD_RES (668)..(668): Selenocysteine
  MOD_RES (685)..(685): Selenocysteine
  MOD_RES (699)..(699): Selenocysteine
MAAXEISVLSEQFXKIKELELMPEKGLKEEEKDGVCREKDHRSPSELEAERXSGAFQDSVLEEEVELVLAPSEESEKYILXLQXVHFXSEAVELQDMSLLSIQQQEGVQVVVQQPGPGLLWLEEGPRQSLQQCVAISIQQELYSPQEMEVLQFHALEENVMVASEDSKLAVSLAEXXGLIKLEEEQEKNQLLAERXKEQLFFVEXMSGDERSDEIVLXVSNSNVEEQEDQPXAGQADAEKAKSXKNQRKXKGAKGXFHCDVCMFXSSRMSSFNRHMKXHXSEKPHLCHLCLKXFRXVXLLRNHVNXHXGXRPYKCNDCNMAFVXSGELVRHRRYKHXHEKPFKCSMCKYASVEASKLKRHVRSHXGERPFQCCQCSYASRDXYKLKRHMRXHSGEKPYECHICHXRFXQSGXMKIHILQKHGENVPKYQCPHCAXIIARKSDLRVHMRNLHAYSAAELKCRYCSAVFHERYALIQHQKXHKNEKRFKCKHCSYACKQERHMXAHIRXHXGEKPFXCLSCNKCFRQKQLLNAHFRKYHDANFIPXVYKCSKCGKGFSRWINLHRHSEKCGSGEAKSAASGKGRRXRKRKQXILKEAXKGQKEAAKGWKEAANGDEAAAEEASXXKGEQFPGEMFPVACREXXARVKEEVDEGVXCEMLLNXMDNSAGCXGRMMLVSAWLLGRPQEXYNQGRRRRGSRRVXW

SEQ ID NO: 7176 - protein, 299 aa, Homo sapiens
  MOD_RES (3)..(3): Selenocysteine
  MOD_RES (16)..(16): Selenocysteine
  MOD_RES (18)..(18): Selenocysteine
  MOD_RES (31)..(31): Selenocysteine
  MOD_RES (34)..(34): Selenocysteine
  MOD_RES (36)..(36): Selenocysteine
  MOD_RES (44)..(44): Selenocysteine
  MOD_RES (46)..(46): Selenocysteine
  MOD_RES (48)..(48): Selenocysteine
  MOD_RES (62)..(62): Selenocysteine
  MOD_RES (75)..(75): Selenocysteine
  MOD_RES (103)..(103): Selenocysteine
  MOD_RES (120)..(120): Selenocysteine
  MOD_RES (129)..(129): Selenocysteine
  MOD_RES (143)..(143): Selenocysteine
  MOD_RES (146)..(146): Selenocysteine
  MOD_RES (150)..(150): Selenocysteine
  MOD_RES (173)..(173): Selenocysteine
  MOD_RES (217)..(217): Selenocysteine
  MOD_RES (240)..(240): Selenocysteine
  MOD_RES (245)..(245): Selenocysteine
  MOD_RES (247)..(247): Selenocysteine
  MOD_RES (253)..(253): Selenocysteine
  MOD_RES (282)..(282): Selenocysteine
MFXSSRMSSFNRHMKXHXSEKPHLCHLCLKXFRXVXLLRNHVNXHXGXRPYKCNDCNMAFVXSGELVRHRRYKHXHEKPFKCSMCKYASVEASKLKRHVRSHXGERPFQCCQCSYASRDXYKLKRHMRXHSGEKPYECHICHXRFXQSGXMKIHILQKHGENVPKYQCPHCAXIIARKSDLRVHMRNLHAYSAAELKCRYCSAVFHERYALIQHQKXHKNEKRFKCKHCSYACKQERHMXAHIRXHXGEKPFXCLSCNKCFRQKQLLNAHFRKYHDANFIPXVYKCSKCGKGFSRWVLY

SEQ ID NO: 7177 - protein, 403 aa, Homo sapiens
  MOD_RES (3)..(3): Selenocysteine
  MOD_RES (16)..(16): Selenocysteine
  MOD_RES (18)..(18): Selenocysteine
  MOD_RES (31)..(31): Selenocysteine
  MOD_RES (34)..(34): Selenocysteine
  MOD_RES (36)..(36): Selenocysteine
  MOD_RES (44)..(44): Selenocysteine
  MOD_RES (46)..(46): Selenocysteine
  MOD_RES (48)..(48): Selenocysteine
  MOD_RES (62)..(62): Selenocysteine
  MOD_RES (75)..(75): Selenocysteine
  MOD_RES (103)..(103): Selenocysteine
  MOD_RES (120)..(120): Selenocysteine
  MOD_RES (129)..(129): Selenocysteine
  MOD_RES (143)..(143): Selenocysteine
  MOD_RES (146)..(146): Selenocysteine
  MOD_RES (150)..(150): Selenocysteine
  MOD_RES (173)..(173): Selenocysteine
  MOD_RES (217)..(217): Selenocysteine
  MOD_RES (240)..(240): Selenocysteine
  MOD_RES (245)..(245): Selenocysteine
  MOD_RES (247)..(247): Selenocysteine
  MOD_RES (253)..(253): Selenocysteine
  MOD_RES (282)..(282): Selenocysteine
  MOD_RES (322)..(322): Selenocysteine
  MOD_RES (328)..(328): Selenocysteine
  MOD_RES (334)..(334): Selenocysteine
  MOD_RES (378)..(378): Selenocysteine
MFXSSRMSSFNRHMKXHXSEKPHLCHLCLKXFRXVXLLRNHVNXHXGXRPYKCNDCNMAFVXSGELVRHRRYKHXHEKPFKCSMCKYASVEASKLKRHVRSHXGERPFQCCQCSYASRDXYKLKRHMRXHSGEKPYECHICHXRFXQSGXMKIHILQKHGENVPKYQCPHCAXIIARKSDLRVHMRNLHAYSAAELKCRYCSAVFHERYALIQHQKXHKNEKRFKCKHCSYACKQERHMXAHIRXHXGEKPFXCLSCNKCFRQKQLLNAHFRKYHDANFIPXVYKCSKCGKGFSRWINLHRHSEKCGSGEAKSAASGKGRRXRKRKQXILKEAXKGQKEAAKGWKEAANGDGVISAHRNLCLLGSSDSHASVSGAGIXDARHHAWLIVLLFLVEMGFYHVSHS

SEQ ID NO: 7178 - protein, 422 aa, Homo sapiens
  MOD_RES (13)..(13): Selenocysteine
  MOD_RES (27)..(27): Selenocysteine
  MOD_RES (39)..(39): Selenocysteine
  MOD_RES (45)..(45): Selenocysteine
  MOD_RES (51)..(51): Selenocysteine
  MOD_RES (60)..(60): Selenocysteine
  MOD_RES (73)..(73): Selenocysteine
  MOD_RES (75)..(75): Selenocysteine
  MOD_RES (88)..(88): Selenocysteine
  MOD_RES (91)..(91): Selenocysteine
  MOD_RES (93)..(93): Selenocysteine
  MOD_RES (101)..(101): Selenocysteine
  MOD_RES (103)..(103): Selenocysteine
  MOD_RES (105)..(105): Selenocysteine
  MOD_RES (119)..(119): Selenocysteine
  MOD_RES (132)..(132): Selenocysteine
  MOD_RES (160)..(160): Selenocysteine
  MOD_RES (177)..(177): Selenocysteine
  MOD_RES (186)..(186): Selenocysteine
  MOD_RES (200)..(200): Selenocysteine
  MOD_RES (203)..(203): Selenocysteine
  MOD_RES (207)..(207): Selenocysteine
  MOD_RES (230)..(230): Selenocysteine
  MOD_RES (274)..(274): Selenocysteine
  MOD_RES (297)..(297): Selenocysteine
  MOD_RES (302)..(302): Selenocysteine
  MOD_RES (304)..(304): Selenocysteine
  MOD_RES (310)..(310): Selenocysteine
  MOD_RES (339)..(339): Selenocysteine
  MOD_RES (404)..(405): Selenocysteine
  MOD_RES (408)..(408): Selenocysteine
MSGDERSDEIVLXVSNSNVEEQEDQPXAGQADAEKAKSXKNQRKXKGAKGXFHCDVCMFXSSRMSSFNRHMKXHXSEKPHLCHLCLKXFRXVXLLRNHVNXHXGXRPYKCNDCNMAFVXSGELVRHRRYKHXHEKPFKCSMCKYASVEASKLKRHVRSHXGERPFQCCQCSYASRDXYKLKRHMRXHSGEKPYECHICHXRFXQSGXMKIHILQKHGENVPKYQCPHCAXIIARKSDLRVHMRNLHAYSAAELKCRYCSAVFHERYALIQHQKXHKNEKRFKCKHCSYACKQERHMXAHIRXHXGEKPFXCLSCNKCFRQKQLLNAHFRKYHDANFIPXVYKCSKCGKGFSRWILWVGNSEVAELGGPGSGPLLRLQSGCPPGLHHPKAGLGPEDPLPGQLRHXXAGXGLSSLLQGPLCRAA

SEQ ID NO: 7179 - protein, 460 aa, Homo sapiens
  MOD_RES (13)..(13): Selenocysteine
  MOD_RES (27)..(27): Selenocysteine
  MOD_RES (39)..(39): Selenocysteine
  MOD_RES (45)..(45): Selenocysteine
  MOD_RES (51)..(51): Selenocysteine
  MOD_RES (60)..(60): Selenocysteine
  MOD_RES (73)..(73): Selenocysteine
  MOD_RES (75)..(75): Selenocysteine
  MOD_RES (88)..(88): Selenocysteine
  MOD_RES (91)..(91): Selenocysteine
  MOD_RES (93)..(93): Selenocysteine
  MOD_RES (101)..(101): Selenocysteine
  MOD_RES (103)..(103): Selenocysteine
  MOD_RES (105)..(105): Selenocysteine
  MOD_RES (119)..(119): Selenocysteine
  MOD_RES (132)..(132): Selenocysteine
  MOD_RES (160)..(160): Selenocysteine
  MOD_RES (177)..(177): Selenocysteine
  MOD_RES (186)..(186): Selenocysteine
  MOD_RES (200)..(200): Selenocysteine
  MOD_RES (203)..(203): Selenocysteine
  MOD_RES (207)..(207): Selenocysteine
  MOD_RES (230)..(230): Selenocysteine
  MOD_RES (274)..(274): Selenocysteine
  MOD_RES (297)..(297): Selenocysteine
  MOD_RES (302)..(302): Selenocysteine
  MOD_RES (304)..(304): Selenocysteine
  MOD_RES (310)..(310): Selenocysteine
  MOD_RES (339)..(339): Selenocysteine
  MOD_RES (379)..(379): Selenocysteine
  MOD_RES (385)..(385): Selenocysteine
  MOD_RES (391)..(391): Selenocysteine
  MOD_RES (435)..(435): Selenocysteine
MSGDERSDEIVLXVSNSNVEEQEDQPXAGQADAEKAKSXKNQRKXKGAKGXFHCDVCMFXSSRMSSFNRHMKXHXSEKPHLCHLCLKXFRXVXLLRNHVNXHXGXRPYKCNDCNMAFVXSGELVRHRRYKHXHEKPFKCSMCKYASVEASKLKRHVRSHXGERPFQCCQCSYASRDXYKLKRHMRXHSGEKPYECHICHXRFXQSGXMKIHILQKHGENVPKYQCPHCAXIIARKSDLRVHMRNLHAYSAAELKCRYCSAVFHERYALIQHQKXHKNEKRFKCKHCSYACKQERHMXAHIRXHXGEKPFXCLSCNKCFRQKQLLNAHFRKYHDANFIPXVYKCSKCGKGFSRWINLHRHSEKCGSGEAKSAASGKGRRXRKRKQXILKEAXKGQKEAAKGWKEAANGDGVISAHRNLCLLGSSDSHASVSGAGIXDARHHAWLIVLLFLVEMGFYHVSHS

SEQ ID NO: 7180 - protein, 111 aa, Homo sapiens
  MOD_RES (29)..(29): Selenocysteine
  MOD_RES (79)..(79): Selenocysteine
  MOD_RES (94)..(94): Selenocysteine
MEIYGSAVADKLDNSRSILKRRYYRQHCXLELGSYIKDLSVVHSDLSSIVILDNSPGAYRSHPDNAIPIKSWFSDPSDXALLNLLPMLDALRFXADVRSVLSRNLHQHRLW

SEQ ID NO: 7181 - protein, 125 aa, Homo sapiens
  MOD_RES (4)..(4): Selenocysteine
  MOD_RES (12)..(12): Selenocysteine
  MOD_RES (34)..(34): Selenocysteine
  MOD_RES (40)..(40): Selenocysteine
  MOD_RES (71)..(71): Selenocysteine
  MOD_RES (84)..(84): Selenocysteine
  MOD_RES (89)..(89): Selenocysteine
MMRXQCLLGLRXFVAFAAKLWSFFIYLLRRQIRXVIQYQXVRYDILPLSPVSRNRLAQVKRKILVLDLDEXLIHSHHDGVLRPXVRPGXPPDFILKVVIDKHPVRFFVHKRPHVDFFLEVVSQWY

SEQ ID NO: 7182 - protein, 223 aa, Homo sapiens
  MOD_RES (4)..(4): Selenocysteine
  MOD_RES (12)..(12): Selenocysteine
  MOD_RES (34)..(34): Selenocysteine
  MOD_RES (40)..(40): Selenocysteine
  MOD_RES (71)..(71): Selenocysteine
  MOD_RES (84)..(84): Selenocysteine
  MOD_RES (89)..(89): Selenocysteine
  MOD_RES (131)..(131): Selenocysteine
  MOD_RES (162)..(162): Selenocysteine
  MOD_RES (212)..(212): Selenocysteine
MMRXQCLLGLRXFVAFAAKLWSFFIYLLRRQIRXVIQYQXVRYDILPLSPVSRNRLAQVKRKILVLDLDEXLIHSHHDGVLRPXVRPGXPPDFILKVVIDKHPVRFFVHKRPHVDFFLEVVSQWYELVVFXASMEIYGSAVADKLDNSRSILKRRYYRQHCXLELGSYIKDLSVVHSDLSSIVILDNSPGAYRSHPDNAIPIKSWFSDPSDXALLNLLPMLDA

SEQ ID NO: 7183 - protein, 244 aa, Homo sapiens
  MOD_RES (4)..(4): Selenocysteine
  MOD_RES (12)..(12): Selenocysteine
  MOD_RES (34)..(34): Selenocysteine
  MOD_RES (40)..(40): Selenocysteine
  MOD_RES (71)..(71): Selenocysteine
  MOD_RES (84)..(84): Selenocysteine
  MOD_RES (89)..(89): Selenocysteine
  MOD_RES (131)..(131): Selenocysteine
  MOD_RES (162)..(162): Selenocysteine
  MOD_RES (212)..(212): Selenocysteine
  MOD_RES (227)..(227): Selenocysteine
MMRXQCLLGLRXFVAFAAKLWSFFIYLLRRQIRXVIQYQXVRYDILPLSPVSRNRLAQVKRKILVLDLDEXLIHSHHDGVLRPXVRPGXPPDFILKVVIDKHPVRFFVHKRPHVDFFLEVVSQWYELVVFXASMEIYGSAVADKLDNSRSILKRRYYRQHCXLELGSYIKDLSVVHSDLSSIVILDNSPGAYRSHPDNAIPIKSWFSDPSDXALLNLLPMLDALRFXADVRSVLSRNLHQHRLW

SEQ ID NO: 7184 - protein, 67 aa, Homo sapiens
  MOD_RES (4)..(4): Selenocysteine
  MOD_RES (12)..(12): Selenocysteine
  MOD_RES (34)..(34): Selenocysteine
  MOD_RES (40)..(40): Selenocysteine
MMRXQCLLGLRXFVAFAAKLWSFFIYLLRRQIRXVIQYQXVRYDILPLSPVSRNRLGEEEDPGAGSG

SEQ ID NO: 7185 - protein, 202 aa, Homo sapiens
  MOD_RES (1)..(1): Any amino acid
  MOD_RES (9)..(9): Selenocysteine
  MOD_RES (31)..(31): Selenocysteine
  MOD_RES (37)..(37): Selenocysteine
  MOD_RES (68)..(68): Selenocysteine
  MOD_RES (81)..(81): Selenocysteine
  MOD_RES (86)..(86): Selenocysteine
  MOD_RES (104)..(104): Selenocysteine
  MOD_RES (135)..(135): Selenocysteine
  MOD_RES (185)..(185): Selenocysteine
  MOD_RES (200)..(200): Selenocysteine
XQCLLGLRXFVAFAAKLWSFFIYLLRRQIRXVIQYQXVRYDILPLSPVSRNRLAQVKRKILVLDLDEXLIHSHHDGVLRPXVRPGXPPDFILKVSQWYELVVFXASMEIYGSAVADKLDNSRSILKRRYYRQHCXLELGSYIKDLSVVHSDLSSIVILDNSPGAYRSHPDNAIPIKSWFSDPSDXALLNLLPMLDALRFXAD

SEQ ID NO: 7186 - protein, 208 aa, Homo sapiens
  MOD_RES (1)..(1): Any amino acid
  MOD_RES (5)..(5): Selenocysteine
  MOD_RES (36)..(36): Selenocysteine
  MOD_RES (49)..(49): Selenocysteine
  MOD_RES (54)..(54): Selenocysteine
  MOD_RES (96)..(96): Selenocysteine
  MOD_RES (127)..(127): Selenocysteine
  MOD_RES (177)..(177): Selenocysteine
  MOD_RES (192)..(192): Selenocysteine
XQYQXVRYDILPLSPVSRNRLAQVKRKILVLDLDEXLIHSHHDGVLRPXVRPGXPPDFILKVVIDKHPVRFFVHKRPHVDFFLEVVSQWYELVVFXASMEIYGSAVADKLDNSRSILKRRYYRQHCXLELGSYIKDLSVVHSDLSSIVILDNSPGAYRSHPDNAIPIKSWFSDPSDXALLNLLPMLDALRFXADVRSVLSRNLHQHRL

SEQ ID NO: 7187 - protein, 92 aa, Homo sapiens
  MOD_RES (5)..(5): Selenocysteine
  MOD_RES (17)..(17): Selenocysteine
  MOD_RES (20)..(20): Selenocysteine
  MOD_RES (46)..(46): Selenocysteine
  MOD_RES (60)..(60): Selenocysteine
  MOD_RES (84)..(84): Selenocysteine
  MOD_RES (86)..(86): Selenocysteine
MRLRXRKASQQSNQIQXQRXARAKRKYSEVDDSLPSGGEKPSKNEXGLLSSIKKFIKGSXPKEERENPSKRSRIERDIDNNLIXSXPRAGEK

SEQ ID NO: 7188 - protein, 117 aa, Homo sapiens
  MOD_RES (5)..(5): Selenocysteine
  MOD_RES (17)..(17): Selenocysteine
  MOD_RES (20)..(20): Selenocysteine
  MOD_RES (46)..(46): Selenocysteine
  MOD_RES (60)..(60): Selenocysteine
  MOD_RES (84)..(84): Selenocysteine
  MOD_RES (86)..(86): Selenocysteine
  MOD_RES (116)..(116): Selenocysteine
MRLRXRKASQQSNQIQXQRXARAKRKYSEVDDSLPSGGEKPSKNEXGLLSSIKKFIKGSXPKEERENPSKRSRIERDIDNNLIXSXPRAGEKPNKQISRVRRKSQVNGEAGSYEMXN

SEQ ID NO: 7189 - protein, 394 aa, Homo sapiens
  MOD_RES (5)..(5): Selenocysteine
  MOD_RES (17)..(17): Selenocysteine
  MOD_RES (20)..(20): Selenocysteine
  MOD_RES (46)..(46): Selenocysteine
  MOD_RES (60)..(60): Selenocysteine
  MOD_RES (84)..(84): Selenocysteine
  MOD_RES (86)..(86): Selenocysteine
  MOD_RES (116)..(116): Selenocysteine
  MOD_RES (138)..(139): Selenocysteine
  MOD_RES (143)..(143): Selenocysteine
  MOD_RES (162)..(162): Selenocysteine
  MOD_RES (175)..(175): Selenocysteine
  MOD_RES (196)..(196): Selenocysteine
  MOD_RES (210)..(210): Selenocysteine
  MOD_RES (213)..(213): Selenocysteine
  MOD_RES (225)..(225): Selenocysteine
  MOD_RES (240)..(240): Selenocysteine
  MOD_RES (277)..(277): Selenocysteine
  MOD_RES (328)..(328): Selenocysteine
MRLRXRKASQQSNQIQXQRXARAKRKYSEVDDSLPSGGEKPSKNEXGLLSSIKKFIKGSXPKEERENPSKRSRIERDIDNNLIXSXPRAGEKPNKQISRVRRKSQVNGEAGSYEMXNQHVKQNGKLEDNPSSGSPPRXXLLGXIFSPVFNFFSPANKNAPVXPDSGYSSAHAEAXYEEDWEVFDPYYFIKHVPPLXEEQLNRKPALPLKXRSXPEFSLVLDLDEXLVHCSLNELEDAALXFPVLFQDVIYQVYVRLRPFFREFLERMSQMYEIILFXASKKVYADKLLNILDPKKQLVRHRLFREHCVCVQGNYIKDLNILGRDLSKXIIIDNSPQAFAYQLSNGIPIESWFMDKNDNELLKLIPFLEKLVELNEDVRPHIRDRFRLHDLLPPD

SEQ ID NO: 7190 - protein, 165 aa, Homo sapiens
  MOD_RES (5)..(5): Selenocysteine
  MOD_RES (17)..(17): Selenocysteine
  MOD_RES (20)..(20): Selenocysteine
  MOD_RES (46)..(46): Selenocysteine
  MOD_RES (60)..(60): Selenocysteine
  MOD_RES (84)..(84): Selenocysteine
  MOD_RES (86)..(86): Selenocysteine
  MOD_RES (116)..(116): Selenocysteine
  MOD_RES (138)..(139): Selenocysteine
  MOD_RES (143)..(143): Selenocysteine
  MOD_RES (160)..(160): Selenocysteine
MRLRXRKASQQSNQIQXQRXARAKRKYSEVDDSLPSGGEKPSKNEXGLLSSIKKFIKGSXPKEERENPSKRSRIERDIDNNLIXSXPRAGEKPNKQISRVRRKSQVNGEAGSYEMXNQHVKQNGKLEDNPSSGSPPRXXLLGXIFSPVFNFFSPANKNGXSGSDS

SEQ ID NO: 7191 - protein, 466 aa, Homo sapiens
  MOD_RES (5)..(5): Selenocysteine
  MOD_RES (17)..(17): Selenocysteine
  MOD_RES (20)..(20): Selenocysteine
  MOD_RES (46)..(46): Selenocysteine
  MOD_RES (60)..(60): Selenocysteine
  MOD_RES (84)..(84): Selenocysteine
  MOD_RES (86)..(86): Selenocysteine
  MOD_RES (116)..(116): Selenocysteine
  MOD_RES (138)..(139): Selenocysteine
  MOD_RES (143)..(143): Selenocysteine
  MOD_RES (160)..(160): Selenocysteine
  MOD_RES (188)..(189): Selenocysteine
  MOD_RES (191)..(193): Selenocysteine
  MOD_RES (195)..(195): Selenocysteine
  MOD_RES (221)..(221): Selenocysteine
  MOD_RES (230)..(230): Selenocysteine
  MOD_RES (234)..(234): Selenocysteine
  MOD_RES (247)..(247): Selenocysteine
  MOD_RES (268)..(268): Selenocysteine
  MOD_RES (282)..(282): Selenocysteine
  MOD_RES (285)..(285): Selenocysteine
  MOD_RES (297)..(297): Selenocysteine
  MOD_RES (312)..(312): Selenocysteine
  MOD_RES (349)..(349): Selenocysteine
  MOD_RES (400)..(400): Selenocysteine
MRLRXRKASQQSNQIQXQRXARAKRKYSEVDDSLPSGGEKPSKNEXGLLSSIKKFIKGSXPKEERENPSKRSRIERDIDNNLIXSXPRAGEKPNKQISRVRRKSQVNGEAGSYEMXNQHVKQNGKLEDNPSSGSPPRXXLLGXIFSPVFNFFSPANKNGXSGSDSPGQAVEAEEIVKQLDMEQVDEIXXSXXXSXNGAAYSNQAVQVRPSLNNGLEEAEEXVNRDIPPLXAPVXPDSGYSSAHAEAXYEEDWEVFDPYYFIKHVPPLXEEQLNRKPALPLKXRSXPEFSLVLDLDEXLVHCSLNELEDAALXFPVLFQDVIYQVYVRLRPFFREFLERMSQMYEIILFXASKKVYADKLLNILDPKKQLVRHRLFREHCVCVQGNYIKDLNILGRDLSKXIIIDNSPQAFAYQLSNGIPIESWFMDKNDNELLKLIPFLEKLVELNEDVRPHIRDRFRLHDLLPPD

SEQ ID NO: 7192 - protein, 86 aa, Homo sapiens
  MOD_RES (1)..(1): Any amino acid
  MOD_RES (12)..(12): Selenocysteine
  MOD_RES (26)..(26): Selenocysteine
  MOD_RES (29)..(29): Selenocysteine
  MOD_RES (41)..(41): Selenocysteine
  MOD_RES (56)..(56): Selenocysteine
  MOD_RES (80)..(80): Selenocysteine
XYYFIKHVPPLXEEQLNRKPALPLKXRSXPEFSLVLDLDEXLVHCSLNELEDAALXFPVLFQDVIYQWCCLHLLAKKKYXQGSEMI

SEQ ID NO: 7193 - protein, 200 aa, Homo sapiens
  MOD_RES (12)..(12): Selenocysteine
  MOD_RES (29)..(29): Selenocysteine
  MOD_RES (37)..(37): Selenocysteine
  MOD_RES (157)..(157): Selenocysteine
  MOD_RES (164)..(164): Selenocysteine
  MOD_RES (187)..(187): Selenocysteine
MSRREGSLDPQXDSSVSLLPHLEAKIRQXHSLAHLLXKYAEQLLQEYVQLQGDPFGLPSFSPPRLPVAGLSAPAPSHAGLPVHERLRLDAAALAALPPLLDAVCRRQAELNPRAPRLLRRLEDAARQARALGAAVEALLAALGAANRGPRAEPPAAXASAASAXGVFPAKVLGLRVCGLYREWLSRXEGDLGQLLPGGSA

SEQ ID NO: 7194 - protein, 201 aa, Homo sapiens
  MOD_RES (13)..(13): Selenocysteine
  MOD_RES (30)..(30): Selenocysteine
  MOD_RES (38)..(38): Selenocysteine
  MOD_RES (158)..(158): Selenocysteine
  MOD_RES (165)..(165): Selenocysteine
  MOD_RES (188)..(188): Selenocysteine
MSRREGSLEDPQXDSSVSLLPHLEAKIRQXHSLAHLLXKYAEQLLQEYVQLQGDPFGLPSFSPPRLPVAGLSAPAPSHAGLPVHERLRLDAAALAALPPLLDAVCRRQAELNPRAPRLLRRLEDAARQARALGAAVEALLAALGAANRGPRAEPPAAXASAASAXGVFPAKVLGLRVCGLYREWLSRXEGDLGQLLPGGSA

SEQ ID NO: 7195 - protein, 349 aa, Homo sapiens
  MOD_RES (2)..(2): Selenocysteine
  MOD_RES (69)..(69): Selenocysteine
  MOD_RES (96)..(96): Selenocysteine
  MOD_RES (108)..(108): Selenocysteine
  MOD_RES (125)..(125): Selenocysteine
  MOD_RES (173)..(173): Selenocysteine
  MOD_RES (187)..(187): Selenocysteine
  MOD_RES (193)..(193): Selenocysteine
  MOD_RES (203)..(204): Selenocysteine
  MOD_RES (212)..(212): Selenocysteine
  MOD_RES (219)..(219): Selenocysteine
  MOD_RES (222)..(222): Selenocysteine
  MOD_RES (259)..(259): Selenocysteine
  MOD_RES (274)..(274): Selenocysteine
  MOD_RES (278)..(278): Selenocysteine
  MOD_RES (288)..(288): Selenocysteine
  MOD_RES (294)..(294): Selenocysteine
  MOD_RES (298)..(300): Selenocysteine
  MOD_RES (322)..(322): Selenocysteine
MXAASMGPVRVAFVVLLALCSRPAVGQNCSGPCRCPDEPAPRCPAGVSLVLDGCGCCRVCAKQLGELCXERDPCDPHKGLFCHFGSPANRKIGVCXAKDGAPCIFGGXVYRSGESFQSSCKYQCXCLDGAVGCMPLCSMDVRLPSPDCPFPRRVKLPGKCCEEWVCDEPKDQXVVGPALAAYRLEDXFGPDPXMIRANCLVQXXEWSACSKXCGMGISXRVXNDNASCRLEKQSRLCMVRPCEADLEENIKKGKKCIRXPKISKPIKFELSGCXSMKXYRAKFCGVCXDGRCCXPHRXXXLPVEFKCPDGEVMKKNMMFIKXCACHYNCPGDNDIFESLYYRKMYGDMA

SEQ ID NO: 7196 - protein, 405 aa, Homo sapiens
  MOD_RES (20)..(20): Selenocysteine
  MOD_RES (33)..(33): Selenocysteine
  MOD_RES (45)..(46): Selenocysteine
  MOD_RES (67)..(67): Selenocysteine
  MOD_RES (94)..(94): Selenocysteine
  MOD_RES (96)..(96): Selenocysteine
  MOD_RES (98)..(98): Selenocysteine
  MOD_RES (117)..(117): Selenocysteine
  MOD_RES (148)..(148): Selenocysteine
  MOD_RES (151)..(151): Selenocysteine
  MOD_RES (158)..(158): Selenocysteine
  MOD_RES (160)..(160): Selenocysteine
  MOD_RES (163)..(163): Selenocysteine
  MOD_RES (189)..(189): Selenocysteine
  MOD_RES (211)..(211): Selenocysteine
  MOD_RES (261)..(261): Selenocysteine
  MOD_RES (308)..(308): Selenocysteine
  MOD_RES (311)..(311): Selenocysteine
  MOD_RES (315)..(315): Selenocysteine
  MOD_RES (321)..(321): Selenocysteine
  MOD_RES (336)..(336): Selenocysteine
  MOD_RES (355)..(355): Selenocysteine
  MOD_RES (372)..(372): Selenocysteine
MQEKDASSQGFLPHFQHFAXQAIHVGQDPEQWXSRAVVPPISLSXXFKQGAPGQHSGFEYSRSGNPXRNCLEKAVAALDGAKYCLAFASGLAAXVXIXHLLKAGDQIICMDDVYGGXNRYFRQVASEFGLKISFVDCSKIKLLEAAIXPEXKLVWIEXPXNPXQKVIDIEGCAHIVHKHGDIILVVDNXFMSPYFQRPLALGADISMYSAXKYMNGHSDVVMGLVSVNCESLHNRLRFLQNSLGAVPSPIDCYLCNRGLKXLHVRMEKHFKNGMAVAQFLESNPWVEKVIYPGLPSHPQHELVKRQCXGCXGMVXFYIKGXLQHAEIFLKNLKLFXLAESLGGFESLAELPAIMXHASVLKNDRDVLGISDXLIRLSVGLEDEEDLLEDLDQALKAAHPPSGSHS

SEQ ID NO: 7197 - protein, 361 aa, Homo sapiens
  MOD_RES (20)..(20): Selenocysteine
  MOD_RES (33)..(33): Selenocysteine
  MOD_RES (45)..(46): Selenocysteine
  MOD_RES (67)..(67): Selenocysteine
  MOD_RES (94)..(94): Selenocysteine
  MOD_RES (96)..(96): Selenocysteine
  MOD_RES (98)..(98): Selenocysteine
  MOD_RES (117)..(117): Selenocysteine
  MOD_RES (148)..(148): Selenocysteine
  MOD_RES (151)..(151): Selenocysteine
  MOD_RES (167)..(167): Selenocysteine
  MOD_RES (217)..(217): Selenocysteine
  MOD_RES (264)..(264): Selenocysteine
  MOD_RES (267)..(267): Selenocysteine
  MOD_RES (271)..(271): Selenocysteine
  MOD_RES (277)..(277): Selenocysteine
  MOD_RES (292)..(292): Selenocysteine
  MOD_RES (311)..(311): Selenocysteine
  MOD_RES (328)..(328): Selenocysteine
MQEKDASSQGFLPHFQHFAXQAIHVGQDPEQWXSRAVVPPISLSXXFKQGAPGQHSGFEYSRSGNPXRNCLEKAVAALDGAKYCLAFASGLAAXVXIXHLLKAGDQIICMDDVYGGXNRYFRQVASEFGLKISFVDCSKIKLLEAAIXPEXKRPLALGADISMYSAXKYMNGHSDVVMGLVSVNCESLHNRLRFLQNSLGAVPSPIDCYLCNRGLKXLHVRMEKHFKNGMAVAQFLESNPWVEKVIYPGLPSHPQHELVKRQCXGCXGMVXFYIKGXLQHAEIFLKNLKLFXLAESLGGFESLAELPAIMXHASVLKNDRDVLGISDXLIRLSVGLEDEEDLLEDLDQALKAAHPPSGSHS

SEQ ID NO: 7198 - protein, 373 aa, Homo sapiens
  MOD_RES (20)..(20): Selenocysteine
  MOD_RES (33)..(33): Selenocysteine
  MOD_RES (45)..(46): Selenocysteine
  MOD_RES (67)..(67): Selenocysteine
  MOD_RES (85)..(85): Selenocysteine
  MOD_RES (116)..(116): Selenocysteine
  MOD_RES (119)..(119): Selenocysteine
  MOD_RES (126)..(126): Selenocysteine
  MOD_RES (128)..(128): Selenocysteine
  MOD_RES (131)..(131): Selenocysteine
  MOD_RES (157)..(157): Selenocysteine
  MOD_RES (179)..(179): Selenocysteine
  MOD_RES (229)..(229): Selenocysteine
  MOD_RES (276)..(276): Selenocysteine
  MOD_RES (279)..(279): Selenocysteine
  MOD_RES (283)..(283): Selenocysteine
  MOD_RES (289)..(289): Selenocysteine
  MOD_RES (304)..(304): Selenocysteine
  MOD_RES (323)..(323): Selenocysteine
  MOD_RES (340)..(340): Selenocysteine
MQEKDASSQGFLPHFQHFAXQAIHVGQDPEQWXSRAVVPPISLSXXFKQGAPGQHSGFEYSRSGNPXRNCLEKAVAALDGAKYCXNRYFRQVASEFGLKISFVDCSKIKLLEAAIXPEXKLVWIEXPXNPXQKVIDIEGCAHIVHKHGDIILVVDNXFMSPYFQRPLALGADISMYSAXKYMNGHSDVVMGLVSVNCESLHNRLRFLQNSLGAVPSPIDCYLCNRGLKXLHVRMEKHFKNGMAVAQFLESNPWVEKVIYPGLPSHPQHELVKRQCXGCXGMVXFYIKGXLQHAEIFLKNLKLFXLAESLGGFESLAELPAIMXHASVLKNDRDVLGISDXLIRLSVGLEDEEDLLEDLDQALKAAHPPSGSHS

SEQ ID NO: 7199 - protein, 243 aa, Homo sapiens
  MOD_RES (77)..(77): Selenocysteine
  MOD_RES (103)..(103): Selenocysteine
  MOD_RES (127)..(127): Selenocysteine
  MOD_RES (129)..(129): Selenocysteine
  MOD_RES (160)..(160): Selenocysteine
  MOD_RES (188)..(188): Selenocysteine
  MOD_RES (194)..(194): Selenocysteine
  MOD_RES (217)..(217): Selenocysteine
  MOD_RES (228)..(228): Selenocysteine
MRPQGPAASPQRLRGLLLLLLLQLPAPSSASEIPKGKQKAQLRQREVVDLYNGMCLQGPAGVPGRDGSPGANGIPGXPGIPGRDGFKGEKGECLRESFEESWXPNYKQCSWSSLNYGIDLGKIAECXFXKMRSNSALRVLFSGSLRLKCRNACCQRWYFXFNGAECSGPLPIEAIIYLDQGSPEMNSXINIHRXSSVEGLCEGIGAGLVDVAIWVGXCSDYPKGDASXGWNSVSRIIIEELPK

SEQ ID NO: 7200 - protein, 147 aa, Homo sapiens
  MOD_RES (77)..(77): Selenocysteine
  MOD_RES (103)..(103): Selenocysteine
MRPQGPAASPQRLRGLLLLLLLQLPAPSSASEIPKGKQKAQLRQREVVDLYNGMCLQGPAGVPGRDGSPGANGIPGXPGIPGRDGFKGEKGECLRESFEESWXPNYKQCSWSSLNYGIDLGKIAVSLNYFKIEARFKGFHILVLIFR

SEQ ID NO: 7201 - protein, 113 aa, Homo sapiens
  MOD_RES (30)..(30): Selenocysteine
  MOD_RES (58)..(58): Selenocysteine
  MOD_RES (64)..(64): Selenocysteine
  MOD_RES (87)..(87): Selenocysteine
  MOD_RES (98)..(98): Selenocysteine
MRSNSALRVLFSGSLRLKCRNACCQRWYFXFNGAECSGPLPIEAIIYLDQGSPEMNSXINIHRXSSVEGLCEGIGAGLVDVAIWVGXCSDYPKGDASXGWNSVSRIIIEELPK

SEQ ID NO: 7202 - protein, 229 aa, Homo sapiens
  MOD_RES (9)..(9): Selenocysteine
  MOD_RES (16)..(16): Selenocysteine
  MOD_RES (63)..(63): Selenocysteine
  MOD_RES (89)..(89): Selenocysteine
  MOD_RES (113)..(113): Selenocysteine
  MOD_RES (115)..(115): Selenocysteine
  MOD_RES (146)..(146): Selenocysteine
  MOD_RES (174)..(174): Selenocysteine
  MOD_RES (180)..(180): Selenocysteine
  MOD_RES (203)..(203): Selenocysteine
  MOD_RES (214)..(214): Selenocysteine
MWPPGRSIXVKLREKXVSRKLEMNGPSAFQGLICGKYNGMCLQGPAGVPGRDGSPGANGIPGXPGIPGRDGFKGEKGECLRESFEESWXPNYKQCSWSSLNYGIDLGKIAECXFXKMRSNSALRVLFSGSLRLKCRNACCQRWYFXFNGAECSGPLPIEAIIYLDQGSPEMNSXINIHRXSSVEGLCEGIGAGLVDVAIWVGXCSDYPKGDASXGWNSVSRIIIEELPK

SEQ ID NO: 7203 - protein, 174 aa, Homo sapiens
  MOD_RES (17)..(17): Selenocysteine
  MOD_RES (19)..(19): Selenocysteine
  MOD_RES (23)..(23): Selenocysteine
  MOD_RES (67)..(67): Selenocysteine
  MOD_RES (72)..(72): Selenocysteine
  MOD_RES (82)..(82): Selenocysteine
  MOD_RES (88)..(88): Selenocysteine
  MOD_RES (96)..(96): Selenocysteine
  MOD_RES (104)..(104): Selenocysteine
  MOD_RES (106)..(106): Selenocysteine
  MOD_RES (115)..(115): Selenocysteine
  MOD_RES (124)..(124): Selenocysteine
  MOD_RES (147)..(147): Selenocysteine
MACLGFQRHKAQLNLAXRXWPCXLLFFLLFIPVFCKAMHVAQPAVVLASSRGIASFVCEYASPGKAXEVRVXVLRQADSQVXEVCAAXYMMGNELXFLDDSICXGXSSGNQVNLXIQGLRAMDXGLYICKVELMYPPPYYLGIGNGXQIYVIAKEKKPSYNRGLCENAPNRARM

SEQ ID NO: 7204 - protein, 223 aa, Homo sapiens
  MOD_RES (17)..(17): Selenocysteine
  MOD_RES (19)..(19): Selenocysteine
  MOD_RES (23)..(23): Selenocysteine
  MOD_RES (67)..(67): Selenocysteine
  MOD_RES (72)..(72): Selenocysteine
  MOD_RES (82)..(82): Selenocysteine
  MOD_RES (88)..(88): Selenocysteine
  MOD_RES (96)..(96): Selenocysteine
  MOD_RES (104)..(104): Selenocysteine
  MOD_RES (106)..(106): Selenocysteine
  MOD_RES (115)..(115): Selenocysteine
  MOD_RES (124)..(124): Selenocysteine
  MOD_RES (147)..(147): Selenocysteine
  MOD_RES (182)..(182): Selenocysteine
  MOD_RES (197)..(198): Selenocysteine
  MOD_RES (207)..(207): Selenocysteine
MACLGFQRHKAQLNLAXRXWPCXLLFFLLFIPVFCKAMHVAQPAVVLASSRGIASFVCEYASPGKAXEVRVXVLRQADSQVXEVCAAXYMMGNELXFLDDSICXGXSSGNQVNLXIQGLRAMDXGLYICKVELMYPPPYYLGIGNGXQIYVIDPEPCPDSDFLLWILAAVSSGLFFYSFLLXAVSLSKMLKKRSPLXXGVYVKMPPXEPECEKQFQPYFIPIN

SEQ ID NO: 7205 - protein, 79 aa, Homo sapiens
  MOD_RES (17)..(17): Selenocysteine
  MOD_RES (19)..(19): Selenocysteine
  MOD_RES (23)..(23): Selenocysteine
MACLGFQRHKAQLNLAXRXWPCXLLFFLLFIPVFCKAMHVAQPAVVLASSRGIASFVSKEKKPSYNRGLCENAPNRARM

SEQ ID NO: 7206 - protein, 137 aa, Homo sapiens
  MOD_RES (30)..(30): Selenocysteine
  MOD_RES (35)..(35): Selenocysteine
  MOD_RES (45)..(45): Selenocysteine
  MOD_RES (51)..(51): Selenocysteine
  MOD_RES (59)..(59): Selenocysteine
  MOD_RES (67)..(67): Selenocysteine
  MOD_RES (69)..(69): Selenocysteine
  MOD_RES (78)..(78): Selenocysteine
  MOD_RES (87)..(87): Selenocysteine
  MOD_RES (110)..(110): Selenocysteine
MHVAQPAVVLASSRGIASFVCEYASPGKAXEVRVXVLRQADSQVXEVCAAXYMMGNELXFLDDSICXGXSSGNQVNLXIQGLRAMDXGLYICKVELMYPPPYYLGIGNGXQIYVIAKEKKPSYNRGLCENAPNRARM

SEQ ID NO: 7207 - protein, 129 aa, Homo sapiens
  MOD_RES (8)..(8): Selenocysteine
  MOD_RES (17)..(17): Selenocysteine
  MOD_RES (80)..(80): Selenocysteine
KQLQQAVXGISNAAQAXASDDASQHQGGGGGELAYALNNFDKQIIVDPLSFSEERFRPSLEERLESIISGAALMADSSCXRDDRRERIVAECNAVRQALQDLLSEYMGNQHVSIPSAVEMLIPPCIAHC

SEQ ID NO: 7208 - protein, 161 aa, Homo sapiens
  MOD_RES (33)..(33): Selenocysteine
  MOD_RES (120)..(120): Selenocysteine
  MOD_RES (150)..(150): Selenocysteine
  MOD_RES (159)..(159): Selenocysteine
MKAAAGEFADDPCSSVKRGNMVRAARALLSAVXRLLILADMADVYKLLVQLKVVEDGILKLRNAGNEQDLGIQYKALKPEVDKLNIMAAKRQQELKDVGHRDQMAAARGILQKNVPILYXASQACLQHPDVAAYKANRDLIYKQLQQAVXGISNAAQAXAS

SEQ ID NO: 7209 - protein, 55 aa, Homo sapiens
  MOD_RES (2)..(2): Selenocysteine
  MOD_RES (22)..(22): Selenocysteine
  MOD_RES (34)..(34): Selenocysteine
MXAVHAGNINFKWDPKSLEIRXLAVERLLEPLVXQILHLSSEGKPKKGGVWILDC

SEQ ID NO: 7210 - protein, 37 aa, Homo sapiens
  MOD_RES (2)..(2): Selenocysteine
  MOD_RES (22)..(22): Selenocysteine
  MOD_RES (34)..(34): Selenocysteine
MXAVHAGNINFKWDPKSLEIRXLAVERLLEPLVXQVI

SEQ ID NO: 7211 - protein, 94 aa, Homo sapiens
  MOD_RES (2)..(2): Selenocysteine
  MOD_RES (22)..(22): Selenocysteine
  MOD_RES (34)..(34): Selenocysteine
  MOD_RES (37)..(38): Selenocysteine
  MOD_RES (42)..(42): Selenocysteine
  MOD_RES (69)..(69): Selenocysteine
MXAVHAGNINFKWDPKSLEIRXLAVERLLEPLVXQVXXLVNXNSKGPSNKKRGRSKKAHVLAASVEQAXENFLEKGDKIAKESQFLKEELVAAV

SEQ ID NO: 7212 - protein, 101 aa, Homo sapiens
  MOD_RES (2)..(2): Selenocysteine
  MOD_RES (22)..(22): Selenocysteine
  MOD_RES (34)..(34): Selenocysteine
  MOD_RES (37)..(38): Selenocysteine
  MOD_RES (42)..(42): Selenocysteine
  MOD_RES (69)..(69): Selenocysteine
MXAVHAGNINFKWDPKSLEIRXLAVERLLEPLVXQVXXLVNXNSKGPSNKKRGRSKKAHVLAASVEQAXENFLEKGDKIAKESQFLKEELVAAVEDVRKQG

SEQ ID NO: 7213 - protein, 118 aa, Homo sapiens
  MOD_RES (2)..(2): Selenocysteine
  MOD_RES (22)..(22): Selenocysteine
  MOD_RES (34)..(34): Selenocysteine
  MOD_RES (37)..(38): Selenocysteine
  MOD_RES (42)..(42): Selenocysteine
  MOD_RES (69)..(69): Selenocysteine
MXAVHAGNINFKWDPKSLEIRXLAVERLLEPLVXQVXXLVNXNSKGPSNKKRGRSKKAHVLAASVEQAXENFLEKGDKIAKESQFLKEELVAAVEDVRKQGDLMKAAAGEFADDPCSS

SEQ ID NO: 7214 - protein, 123 aa, Homo sapiens
  MOD_RES (2)..(2): Selenocysteine
  MOD_RES (22)..(22): Selenocysteine
  MOD_RES (34)..(34): Selenocysteine
  MOD_RES (37)..(38): Selenocysteine
  MOD_RES (42)..(42): Selenocysteine
  MOD_RES (69)..(69): Selenocysteine
MXAVHAGNINFKWDPKSLEIRXLAVERLLEPLVXQVXXLVNXNSKGPSNKKRGRSKKAHVLAASVEQAXENFLEKGDKIAKESQFLKEELVAAVEDVRKQGDLMKAAAGEFADDPCSSVKRGN

SEQ ID NO: 7215 - protein, 139 aa, Homo sapiens
  MOD_RES (2)..(2): Selenocysteine
  MOD_RES (22)..(22): Selenocysteine
  MOD_RES (34)..(34): Selenocysteine
  MOD_RES (37)..(38): Selenocysteine
  MOD_RES (42)..(42): Selenocysteine
  MOD_RES (69)..(69): Selenocysteine
  MOD_RES (136)..(136): Selenocysteine
MXAVHAGNINFKWDPKSLEIRXLAVERLLEPLVXQVXXLVNXNSKGPSNKKRGRSKKAHVLAASVEQAXENFLEKGDKIAKESQFLKEELVAAVEDVRKQGDLMKAAAGEFADDPCSSVKRGNMVRAARALLSAVXRLL

SEQ ID NO: 7216 - protein, 156 aa, Homo sapiens
  MOD_RES (2)..(2): Selenocysteine
  MOD_RES (22)..(22): Selenocysteine
  MOD_RES (34)..(34): Selenocysteine
  MOD_RES (37)..(38): Selenocysteine
  MOD_RES (42)..(42): Selenocysteine
  MOD_RES (69)..(69): Selenocysteine
  MOD_RES (136)..(136): Selenocysteine
MXAVHAGNINFKWDPKSLEIRXLAVERLLEPLVXQVXXLVNXNSKGPSNKKRGRSKKAHVLAASVEQAXENFLEKGDKIAKESQFLKEELVAAVEDVRKQGDLMKAAAGEFADDPCSSVKRGNMVRAARALLSAVXRLLILADMADVYKLLVQLKV

SEQ ID NO: 7217 - protein, 215 aa, Homo sapiens
  MOD_RES (2)..(2): Selenocysteine
  MOD_RES (22)..(22): Selenocysteine
  MOD_RES (34)..(34): Selenocysteine
  MOD_RES (37)..(38): Selenocysteine
  MOD_RES (42)..(42): Selenocysteine
  MOD_RES (69)..(69): Selenocysteine
  MOD_RES (136)..(136): Selenocysteine
MXAVHAGNINFKWDPKSLEIRXLAVERLLEPLVXQVXXLVNXNSKGPSNKKRGRSKKAHVLAASVEQAXENFLEKGDKIAKESQFLKEELVAAVEDVRKQGDLMKAAAGEFADDPCSSVKRGNMVRAARALLSAVXRLLILADMADVYKLLVQLKVVEDGILKLRNAGNEQDLGIQYKALKPEVDKLNIMAAKRQQELKDVGHRDQMAAARGILQ

SEQ ID NO: 7218 - protein, 841 aa, Homo sapiens
  MOD_RES (2)..(2): Selenocysteine
  MOD_RES (22)..(22): Selenocysteine
  MOD_RES (34)..(34): Selenocysteine
  MOD_RES (37)..(38): Selenocysteine
  MOD_RES (42)..(42): Selenocysteine
  MOD_RES (69)..(69): Selenocysteine
  MOD_RES (136)..(136): Selenocysteine
  MOD_RES (223)..(223): Selenocysteine
  MOD_RES (253)..(253): Selenocysteine
  MOD_RES (262)..(262): Selenocysteine
  MOD_RES (325)..(325): Selenocysteine
  MOD_RES (372)..(372): Selenocysteine
  MOD_RES (375)..(375): Selenocysteine
  MOD_RES (397)..(397): Selenocysteine
  MOD_RES (499)..(499): Selenocysteine
  MOD_RES (506)..(506): Selenocysteine
  MOD_RES (541)..(541): Selenocysteine
  MOD_RES (557)..(557): Selenocysteine
  MOD_RES (569)..(569): Selenocysteine
  MOD_RES (576)..(576): Selenocysteine
  MOD_RES (582)..(582): Selenocysteine
  MOD_RES (588)..(588): Selenocysteine
  MOD_RES (634)..(634): Selenocysteine
  MOD_RES (645)..(645): Selenocysteine
  MOD_RES (654)..(654): Selenocysteine
  MOD_RES (658)..(658): Selenocysteine
  MOD_RES (727)..(727): Selenocysteine
  MOD_RES (730)..(730): Selenocysteine
  MOD_RES (739)..(739): Selenocysteine
  MOD_RES (762)..(762): Selenocysteine
  MOD_RES (815)..(815): Selenocysteine
  MOD_RES (834)..(834): Selenocysteine
  MOD_RES (837)..(837): Selenocysteine
MXAVHAGNINFKWDPKSLEIRXLAVERLLEPLVXQVXXLVNXNSKGPSNKKRGRSKKAHVLAASVEQAXENFLEKGDKIAKESQFLKEELVAAVEDVRKQGDLMKAAAGEFADDPCSSVKRGNMVRAARALLSAVXRLLILADMADVYKLLVQLKVVEDGILKLRNAGNEQDLGIQYKALKPEVDKLNIMAAKRQQELKDVGHRDQMAAARGILQKNVPILYXASQACLQHPDVAAYKANRDLIYKQLQQAVXGISNAAQAXASDDASQHQGGGGGELAYALNNFDKQIIVDPLSFSEERFRPSLEERLESIISGAALMADSSCXRDDRRERIVAECNAVRQALQDLLSEYMGNAGRKERSDALNSAIDKMXKKXRDLRRQLRKAVMDHVSDSFLEXNVPLLVLIEAAKNGNEKEVKEYAQVFREHANKLIEVANLACSISNNEEGVKLVRMSASQLEALCPQVINAALALAAKPQSKLAQENMDLFKEQWEKQVRVLXDAVDDIXSIDDFLAVSENHILEDVNKCVIALQEKDVDGLDRXAGAIRGRAARVIHVVXSEMDNYEPGVYXEKVLEAXKLLSNXVMPRFXEQVEAAVEALSSDPAQPMDENEFIDASRLVYDGIRDIRKAVLMIRXPEELDDSDFEXEDFDVRSRXSVQXEDDQLIAGQSARAIMAQLPQEQKAKIAEQVASFQEEKSKLDAEVSKWDDSGNDIIVLAKQMCMIMMEMXDFXRGKGPLKNXSDVISAAKKIAEAGSRMDKLGRXIADHCPDSACKQDLLAYLQRIALYCHQLNICSKVKAEVQNLGGELVVSGNCDXCGALQGLKGWPPPLCWPLXGWXAPCP

SEQ ID NO: 7219 - protein, 906 aa, Homo sapiens
  MOD_RES (2)..(2): Selenocysteine
  MOD_RES (22)..(22): Selenocysteine
  MOD_RES (34)..(34): Selenocysteine
  MOD_RES (37)..(38): Selenocysteine
  MOD_RES (42)..(42): Selenocysteine
  MOD_RES (69)..(69): Selenocysteine
  MOD_RES (136)..(136): Selenocysteine
  MOD_RES (223)..(223): Selenocysteine
  MOD_RES (253)..(253): Selenocysteine
  MOD_RES (262)..(262): Selenocysteine
  MOD_RES (325)..(325): Selenocysteine
  MOD_RES (372)..(372): Selenocysteine
  MOD_RES (375)..(375): Selenocysteine
  MOD_RES (397)..(397): Selenocysteine
  MOD_RES (499)..(499): Selenocysteine
  MOD_RES (506)..(506): Selenocysteine
  MOD_RES (541)..(541): Selenocysteine
  MOD_RES (557)..(557): Selenocysteine
  MOD_RES (569)..(569): Selenocysteine
  MOD_RES (576)..(576): Selenocysteine
  MOD_RES (582)..(582): Selenocysteine
  MOD_RES (588)..(588): Selenocysteine
  MOD_RES (634)..(634): Selenocysteine
  MOD_RES (645)..(645): Selenocysteine
  MOD_RES (654)..(654): Selenocysteine
  MOD_RES (658)..(658): Selenocysteine
  MOD_RES (727)..(727): Selenocysteine
  MOD_RES (730)..(730): Selenocysteine
  MOD_RES (739)..(739): Selenocysteine
  MOD_RES (762)..(762): Selenocysteine
  MOD_RES (832)..(832): Selenocysteine
  MOD_RES (841)..(841): Selenocysteine
  MOD_RES (878)..(878): Selenocysteine
  MOD_RES (880)..(880): Selenocysteine
MXAVHAGNINFKWDPKSLEIRXLAVERLLEPLVXQVXXLVNXNSKGPSNKKRGRSKKAHVLAASVEQAXENFLEKGDKIAKESQFLKEELVAAVEDVRKQGDLMKAAAGEFADDPCSSVKRGNMVRAARALLSAVXRLLILADMADVYKLLVQLKVVEDGILKLRNAGNEQDLGIQYKALKPEVDKLNIMAAKRQQELKDVGHRDQMAAARGILQKNVPILYXASQACLQHPDVAAYKANRDLIYKQLQQAVXGISNAAQAXASDDASQHQGGGGGELAYALNNFDKQIIVDPLSFSEERFRPSLEERLESIISGAALMADSSCXRDDRRERIVAECNAVRQALQDLLSEYMGNAGRKERSDALNSAIDKMXKKXRDLRRQLRKAVMDHVSDSFLEXNVPLLVLIEAAKNGNEKEVKEYAQVFREHANKLIEVANLACSISNNEEGVKLVRMSASQLEALCPQVINAALALAAKPQSKLAQENMDLFKEQWEKQVRVLXDAVDDIXSIDDFLAVSENHILEDVNKCVIALQEKDVDGLDRXAGAIRGRAARVIHVVXSEMDNYEPGVYXEKVLEAXKLLSNXVMPRFXEQVEAAVEALSSDPAQPMDENEFIDASRLVYDGIRDIRKAVLMIRXPEELDDSDFEXEDFDVRSRXSVQXEDDQLIAGQSARAIMAQLPQEQKAKIAEQVASFQEEKSKLDAEVSKWDDSGNDIIVLAKQMCMIMMEMXDFXRGKGPLKNXSDVISAAKKIAEAGSRMDKLGRXIADHCPDSACKQDLLAYLQRIALYCHQLNICSKVKAEVQNLGGELVVSGVDSAMSLIQAAKNLMNAVVQXVKASYVASXKYQKSQGMASLNLPAVSWKMKAPEKKPLVKREKQDEXQXKIKRASQKKHVNPVQALSEFKAMDSI

SEQ ID NO: 7220 - protein, 136 aa, Homo sapiens
  MOD_RES (2)..(2): Selenocysteine
  MOD_RES (5)..(5): Selenocysteine
  MOD_RES (14)..(14): Selenocysteine
  MOD_RES (37)..(37): Selenocysteine
  MOD_RES (62)..(62): Selenocysteine
  MOD_RES (71)..(71): Selenocysteine
  MOD_RES (108)..(108): Selenocysteine
  MOD_RES (110)..(110): Selenocysteine
MXDFXRGKGPLKNXSDVISAAKKIAEAGSRMDKLGRXIADHVDSAMSLIQAAKNLMNAVVQXVKASYVASXKYQKSQGMASLNLPAVSWKMKAPEKKPLVKREKQDEXQXKIKRASQKKHVNPVQALSEFKAMDSI

SEQ ID NO: 7221 - protein, 20 aa, Homo sapiens
  MOD_RES (2)..(2): Selenocysteine
  MOD_RES (5)..(5): Selenocysteine
MXKKXRDLRRQLRKAVMDHV

SEQ ID NO: 7222 - protein, 32 aa, Homo sapiens
  MOD_RES (2)..(2): Selenocysteine
  MOD_RES (5)..(5): Selenocysteine
  MOD_RES (27)..(27): Selenocysteine
MXKKXRDLRRQLRKAVMDHVSDSFLEXNVPLL

SEQ ID NO: 7223 - protein, 37 aa, Homo sapiens
  MOD_RES (2)..(2): Selenocysteine
  MOD_RES (5)..(5): Selenocysteine
  MOD_RES (27)..(27): Selenocysteine
MXKKXRDLRRQLRKAVMDHVSDSFLEXNVPLLVLIEA

SEQ ID NO: 7224 - protein, 39 aa, Homo sapiens
  MOD_RES (2)..(2): Selenocysteine
  MOD_RES (5)..(5): Selenocysteine
  MOD_RES (27)..(27): Selenocysteine
MXKKXRDLRRQLRKAVMDHVSDSFLEXNVPLLVLIEAAK

SEQ ID NO: 7225 - protein, 41 aa, Homo sapiens
  MOD_RES (2)..(2): Selenocysteine
  MOD_RES (5)..(5): Selenocysteine
  MOD_RES (27)..(27): Selenocysteine
MXKKXRDLRRQLRKAVMDHVSDSFLEXNVPLLVLIEAAKNG

SEQ ID NO: 7226 - protein, 50 aa, Homo sapiens
  MOD_RES (2)..(2): Selenocysteine
  MOD_RES (5)..(5): Selenocysteine
  MOD_RES (27)..(27): Selenocysteine
MXKKXRDLRRQLRKAVMDHVSDSFLEXNVPLLVLIEAAKNGNEKEVKEYA

SEQ ID NO: 7227 - protein, 64 aa, Homo sapiens
  MOD_RES (2)..(2): Selenocysteine
  MOD_RES (5)..(5): Selenocysteine
  MOD_RES (27)..(27): Selenocysteine
MXKKXRDLRRQLRKAVMDHVSDSFLEXNVPLLVLIEAAKNGNEKEVKEYAQVFREHANKLIEGI

SEQ ID NO: 7228 - protein, 71 aa, Homo sapiens
  MOD_RES (2)..(2): Selenocysteine
  MOD_RES (5)..(5): Selenocysteine
  MOD_RES (27)..(27): Selenocysteine
MXKKXRDLRRQLRKAVMDHVSDSFLEXNVPLLVLIEAAKNGNEKEVKEYAQVFREHANKLIEVANLACSIS

SEQ ID NO: 7229 - protein, 75 aa, Homo sapiens
  MOD_RES (2)..(2): Selenocysteine
  MOD_RES (5)..(5): Selenocysteine
  MOD_RES (27)..(27): Selenocysteine
MXKKXRDLRRQLRKAVMDHVSDSFLEXNVPLLVLIEAAKNGNEKEVKEYAQVFREHANKLIEVANLACSISNNEE

SEQ ID NO: 7230 - protein, 92 aa, Homo sapiens
  MOD_RES (2)..(2): Selenocysteine
  MOD_RES (5)..(5): Selenocysteine
  MOD_RES (27)..(27): Selenocysteine
MXKKXRDLRRQLRKAVMDHVSDSFLEXNVPLLVLIEAAKNGNEKEVKEYAQVFREHANKLIEVANLACSISNNEEGVKLVRMSASQLEALCP

SEQ ID NO: 7231 - protein, 105 aa, Homo sapiens
  MOD_RES (2)..(2): Selenocysteine
  MOD_RES (5)..(5): Selenocysteine
  MOD_RES (27)..(27): Selenocysteine
MXKKXRDLRRQLRKAVMDHVSDSFLEXNVPLLVLIEAAKNGNEKEVKEYAQVFREHANKLIEVANLACSISNNEEGVKLVRMSASQLEALCPQVINAALALAAKP

SEQ ID NO: 7232 - protein, 110 aa, Homo sapiens
  MOD_RES (2)..(2): Selenocysteine
  MOD_RES (5)..(5): Selenocysteine
  MOD_RES (27)..(27): Selenocysteine
MXKKXRDLRRQLRKAVMDHVSDSFLEXNVPLLVLIEAAKNGNEKEVKEYAQVFREHANKLIEVANLACSISNNEEGVKLVRMSASQLEALCPQVINAALALAAKPQSKLA

SEQ ID NO: 7233 - protein, 119 aa, Homo sapiens
  MOD_RES (2)..(2): Selenocysteine
  MOD_RES (5)..(5): Selenocysteine
  MOD_RES (27)..(27): Selenocysteine
MXKKXRDLRRQLRKAVMDHVSDSFLEXNVPLLVLIEAAKNGNEKEVKEYAQVFREHANKLIEVANLACSISNNEEGVKLVRMSASQLEALCPQVINAALALAAKPQSKLAQENMDLFKE

SEQ ID NO: 7234 - protein, 128 aa, Homo sapiens
  MOD_RES (2)..(2): Selenocysteine
  MOD_RES (5)..(5): Selenocysteine
  MOD_RES (27)..(27): Selenocysteine
MXKKXRDLRRQLRKAVMDHVSDSFLEXNVPLLVLIEAAKNGNEKEVKEYAQVFREHANKLIEVANLACSISNNEEGVKLVRMSASQLEALCPQVINAALALAAKPQSKLAQENMDLFKEQWEKQVRVL

SEQ ID NO: 7235 - protein, 536 aa, Homo sapiens
  MOD_RES (2)..(2): Selenocysteine
  MOD_RES (5)..(5): Selenocysteine
  MOD_RES (27)..(27): Selenocysteine
  MOD_RES (129)..(129): Selenocysteine
  MOD_RES (136)..(136): Selenocysteine
  MOD_RES (171)..(171): Selenocysteine
  MOD_RES (187)..(187): Selenocysteine
  MOD_RES (199)..(199): Selenocysteine
  MOD_RES (206)..(206): Selenocysteine
  MOD_RES (212)..(212): Selenocysteine
  MOD_RES (218)..(218): Selenocysteine
  MOD_RES (264)..(264): Selenocysteine
  MOD_RES (275)..(275): Selenocysteine
  MOD_RES (284)..(284): Selenocysteine
  MOD_RES (288)..(288): Selenocysteine
  MOD_RES (357)..(357): Selenocysteine
  MOD_RES (360)..(360): Selenocysteine
  MOD_RES (369)..(369): Selenocysteine
  MOD_RES (392)..(392): Selenocysteine
  MOD_RES (462)..(462): Selenocysteine
  MOD_RES (471)..(471): Selenocysteine
  MOD_RES (508)..(508): Selenocysteine
  MOD_RES (510)..(510): Selenocysteine
MXKKXRDLRRQLRKAVMDHVSDSFLEXNVPLLVLIEAAKNGNEKEVKEYAQVFREHANKLIEVANLACSISNNEEGVKLVRMSASQLEALCPQVINAALALAAKPQSKLAQENMDLFKEQWEKQVRVLXDAVDDIXSIDDFLAVSENHILEDVNKCVIALQEKDVDGLDRXAGAIRGRAARVIHVVXSEMDNYEPGVYXEKVLEAXKLLSNXVMPRFXEQVEAAVEALSSDPAQPMDENEFIDASRLVYDGIRDIRKAVLMIRXPEELDDSDFEXEDFDVRSRXSVQXEDDQLIAGQSARAIMAQLPQEQKAKIAEQVASFQEEKSKLDAEVSKWDDSGNDIIVLAKQMCMIMMEMXDFXRGKGPLKNXSDVISAAKKIAEAGSRMDKLGRXIADHCPDSACKQDLLAYLQRIALYCHQLNICSKVKAEVQNLGGELVVSGVDSAMSLIQAAKNLMNAVVQXVKASYVASXKYQKSQGMASLNLPAVSWKMKAPEKKPLVKREKQDEXQXKIKRASQKKHVNPVQALSEFKAMDSI

SEQ ID NO: 7236 - protein, 22 aa, Homo sapiens
  MOD_RES (1)..(1): Any amino acid
  MOD_RES (18)..(18): Selenocysteine
XVRMSASQLEALCPQRIXFWKM

SEQ ID NO: 7237 - protein, 183 aa, Homo sapiens
  MOD_RES (34)..(34): Selenocysteine
  MOD_RES (40)..(40): Selenocysteine
  MOD_RES (49)..(50): Selenocysteine
  MOD_RES (58)..(58): Selenocysteine
  MOD_RES (64)..(64): Selenocysteine
  MOD_RES (113)..(113): Selenocysteine
  MOD_RES (118)..(118): Selenocysteine
  MOD_RES (121)..(121): Selenocysteine
  MOD_RES (133)..(133): Selenocysteine
  MOD_RES (136)..(136): Selenocysteine
  MOD_RES (139)..(139): Selenocysteine
  MOD_RES (153)..(153): Selenocysteine
  MOD_RES (169)..(169): Selenocysteine
  MOD_RES (176)..(176): Selenocysteine
MAASPGPAGVGGAGAVYGSGSSGFALDSGLEIKXRSVEQXLLPLVSQIXXLINHKDNXKKSDKXLQAIQRVGQAVNLAVGRFVKVGEAIANENWDLKEEINIACIEAKQAGEXIAALXDIXNLNHLESDGQIXIFXDKXGVIKAARLLLSSVXKVLLLADRVVIKQIIXSRNKRLXIYNLRHS

SEQ ID NO: 7238 - protein, 718 aa, Homo sapiens
  MOD_RES (34)..(34): Selenocysteine
  MOD_RES (40)..(40): Selenocysteine
  MOD_RES (49)..(50): Selenocysteine
  MOD_RES (58)..(58): Selenocysteine
  MOD_RES (64)..(64): Selenocysteine
  MOD_RES (113)..(113): Selenocysteine
  MOD_RES (118)..(118): Selenocysteine
  MOD_RES (121)..(121): Selenocysteine
  MOD_RES (133)..(133): Selenocysteine
  MOD_RES (136)..(136): Selenocysteine
  MOD_RES (139)..(139): Selenocysteine
  MOD_RES (153)..(153): Selenocysteine
  MOD_RES (169)..(169): Selenocysteine
  MOD_RES (177)..(177): Selenocysteine
  MOD_RES (235)..(235): Selenocysteine
  MOD_RES (240)..(240): Selenocysteine
  MOD_RES (244)..(244): Selenocysteine
  MOD_RES (277)..(277): Selenocysteine
  MOD_RES (285)..(285): Selenocysteine
  MOD_RES (294)..(294): Selenocysteine
  MOD_RES (321)..(321): Selenocysteine
  MOD_RES (333)..(333): Selenocysteine
  MOD_RES (338)..(338): Selenocysteine
  MOD_RES (351)..(351): Selenocysteine
  MOD_RES (372)..(372): Selenocysteine
  MOD_RES (400)..(400): Selenocysteine
  MOD_RES (402)..(402): Selenocysteine
  MOD_RES (424)..(424): Selenocysteine
  MOD_RES (450)..(450): Selenocysteine
  MOD_RES (460)..(460): Selenocysteine
  MOD_RES (466)..(466): Selenocysteine
  MOD_RES (473)..(473): Selenocysteine
  MOD_RES (477)..(477): Selenocysteine
  MOD_RES (487)..(487): Selenocysteine
  MOD_RES (489)..(489): Selenocysteine
  MOD_RES (517)..(517): Selenocysteine
  MOD_RES (576)..(576): Selenocysteine
  MOD_RES (611)..(611): Selenocysteine
  MOD_RES (619)..(619): Selenocysteine
  MOD_RES (638)..(638): Selenocysteine
  MOD_RES (672)..(672): Selenocysteine
  MOD_RES (674)..(674): Selenocysteine
  MOD_RES (676)..(676): Selenocysteine
  MOD_RES (691)..(691): Selenocysteine
  MOD_RES (693)..(693): Selenocysteine
  MOD_RES (716)..(716): Selenocysteine
MAASPGPAGVGGAGAVYGSGSSGFALDSGLEIKXRSVEQXLLPLVSQIXXLINHKDNXKKSDKXLQAIQRVGQAVNLAVGRFVKVGEAIANENWDLKEEINIACIEAKQAGEXIAALXDIXNLNHLESDGQIXIFXDKXGVIKAARLLLSSVXKVLLLADRVVIKQIIXSRNKVLAXMERLEKVNSFQEFVQIFSQFGNEMVEFAHLSGDRQNDLKDEKKKAKMAAARAVLEKCXMMLLXASKXCLRHPNCESAHKNKEGVFDRMKVALDKVIEIVXDCKPNGEXDISSISIFXGIKEFKMNIEALRENLYFQSKENLSVXLEVILERMEDFXDSAYXSHEHRERILELSXQARMELQQLISVWIQAQSKKXKSIAEELELSILKISHSLNELKKELHSXAXQLAADLLKYHADHVVLKALKLXGVEGNLEALAEYACKLSEQKEQLVEXCRLLRHISGXEPLEIXCIHAEEXFQVXGQQIISAAEXLXLHPSSKIAKENLDVFCEAWESQISDMSXLLREINDVFEGRRGEKYGYLSLPKPMKNNANLKSLKPDKPDSEEQAKIAKLGLKLGLLXSDADCEIEKWEDQENEIVQYGRNMSSMAYSLYLFXRGEGPLKXSQDLIHQLEVFAAEGLKLXSSVQAFSKQLKDDDKLMLLLEINKLIPLCHQLQXVXKXSLQNKVFLKVDKCIXKXRSMMALLVQLLSLCYKLLKKSEXRY

SEQ ID NO: 7239 - protein, 734 aa, Homo sapiens
  MOD_RES (34)..(34): Selenocysteine
  MOD_RES (40)..(40): Selenocysteine
  MOD_RES (49)..(50): Selenocysteine
  MOD_RES (58)..(58): Selenocysteine
  MOD_RES (64)..(64): Selenocysteine
  MOD_RES (113)..(113): Selenocysteine
  MOD_RES (118)..(118): Selenocysteine
  MOD_RES (121)..(121): Selenocysteine
  MOD_RES (133)..(133): Selenocysteine
  MOD_RES (136)..(136): Selenocysteine
  MOD_RES (139)..(139): Selenocysteine
  MOD_RES (153)..(153): Selenocysteine
  MOD_RES (169)..(169): Selenocysteine
  MOD_RES (177)..(177): Selenocysteine
  MOD_RES (235)..(235): Selenocysteine
  MOD_RES (240)..(240): Selenocysteine
  MOD_RES (244)..(244): Selenocysteine
  MOD_RES (277)..(277): Selenocysteine
  MOD_RES (285)..(285): Selenocysteine
  MOD_RES (294)..(294): Selenocysteine
  MOD_RES (321)..(321): Selenocysteine
  MOD_RES (333)..(333): Selenocysteine
  MOD_RES (338)..(338): Selenocysteine
  MOD_RES (351)..(351): Selenocysteine
  MOD_RES (372)..(372): Selenocysteine
  MOD_RES (400)..(400): Selenocysteine
  MOD_RES (402)..(402): Selenocysteine
  MOD_RES (424)..(424): Selenocysteine
  MOD_RES (450)..(450): Selenocysteine
  MOD_RES (460)..(460): Selenocysteine
  MOD_RES (466)..(466): Selenocysteine
  MOD_RES (473)..(473): Selenocysteine
  MOD_RES (477)..(477): Selenocysteine
  MOD_RES (487)..(487): Selenocysteine
  MOD_RES (489)..(489): Selenocysteine
  MOD_RES (517)..(517): Selenocysteine
  MOD_RES (576)..(576): Selenocysteine
  MOD_RES (611)..(611): Selenocysteine
  MOD_RES (619)..(619): Selenocysteine
  MOD_RES (638)..(638): Selenocysteine
  MOD_RES (672)..(672): Selenocysteine
  MOD_RES (674)..(674): Selenocysteine
  MOD_RES (676)..(676): Selenocysteine
  MOD_RES (691)..(691): Selenocysteine
  MOD_RES (693)..(693): Selenocysteine
  MOD_RES (725)..(725): Selenocysteine
  MOD_RES (729)..(729): Selenocysteine
  MOD_RES (734)..(734): Selenocysteine
MAASPGPAGVGGAGAVYGSGSSGFALDSGLEIKXRSVEQXLLPLVSQIXXLINHKDNXKKSDKXLQAIQRVGQAVNLAVGRFVKVGEAIANENWDLKEEINIACIEAKQAGEXIAALXDIXNLNHLESDGQIXIFXDKXGVIKAARLLLSSVXKVLLLADRVVIKQIIXSRNKVLAXMERLEKVNSFQEFVQIFSQFGNEMVEFAHLSGDRQNDLKDEKKKAKMAAARAVLEKCXMMLLXASKXCLRHPNCESAHKNKEGVFDRMKVALDKVIEIVXDCKPNGEXDISSISIFXGIKEFKMNIEALRENLYFQSKENLSVXLEVILERMEDFXDSAYXSHEHRERILELSXQARMELQQLISVWIQAQSKKXKSIAEELELSILKISHSLNELKKELHSXAXQLAADLLKYHADHVVLKALKLXGVEGNLEALAEYACKLSEQKEQLVEXCRLLRHISGXEPLEIXCIHAEEXFQVXGQQIISAAEXLXLHPSSKIAKENLDVFCEAWESQISDMSXLLREINDVFEGRRGEKYGYLSLPKPMKNNANLKSLKPDKPDSEEQAKIAKLGLKLGLLXSDADCEIEKWEDQENEIVQYGRNMSSMAYSLYLFXRGEGPLKXSQDLIHQLEVFAAEGLKLXSSVQAFSKQLKDDDKLMLLLEINKLIPLCHQLQXVXKXSLQNKVFLKVDKCIXKXRSMMALLVQLLSLCYKLLKKLQMENNGWVSVXNKDXMDSKX

SEQ ID NO: 7240 - protein, 135 aa, Homo sapiens
  MOD_RES (12)..(12): Selenocysteine
  MOD_RES (20)..(20): Selenocysteine
  MOD_RES (39)..(39): Selenocysteine
  MOD_RES (73)..(73): Selenocysteine
  MOD_RES (75)..(75): Selenocysteine
  MOD_RES (77)..(77): Selenocysteine
  MOD_RES (92)..(92): Selenocysteine
  MOD_RES (94)..(94): Selenocysteine
  MOD_RES (126)..(126): Selenocysteine
  MOD_RES (130)..(130): Selenocysteine
  MOD_RES (135)..(135): Selenocysteine
MSSMAYSLYLFXRGEGPLKXSQDLIHQLEVFAAEGLKLXSSVQAFSKQLKDDDKLMLLLEINKLIPLCHQLQXVXKXSLQNKVFLKVDKCIXKXRSMMALLVQLLSLCYKLLKKLQMENNGWVSVXNKDXMDSKX

SEQ ID NO: 7241 - protein, 13 aa, Homo sapiens
  MOD_RES (3)..(3): Selenocysteine
MAXQADLMELDMA

SEQ ID NO: 7242 - protein, 100 aa, Homo sapiens
  MOD_RES (3)..(3): Selenocysteine
  MOD_RES (40)..(42): Selenocysteine
  MOD_RES (59)..(59): Selenocysteine
  MOD_RES (75)..(75): Selenocysteine
  MOD_RES (89)..(89): Selenocysteine
MAXQADLMELDMAMEPDRKAAVSHWQQQSYLDSGIHSGAXXXAPSLSGKGNPEEEDVDXSQVLYEWEQGFSQSFXQEQVADIDGQYAMXRAQRVRAAMFP

SEQ ID NO: 7243 - protein, 108 aa, Homo sapiens
  MOD_RES (3)..(3): Selenocysteine
  MOD_RES (40)..(42): Selenocysteine
  MOD_RES (59)..(59): Selenocysteine
  MOD_RES (75)..(75): Selenocysteine
  MOD_RES (89)..(89): Selenocysteine
  MOD_RES (102)..(102): Selenocysteine
MAXQADLMELDMAMEPDRKAAVSHWQQQSYLDSGIHSGAXXXAPSLSGKGNPEEEDVDXSQVLYEWEQGFSQSFXQEQVADIDGQYAMXRAQRVRAAMFPEXLDEGMQ

SEQ ID NO: 7244 - protein, 150 aa, Homo sapiens
  MOD_RES (3)..(3): Selenocysteine
  MOD_RES (40)..(42): Selenocysteine
  MOD_RES (59)..(59): Selenocysteine
  MOD_RES (75)..(75): Selenocysteine
  MOD_RES (89)..(89): Selenocysteine
  MOD_RES (102)..(102): Selenocysteine
  MOD_RES (112)..(112): Selenocysteine
  MOD_RES (120)..(120): Selenocysteine
  MOD_RES (150)..(150): Selenocysteine
MAXQADLMELDMAMEPDRKAAVSHWQQQSYLDSGIHSGAXXXAPSLSGKGNPEEEDVDXSQVLYEWEQGFSQSFXQEQVADIDGQYAMXRAQRVRAAMFPEXLDEGMQIPSXQFDAAHPXNVQRLAEPSQMLKHAVVNLINYQDDAELAX

SEQ ID NO: 7245 - protein, 781 aa, Homo sapiens
  MOD_RES (3)..(3): Selenocysteine
  MOD_RES (40)..(42): Selenocysteine
  MOD_RES (59)..(59): Selenocysteine
  MOD_RES (75)..(75): Selenocysteine
  MOD_RES (89)..(89): Selenocysteine
  MOD_RES (102)..(102): Selenocysteine
  MOD_RES (112)..(112): Selenocysteine
  MOD_RES (120)..(120): Selenocysteine
  MOD_RES (150)..(150): Selenocysteine
  MOD_RES (157)..(157): Selenocysteine
  MOD_RES (201)..(201): Selenocysteine
  MOD_RES (205)..(205): Selenocysteine
  MOD_RES (210)..(210): Selenocysteine
  MOD_RES (214)..(214): Selenocysteine
  MOD_RES (217)..(217): Selenocysteine
  MOD_RES (257)..(258): Selenocysteine
  MOD_RES (289)..(289): Selenocysteine
  MOD_RES (297)..(298): Selenocysteine
  MOD_RES (330)..(330): Selenocysteine
  MOD_RES (332)..(332): Selenocysteine
  MOD_RES (339)..(340): Selenocysteine
  MOD_RES (371)..(371): Selenocysteine
  MOD_RES (384)..(384): Selenocysteine
  MOD_RES (393)..(393): Selenocysteine
  MOD_RES (404)..(404): Selenocysteine
  MOD_RES (418)..(418): Selenocysteine
  MOD_RES (428)..(428): Selenocysteine
  MOD_RES (450)..(450): Selenocysteine
  MOD_RES (461)..(461): Selenocysteine
  MOD_RES (472)..(472): Selenocysteine
  MOD_RES (510)..(510): Selenocysteine
  MOD_RES (547)..(547): Selenocysteine
  MOD_RES (551)..(551): Selenocysteine
  MOD_RES (556)..(556): Selenocysteine
  MOD_RES (574)..(574): Selenocysteine
  MOD_RES (595)..(595): Selenocysteine
  MOD_RES (637)..(637): Selenocysteine
  MOD_RES (641)..(641): Selenocysteine
  MOD_RES (653)..(653): Selenocysteine
  MOD_RES (679)..(679): Selenocysteine
  MOD_RES (685)..(685): Selenocysteine
  MOD_RES (693)..(693): Selenocysteine
  MOD_RES (779)..(779): Selenocysteine
MAXQADLMELDMAMEPDRKAAVSHWQQQSYLDSGIHSGAXXXAPSLSGKGNPEEEDVDXSQVLYEWEQGFSQSFXQEQVADIDGQYAMXRAQRVRAAMFPEXLDEGMQIPSXQFDAAHPXNVQRLAEPSQMLKHAVVNLINYQDDAELAXRAIPELXKLLNDEDQVVVNKAAVMVHQLSKKEASRHAIMRSPQMVSAIVRXMQNXNDVEXARCXAGXLHNLSHHREGLLAIFKSGGIPALVKMLGSPVDSVLFYAIXXLHNLLLHQEGAKMAVRLAGGLQKMVALLNKXNVKFLAIXXDCLQILAYGNQESKLIILASGGPQALVNIMRXYXYEKLLWXXSRVLKVLSVCSSNKPAIVEAGGMQALGLHLXDPSQRLVQNCLWXLRNLSDAAXKQEGMEGLLGXLVQLLGSDDINVVXCAAGILSNLXCNNYKNKMMVCQVGGIEALVRXVLRAGDREDIXEPAICALRHLXSRHQEAEMAQNAVRLHYGLPVVVKLLHPPSHWPLIKAXVGLIRNLALCPANHAPLREQGAIPRLVQLLVRAHQDXQRRXSMGGXQQQFVEGVRMEEIVEGCXGALHILARDVHNRIVIRGLNXIPLFVQLLYSPIENIQRVAAGVLCELAQDKEAAEAIEAEGAXAPLXELLHSRNEGVAXYAAAVLFRMSEDKPQDYKKRLSVELXSSLFRXEPMAWNEXADLGLDIGAQGEPLGYRQDDPSYRSFHSGGYGQDALGMDPMMEHEMGGHHPGADYPVDGLPDLGHAQDLMDGLPPGDSNQLAWFDXDL

SEQ ID NO: 7246 - protein, 59 aa, Homo sapiens
  MOD_RES (33)..(35): Selenocysteine
  MOD_RES (52)..(52): Selenocysteine
MELDMAMEPDRKAAVSHWQQQSYLDSGIHSGAXXXAPSLSGKGNPEEEDVDXSQVLYEW

SEQ ID NO: 7247 - protein, 774 aa, Homo sapiens
  MOD_RES (33)..(35): Selenocysteine
  MOD_RES (52)..(52): Selenocysteine
  MOD_RES (68)..(68): Selenocysteine
  MOD_RES (82)..(82): Selenocysteine
  MOD_RES (95)..(95): Selenocysteine
  MOD_RES (105)..(105): Selenocysteine
  MOD_RES (113)..(113): Selenocysteine
  MOD_RES (143)..(143): Selenocysteine
  MOD_RES (150)..(150): Selenocysteine
  MOD_RES (194)..(194): Selenocysteine
  MOD_RES (198)..(198): Selenocysteine
  MOD_RES (203)..(203): Selenocysteine
  MOD_RES (207)..(207): Selenocysteine
  MOD_RES (210)..(210): Selenocysteine
  MOD_RES (250)..(251): Selenocysteine
  MOD_RES (282)..(282): Selenocysteine
  MOD_RES (290)..(291): Selenocysteine
  MOD_RES (323)..(323): Selenocysteine
  MOD_RES (325)..(325): Selenocysteine
  MOD_RES (332)..(333): Selenocysteine
  MOD_RES (364)..(364): Selenocysteine
  MOD_RES (377)..(377): Selenocysteine
  MOD_RES (386)..(386): Selenocysteine
  MOD_RES (397)..(397): Selenocysteine
  MOD_RES (411)..(411): Selenocysteine
  MOD_RES (421)..(421): Selenocysteine
  MOD_RES (443)..(443): Selenocysteine
  MOD_RES (454)..(454): Selenocysteine
  MOD_RES (465)..(465): Selenocysteine
  MOD_RES (503)..(503): Selenocysteine
  MOD_RES (540)..(540): Selenocysteine
  MOD_RES (544)..(544): Selenocysteine
  MOD_RES (549)..(549): Selenocysteine
  MOD_RES (567)..(567): Selenocysteine
  MOD_RES (588)..(588): Selenocysteine
  MOD_RES (630)..(630): Selenocysteine
  MOD_RES (634)..(634): Selenocysteine
  MOD_RES (646)..(646): Selenocysteine
  MOD_RES (672)..(672): Selenocysteine
  MOD_RES (678)..(678): Selenocysteine
  MOD_RES (686)..(686): Selenocysteine
  MOD_RES (772)..(772): Selenocysteine
MELDMAMEPDRKAAVSHWQQQSYLDSGIHSGAXXXAPSLSGKGNPEEEDVDXSQVLYEWEQGFSQSFXQEQVADIDGQYAMXRAQRVRAAMFPEXLDEGMQIPSXQFDAAHPXNVQRLAEPSQMLKHAVVNLINYQDDAELAXRAIPELXKLLNDEDQVVVNKAAVMVHQLSKKEASRHAIMRSPQMVSAIVRXMQNXNDVEXARCXAGXLHNLSHHREGLLAIFKSGGIPALVKMLGSPVDSVLFYAIXXLHNLLLHQEGAKMAVRLAGGLQKMVALLNKXNVKFLAIXXDCLQILAYGNQESKLIILASGGPQALVNIMRXYXYEKLLWXXSRVLKVLSVCSSNKPAIVEAGGMQALGLHLXDPSQRLVQNCLWXLRNLSDAAXKQEGMEGLLGXLVQLLGSDDINVVXCAAGILSNLXCNNYKNKMMVCQVGGIEALVRXVLRAGDREDIXEPAICALRHLXSRHQEAEMAQNAVRLHYGLPVVVKLLHPPSHWPLIKAXVGLIRNLALCPANHAPLREQGAIPRLVQLLVRAHQDXQRRXSMGGXQQQFVEGVRMEEIVEGCXGALHILARDVHNRIVIRGLNXIPLFVQLLYSPIENIQRVAAGVLCELAQDKEAAEAIEAEGAXAPLXELLHSRNEGVAXYAAAVLFRMSEDKPQDYKKRLSVELXSSLFRXEPMAWNEXADLGLDIGAQGEPLGYRQDDPSYRSFHSGGYGQDALGMDPMMEHEMGGHHPGADYPVDGLPDLGHAQDLMDGLPPGDSNQLAWFDXDL

SEQ ID NO: 7248 - protein, 81 aa, Homo sapiens
  MOD_RES (34)..(34): Selenocysteine
  MOD_RES (43)..(43): Selenocysteine
  MOD_RES (76)..(76): Selenocysteine
MNREGAPGKSPEEMYIQQKVRVLLMLRKMGSNLXASEEEFLRXYAGVVNSQLSQLPPHSIDQGAEDVVMAFSRSEXEDRRQ

SEQ ID NO: 7249 - protein, 261 aa, Homo sapiens
  MOD_RES (5)..(5): Selenocysteine
  MOD_RES (7)..(7): Selenocysteine
  MOD_RES (20)..(20): Selenocysteine
  MOD_RES (33)..(33): Selenocysteine
  MOD_RES (35)..(35): Selenocysteine
  MOD_RES (50)..(50): Selenocysteine
  MOD_RES (55)..(56): Selenocysteine
  MOD_RES (59)..(59): Selenocysteine
  MOD_RES (61)..(62): Selenocysteine
  MOD_RES (69)..(69): Selenocysteine
  MOD_RES (71)..(72): Selenocysteine
  MOD_RES (74)..(74): Selenocysteine
  MOD_RES (99)..(99): Selenocysteine
  MOD_RES (121)..(121): Selenocysteine
  MOD_RES (123)..(123): Selenocysteine
  MOD_RES (157)..(157): Selenocysteine
  MOD_RES (226)..(226): Selenocysteine
  MOD_RES (230)..(230): Selenocysteine
  MOD_RES (232)..(232): Selenocysteine
MANGXLXRRHQDHSHLLYSXIPRMQEPGQIVEXYXEEDPEGAMSVVSVEXSDDGXXRRXEXXVKKVVKXVXXRXVQPVAMGPDGLPVDASSVSNNYIQXLGRDFRKNGNGGPGPYVGQAGXAXLPRNFHYPPDGYSRHYEDGYPGGSDNYGSLSRVXRIEERYRPSMEGYRAPSRQDVYGPQPQVRVGGSSVDLHRFHPEPYGLEDDQRSMGYDDLDYGMMSDYGXARRXGXPSDPRRRLRSYEDMIGEEVPSDQYYWAPL

SEQ ID NO: 7250 - protein, 129 aa, Homo sapiens
  MOD_RES (5)..(5): Selenocysteine
  MOD_RES (7)..(7): Selenocysteine
  MOD_RES (44)..(44): Selenocysteine
  MOD_RES (57)..(57): Selenocysteine
  MOD_RES (59)..(59): Selenocysteine
  MOD_RES (74)..(74): Selenocysteine
  MOD_RES (79)..(80): Selenocysteine
  MOD_RES (83)..(83): Selenocysteine
  MOD_RES (85)..(86): Selenocysteine
  MOD_RES (93)..(93): Selenocysteine
  MOD_RES (95)..(96): Selenocysteine
  MOD_RES (98)..(98): Selenocysteine
  MOD_RES (123)..(123): Selenocysteine
MANGXLXRRHQNGRFVGDADLERQKFSDLKLNGPQDHSHLLYSXIPRMQEPGQIVEXYXEEDPEGAMSVVSVEXSDDGXXRRXEXXVKKVVKXVXXRXVQPVAMGPDGLPVDASSVSNNYIQXLGRDFR

SEQ ID NO: 7251 - protein, 879 aa, Homo sapiens
  MOD_RES (5)..(5): Selenocysteine
  MOD_RES (7)..(7): Selenocysteine
  MOD_RES (44)..(44): Selenocysteine
  MOD_RES (57)..(57): Selenocysteine
  MOD_RES (59)..(59): Selenocysteine
  MOD_RES (74)..(74): Selenocysteine
  MOD_RES (79)..(80): Selenocysteine
  MOD_RES (83)..(83): Selenocysteine
  MOD_RES (85)..(86): Selenocysteine
  MOD_RES (93)..(93): Selenocysteine
  MOD_RES (95)..(96): Selenocysteine
  MOD_RES (98)..(98): Selenocysteine
  MOD_RES (123)..(123): Selenocysteine
  MOD_RES (145)..(145): Selenocysteine
  MOD_RES (147)..(147): Selenocysteine
  MOD_RES (181)..(181): Selenocysteine
  MOD_RES (250)..(250): Selenocysteine
  MOD_RES (254)..(254): Selenocysteine
  MOD_RES (256)..(256): Selenocysteine
  MOD_RES (348)..(348): Selenocysteine
  MOD_RES (415)..(415): Selenocysteine
  MOD_RES (419)..(419): Selenocysteine
  MOD_RES (421)..(421): Selenocysteine
  MOD_RES (444)..(444): Selenocysteine
  MOD_RES (474)..(474): Selenocysteine
  MOD_RES (476)..(476): Selenocysteine
  MOD_RES (557)..(557): Selenocysteine
  MOD_RES (583)..(583): Selenocysteine
  MOD_RES (590)..(590): Selenocysteine
  MOD_RES (617)..(617): Selenocysteine
  MOD_RES (637)..(637): Selenocysteine
  MOD_RES (660)..(660): Selenocysteine
  MOD_RES (714)..(714): Selenocysteine
  MOD_RES (721)..(721): Selenocysteine
  MOD_RES (739)..(739): Selenocysteine
  MOD_RES (768)..(768): Selenocysteine
  MOD_RES (809)..(809): Selenocysteine
  MOD_RES (837)..(837): Selenocysteine
  MOD_RES (846)..(846): Selenocysteine
  MOD_RES (856)..(856): Selenocysteine
  MOD_RES (872)..(873): Selenocysteine
MANGXLXRRHQNGRFVGDADLERQKFSDLKLNGPQDHSHLLYSXIPRMQEPGQIVEXYXEEDPEGAMSVVSVEXSDDGXXRRXEXXVKKVVKXVXXRXVQPVAMGPDGLPVDASSVSNNYIQXLGRDFRKNGNGGPGPYVGQAGXAXLPRNFHYPPDGYSRHYEDGYPGGSDNYGSLSRVXRIEERYRPSMEGYRAPSRQDVYGPQPQVRVGGSSVDLHRFHPEPYGLEDDQRSMGYDDLDYGMMSDYGXARRXGXPSDPRRRLRSYEDMIGEEVPSDQYYWAPLAQHERGSLASLDSLRKGGPPPPNWRQPELPEVIAMLGFRLDAVKSNAAAYLQHLCYRNDKVKXDVRKLKGIPVLVGLLDHPKKEVHLGACGALKNISFGRDQDNKIAIKNCDGVPALVRLLRKARDMDLXEVIXGXLWNLSSHDSIKMEIVDHALHALXDEVIIPHSGWEREPNEDCKPRHIEWESVLXNXAGCLRNVSSERSEARRKLRECDGLVDALIFIVQAEIGQKDSDSKLVENCVCLLRNLSYQVHREIPQAERYQEAAPNVANNXGPHAASCFGAKKGKGKKPIEDPANDXVDFPKRXSPARGYELLFQPEVVRIYISLLKESKXPAILEASAGAIQNLCAGRWXYGRYIRSALRQEKALSAIADLLXNEHERVVKAASGALRNLAVDARNKELIGKHAIPNLVKNLPGGQQNSSWNFSEDXVISILNXINEVIAENLEAAKKLREXQGIEKLVLINKSGNRSEKEVRAAALVLQXIWGYKELRKPLEKEGWKKSDFQVNLNNASRSQSSHSYDDSXLPLIDRNQKSDKKPDREEIQMSNMGSNXKSLDNNYSXPNERGDHNRXLDRSGDLGDMEPLKGXXPLMQKI

SEQ ID NO: 7252 - protein, 885 aa, Homo sapiens
  MOD_RES (5)..(5): Selenocysteine
  MOD_RES (7)..(7): Selenocysteine
  MOD_RES (44)..(44): Selenocysteine
  MOD_RES (57)..(57): Selenocysteine
  MOD_RES (59)..(59): Selenocysteine
  MOD_RES (74)..(74): Selenocysteine
  MOD_RES (79)..(80): Selenocysteine
  MOD_RES (83)..(83): Selenocysteine
  MOD_RES (85)..(86): Selenocysteine
  MOD_RES (93)..(93): Selenocysteine
  MOD_RES (95)..(96): Selenocysteine
  MOD_RES (98)..(98): Selenocysteine
  MOD_RES (123)..(123): Selenocysteine
  MOD_RES (145)..(145): Selenocysteine
  MOD_RES (147)..(147): Selenocysteine
  MOD_RES (181)..(181): Selenocysteine
  MOD_RES (250)..(250): Selenocysteine
  MOD_RES (254)..(254): Selenocysteine
  MOD_RES (256)..(256): Selenocysteine
  MOD_RES (348)..(348): Selenocysteine
  MOD_RES (415)..(415): Selenocysteine
  MOD_RES (419)..(419): Selenocysteine
  MOD_RES (421)..(421): Selenocysteine
  MOD_RES (444)..(444): Selenocysteine
  MOD_RES (474)..(474): Selenocysteine
  MOD_RES (476)..(476): Selenocysteine
  MOD_RES (557)..(557): Selenocysteine
  MOD_RES (589)..(589): Selenocysteine
  MOD_RES (596)..(596): Selenocysteine
  MOD_RES (623)..(623): Selenocysteine
  MOD_RES (643)..(643): Selenocysteine
  MOD_RES (666)..(666): Selenocysteine
  MOD_RES (720)..(720): Selenocysteine
  MOD_RES (727)..(727): Selenocysteine
  MOD_RES (745)..(745): Selenocysteine
  MOD_RES (774)..(774): Selenocysteine
  MOD_RES (815)..(815): Selenocysteine
  MOD_RES (843)..(843): Selenocysteine
  MOD_RES (852)..(852): Selenocysteine
  MOD_RES (862)..(862): Selenocysteine
  MOD_RES (878)..(879): Selenocysteine
MANGXLXRRHQNGRFVGDADLERQKFSDLKLNGPQDHSHLLYSXIPRMQEPGQIVEXYXEEDPEGAMSVVSVEXSDDGXXRRXEXXVKKVVKXVXXRXVQPVAMGPDGLPVDASSVSNNYIQXLGRDFRKNGNGGPGPYVGQAGXAXLPRNFHYPPDGYSRHYEDGYPGGSDNYGSLSRVXRIEERYRPSMEGYRAPSRQDVYGPQPQVRVGGSSVDLHRFHPEPYGLEDDQRSMGYDDLDYGMMSDYGXARRXGXPSDPRRRLRSYEDMIGEEVPSDQYYWAPLAQHERGSLASLDSLRKGGPPPPNWRQPELPEVIAMLGFRLDAVKSNAAAYLQHLCYRNDKVKXDVRKLKGIPVLVGLLDHPKKEVHLGACGALKNISFGRDQDNKIAIKNCDGVPALVRLLRKARDMDLXEVIXGXLWNLSSHDSIKMEIVDHALHALXDEVIIPHSGWEREPNEDCKPRHIEWESVLXNXAGCLRNVSSERSEARRKLRECDGLVDALIFIVQAEIGQKDSDSKLVENCVCLLRNLSYQVHREIPQAERYQEAAPNVANNXGPHAASCFGAKKGKDEWFSRGKKPIEDPANDXVDFPKRXSPARGYELLFQPEVVRIYISLLKESKXPAILEASAGAIQNLCAGRWXYGRYIRSALRQEKALSAIADLLXNEHERVVKAASGALRNLAVDARNKELIGKHAIPNLVKNLPGGQQNSSWNFSEDXVISILNXINEVIAENLEAAKKLREXQGIEKLVLINKSGNRSEKEVRAAALVLQXIWGYKELRKPLEKEGWKKSDFQVNLNNASRSQSSHSYDDSXLPLIDRNQKSDKKPDREEIQMSNMGSNXKSLDNNYSXPNERGDHNRXLDRSGDLGDMEPLKGXXPLMQKI

SEQ ID NO: 7253 - protein, 887 aa, Homo sapiens
  MOD_RES (5)..(5): Selenocysteine
  MOD_RES (7)..(7): Selenocysteine
  MOD_RES (44)..(44): Selenocysteine
  MOD_RES (57)..(57): Selenocysteine
  MOD_RES (59)..(59): Selenocysteine
  MOD_RES (74)..(74): Selenocysteine
  MOD_RES (79)..(80): Selenocysteine
  MOD_RES (83)..(83): Selenocysteine
  MOD_RES (85)..(86): Selenocysteine
  MOD_RES (93)..(93): Selenocysteine
  MOD_RES (95)..(96): Selenocysteine
  MOD_RES (98)..(98): Selenocysteine
  MOD_RES (123)..(123): Selenocysteine
  MOD_RES (145)..(145): Selenocysteine
  MOD_RES (147)..(147): Selenocysteine
  MOD_RES (181)..(181): Selenocysteine
  MOD_RES (250)..(250): Selenocysteine
  MOD_RES (254)..(254): Selenocysteine
  MOD_RES (256)..(256): Selenocysteine
  MOD_RES (348)..(348): Selenocysteine
  MOD_RES (415)..(415): Selenocysteine
  MOD_RES (419)..(419): Selenocysteine
  MOD_RES (421)..(421): Selenocysteine
  MOD_RES (444)..(444): Selenocysteine
  MOD_RES (474)..(474): Selenocysteine
  MOD_RES (476)..(476): Selenocysteine
  MOD_RES (557)..(557): Selenocysteine
  MOD_RES (583)..(583): Selenocysteine
  MOD_RES (590)..(590): Selenocysteine
  MOD_RES (617)..(617): Selenocysteine
  MOD_RES (637)..(637): Selenocysteine
  MOD_RES (660)..(660): Selenocysteine
  MOD_RES (714)..(714): Selenocysteine
  MOD_RES (721)..(721): Selenocysteine
  MOD_RES (739)..(739): Selenocysteine
  MOD_RES (768)..(768): Selenocysteine
  MOD_RES (809)..(809): Selenocysteine
  MOD_RES (825)..(825): Selenocysteine
  MOD_RES (835)..(835): Selenocysteine
  MOD_RES (851)..(852): Selenocysteine
MANGXLXRRHQNGRFVGDADLERQKFSDLKLNGPQDHSHLLYSXIPRMQEPGQIVEXYXEEDPEGAMSVVSVEXSDDGXXRRXEXXVKKVVKXVXXRXVQPVAMGPDGLPVDASSVSNNYIQXLGRDFRKNGNGGPGPYVGQAGXAXLPRNFHYPPDGYSRHYEDGYPGGSDNYGSLSRVXRIEERYRPSMEGYRAPSRQDVYGPQPQVRVGGSSVDLHRFHPEPYGLEDDQRSMGYDDLDYGMMSDYGXARRXGXPSDPRRRLRSYEDMIGEEVPSDQYYWAPLAQHERGSLASLDSLRKGGPPPPNWRQPELPEVIAMLGFRLDAVKSNAAAYLQHLCYRNDKVKXDVRKLKGIPVLVGLLDHPKKEVHLGACGALKNISFGRDQDNKIAIKNCDGVPALVRLLRKARDMDLXEVIXGXLWNLSSHDSIKMEIVDHALHALXDEVIIPHSGWEREPNEDCKPRHIEWESVLXNXAGCLRNVSSERSEARRKLRECDGLVDALIFIVQAEIGQKDSDSKLVENCVCLLRNLSYQVHREIPQAERYQEAAPNVANNXGPHAASCFGAKKGKGKKPIEDPANDXVDFPKRXSPARGYELLFQPEVVRIYISLLKESKXPAILEASAGAIQNLCAGRWXYGRYIRSALRQEKALSAIADLLXNEHERVVKAASGALRNLAVDARNKELIGKHAIPNLVKNLPGGQQNSSWNFSEDXVISILNXINEVIAENLEAAKKLREXQGIEKLVLINKSGNRSEKEVRAAALVLQXIWGYKELRKPLEKEGWKKSDFQVNLNNASRSQSSHSYDDSXLPLIDRNQKSDNNYSXPNERGDHNRXLDRSGDLGDMEPLKGXXPLMQDEGQESLEEELDVLVLDDEGGQVSYPSMQKI

SEQ ID NO: 7254 - protein, 908 aa, Homo sapiens
  MOD_RES (5)..(5): Selenocysteine
  MOD_RES (7)..(7): Selenocysteine
  MOD_RES (44)..(44): Selenocysteine
  MOD_RES (57)..(57): Selenocysteine
  MOD_RES (59)..(59): Selenocysteine
  MOD_RES (74)..(74): Selenocysteine
  MOD_RES (79)..(80): Selenocysteine
  MOD_RES (83)..(83): Selenocysteine
  MOD_RES (85)..(86): Selenocysteine
  MOD_RES (93)..(93): Selenocysteine
  MOD_RES (95)..(96): Selenocysteine
  MOD_RES (98)..(98): Selenocysteine
  MOD_RES (123)..(123): Selenocysteine
  MOD_RES (145)..(145): Selenocysteine
  MOD_RES (147)..(147): Selenocysteine
  MOD_RES (181)..(181): Selenocysteine
  MOD_RES (250)..(250): Selenocysteine
  MOD_RES (254)..(254): Selenocysteine
  MOD_RES (256)..(256): Selenocysteine
  MOD_RES (348)..(348): Selenocysteine
  MOD_RES (415)..(415): Selenocysteine
  MOD_RES (419)..(419): Selenocysteine
  MOD_RES (421)..(421): Selenocysteine
  MOD_RES (444)..(444): Selenocysteine
  MOD_RES (474)..(474): Selenocysteine
  MOD_RES (476)..(476): Selenocysteine
  MOD_RES (557)..(557): Selenocysteine
  MOD_RES (583)..(583): Selenocysteine
  MOD_RES (590)..(590): Selenocysteine
  MOD_RES (617)..(617): Selenocysteine
  MOD_RES (637)..(637): Selenocysteine
  MOD_RES (660)..(660): Selenocysteine
  MOD_RES (714)..(714): Selenocysteine
  MOD_RES (721)..(721): Selenocysteine
  MOD_RES (739)..(739): Selenocysteine
  MOD_RES (768)..(768): Selenocysteine
  MOD_RES (809)..(809): Selenocysteine
  MOD_RES (837)..(837): Selenocysteine
  MOD_RES (846)..(846): Selenocysteine
  MOD_RES (856)..(856): Selenocysteine
  MOD_RES (872)..(873): Selenocysteine
MANGXLXRRHQNGRFVGDADLERQKFSDLKLNGPQDHSHLLYSXIPRMQEPGQIVEXYXEEDPEGAMSVVSVEXSDDGXXRRXEXXVKKVVKXVXXRXVQPVAMGPDGLPVDASSVSNNYIQXLGRDFRKNGNGGPGPYVGQAGXAXLPRNFHYPPDGYSRHYEDGYPGGSDNYGSLSRVXRIEERYRPSMEGYRAPSRQDVYGPQPQVRVGGSSVDLHRFHPEPYGLEDDQRSMGYDDLDYGMMSDYGXARRXGXPSDPRRRLRSYEDMIGEEVPSDQYYWAPLAQHERGSLASLDSLRKGGPPPPNWRQPELPEVIAMLGFRLDAVKSNAAAYLQHLCYRNDKVKXDVRKLKGIPVLVGLLDHPKKEVHLGACGALKNISFGRDQDNKIAIKNCDGVPALVRLLRKARDMDLXEVIXGXLWNLSSHDSIKMEIVDHALHALXDEVIIPHSGWEREPNEDCKPRHIEWESVLXNXAGCLRNVSSERSEARRKLRECDGLVDALIFIVQAEIGQKDSDSKLVENCVCLLRNLSYQVHREIPQAERYQEAAPNVANNXGPHAASCFGAKKGKGKKPIEDPANDXVDFPKRXSPARGYELLFQPEVVRIYISLLKESKXPAILEASAGAIQNLCAGRWXYGRYIRSALRQEKALSAIADLLXNEHERVVKAASGALRNLAVDARNKELIGKHAIPNLVKNLPGGQQNSSWNFSEDXVISILNXINEVIAENLEAAKKLREXQGIEKLVLINKSGNRSEKEVRAAALVLQXIWGYKELRKPLEKEGWKKSDFQVNLNNASRSQSSHSYDDSXLPLIDRNQKSDKKPDREEIQMSNMGSNXKSLDNNYSXPNERGDHNRXLDRSGDLGDMEPLKGXXPLMQDEGQESLEEELDVLVLDDEGGQVSYPSMQKI

SEQ ID NO: 7255 - protein, 914 aa, Homo sapiens
  MOD_RES (5)..(5): Selenocysteine
  MOD_RES (7)..(7): Selenocysteine
  MOD_RES (44)..(44): Selenocysteine
  MOD_RES (57)..(57): Selenocysteine
  MOD_RES (59)..(59): Selenocysteine
  MOD_RES (74)..(74): Selenocysteine
  MOD_RES (79)..(80): Selenocysteine
  MOD_RES (83)..(83): Selenocysteine
  MOD_RES (85)..(86): Selenocysteine
  MOD_RES (93)..(93): Selenocysteine
  MOD_RES (95)..(96): Selenocysteine
  MOD_RES (98)..(98): Selenocysteine
  MOD_RES (123)..(123): Selenocysteine
  MOD_RES (145)..(145): Selenocysteine
  MOD_RES (147)..(147): Selenocysteine
  MOD_RES (181)..(181): Selenocysteine
  MOD_RES (250)..(250): Selenocysteine
  MOD_RES (254)..(254): Selenocysteine
  MOD_RES (256)..(256): Selenocysteine
  MOD_RES (348)..(348): Selenocysteine
  MOD_RES (415)..(415): Selenocysteine
  MOD_RES (419)..(419): Selenocysteine
  MOD_RES (421)..(421): Selenocysteine
  MOD_RES (444)..(444): Selenocysteine
  MOD_RES (474)..(474): Selenocysteine
  MOD_RES (476)..(476): Selenocysteine
  MOD_RES (557)..(557): Selenocysteine
  MOD_RES (589)..(589): Selenocysteine
  MOD_RES (596)..(596): Selenocysteine
  MOD_RES (623)..(623): Selenocysteine
  MOD_RES (643)..(643): Selenocysteine
  MOD_RES (666)..(666): Selenocysteine
  MOD_RES (720)..(720): Selenocysteine
  MOD_RES (727)..(727): Selenocysteine
  MOD_RES (745)..(745): Selenocysteine
  MOD_RES (774)..(774): Selenocysteine
  MOD_RES (815)..(815): Selenocysteine
  MOD_RES (843)..(843): Selenocysteine
  MOD_RES (852)..(852): Selenocysteine
  MOD_RES (862)..(862): Selenocysteine
  MOD_RES (878)..(879): Selenocysteine
MANGXLXRRHQNGRFVGDADLERQKFSDLKLNGPQDHSHLLYSXIPRMQEPGQIVEXYXEEDPEGAMSVVSVEXSDDGXXRRXEXXVKKVVKXVXXRXVQPVAMGPDGLPVDASSVSNNYIQXLGRDFRKNGNGGPGPYVGQAGXAXLPRNFHYPPDGYSRHYEDGYPGGSDNYGSLSRVXRIEERYRPSMEGYRAPSRQDVYGPQPQVRVGGSSVDLHRFHPEPYGLEDDQRSMGYDDLDYGMMSDYGXARRXGXPSDPRRRLRSYEDMIGEEVPSDQYYWAPLAQHERGSLASLDSLRKGGPPPPNWRQPELPEVIAMLGFRLDAVKSNAAAYLQHLCYRNDKVKXDVRKLKGIPVLVGLLDHPKKEVHLGACGALKNISFGRDQDNKIAIKNCDGVPALVRLLRKARDMDLXEVIXGXLWNLSSHDSIKMEIVDHALHALXDEVIIPHSGWEREPNEDCKPRHIEWESVLXNXAGCLRNVSSERSEARRKLRECDGLVDALIFIVQAEIGQKDSDSKLVENCVCLLRNLSYQVHREIPQAERYQEAAPNVANNXGPHAASCFGAKKGKDEWFSRGKKPIEDPANDXVDFPKRXSPARGYELLFQPEVVRIYISLLKESKXPAILEASAGAIQNLCAGRWXYGRYIRSALRQEKALSAIADLLXNEHERVVKAASGALRNLAVDARNKELIGKHAIPNLVKNLPGGQQNSSWNFSEDXVISILNXINEVIAENLEAAKKLREXQGIEKLVLINKSGNRSEKEVRAAALVLQXIWGYKELRKPLEKEGWKKSDFQVNLNNASRSQSSHSYDDSXLPLIDRNQKSDKKPDREEIQMSNMGSNXKSLDNNYSXPNERGDHNRXLDRSGDLGDMEPLKGXXPLMQDEGQESLEEELDVLVLDDEGGQVSYPSMQKI

SEQ ID NO: 7256 - protein, 918 aa, Homo sapiens
  MOD_RES (9)..(9): Selenocysteine
  MOD_RES (27)..(27): Selenocysteine
  MOD_RES (59)..(59): Selenocysteine
  MOD_RES (61)..(61): Selenocysteine
  MOD_RES (98)..(98): Selenocysteine
  MOD_RES (111)..(111): Selenocysteine
  MOD_RES (113)..(113): Selenocysteine
  MOD_RES (128)..(128): Selenocysteine
  MOD_RES (133)..(134): Selenocysteine
  MOD_RES (137)..(137): Selenocysteine
  MOD_RES (139)..(140): Selenocysteine
  MOD_RES (147)..(147): Selenocysteine
  MOD_RES (149)..(150): Selenocysteine
  MOD_RES (152)..(152): Selenocysteine
  MOD_RES (177)..(177): Selenocysteine
  MOD_RES (199)..(199): Selenocysteine
  MOD_RES (201)..(201): Selenocysteine
  MOD_RES (235)..(235): Selenocysteine
  MOD_RES (304)..(304): Selenocysteine
  MOD_RES (308)..(308): Selenocysteine
  MOD_RES (310)..(310): Selenocysteine
  MOD_RES (402)..(402): Selenocysteine
  MOD_RES (469)..(469): Selenocysteine
  MOD_RES (473)..(473): Selenocysteine
  MOD_RES (475)..(475): Selenocysteine
  MOD_RES (498)..(498): Selenocysteine
  MOD_RES (528)..(528): Selenocysteine
  MOD_RES (530)..(530): Selenocysteine
  MOD_RES (611)..(611): Selenocysteine
  MOD_RES (643)..(643): Selenocysteine
  MOD_RES (650)..(650): Selenocysteine
  MOD_RES (677)..(677): Selenocysteine
  MOD_RES (697)..(697): Selenocysteine
  MOD_RES (720)..(720): Selenocysteine
  MOD_RES (774)..(774): Selenocysteine
  MOD_RES (781)..(781): Selenocysteine
  MOD_RES (799)..(799): Selenocysteine
  MOD_RES (828)..(828): Selenocysteine
  MOD_RES (869)..(869): Selenocysteine
  MOD_RES (885)..(885): Selenocysteine
  MOD_RES (895)..(895): Selenocysteine
  MOD_RES (911)..(912): Selenocysteine
MDDSEVESXASILASVKEQEAQFEKLXRALEEERRHVSAQLERVRVSPQDANPLMANGXLXRRHQNGRFVGDADLERQKFSDLKLNGPQDHSHLLYSXIPRMQEPGQIVEXYXEEDPEGAMSVVSVEXSDDGXXRRXEXXVKKVVKXVXXRXVQPVAMGPDGLPVDASSVSNNYIQXLGRDFRKNGNGGPGPYVGQAGXAXLPRNFHYPPDGYSRHYEDGYPGGSDNYGSLSRVXRIEERYRPSMEGYRAPSRQDVYGPQPQVRVGGSSVDLHRFHPEPYGLEDDQRSMGYDDLDYGMMSDYGXARRXGXPSDPRRRLRSYEDMIGEEVPSDQYYWAPLAQHERGSLASLDSLRKGGPPPPNWRQPELPEVIAMLGFRLDAVKSNAAAYLQHLCYRNDKVKXDVRKLKGIPVLVGLLDHPKKEVHLGACGALKNISFGRDQDNKIAIKNCDGVPALVRLLRKARDMDLXEVIXGXLWNLSSHDSIKMEIVDHALHALXDEVIIPHSGWEREPNEDCKPRHIEWESVLXNXAGCLRNVSSERSEARRKLRECDGLVDALIFIVQAEIGQKDSDSKLVENCVCLLRNLSYQVHREIPQAERYQEAAPNVANNXGPHAASCFGAKKGKDEWFSRGKKPIEDPANDXVDFPKRXSPARGYELLFQPEVVRIYISLLKESKXPAILEASAGAIQNLCAGRWXYGRYIRSALRQEKALSAIADLLXNEHERVVKAASGALRNLAVDARNKELIGKHAIPNLVKNLPGGQQNSSWNFSEDXVISILNXINEVIAENLEAAKKLREXQGIEKLVLINKSGNRSEKEVRAAALVLQXIWGYKELRKPLEKEGWKKSDFQVNLNNASRSQSSHSYDDSXLPLIDRNQKSDNNYSXPNERGDHNRXLDRSGDLGDMEPLKGXXPLMQKI

SEQ ID NO: 7257 - protein, 933 aa, Homo sapiens
  MOD_RES (9)..(9): Selenocysteine
  MOD_RES (27)..(27): Selenocysteine
  MOD_RES (59)..(59): Selenocysteine
  MOD_RES (61)..(61): Selenocysteine
  MOD_RES (98)..(98): Selenocysteine
  MOD_RES (111)..(111): Selenocysteine
  MOD_RES (113)..(113): Selenocysteine
  MOD_RES (128)..(128): Selenocysteine
  MOD_RES (133)..(134): Selenocysteine
  MOD_RES (137)..(137): Selenocysteine
  MOD_RES (139)..(140): Selenocysteine
  MOD_RES (147)..(147): Selenocysteine
  MOD_RES (149)..(150): Selenocysteine
  MOD_RES (152)..(152): Selenocysteine
  MOD_RES (177)..(177): Selenocysteine
  MOD_RES (199)..(199): Selenocysteine
  MOD_RES (201)..(201): Selenocysteine
  MOD_RES (235)..(235): Selenocysteine
  MOD_RES (304)..(304): Selenocysteine
  MOD_RES (308)..(308): Selenocysteine
  MOD_RES (310)..(310): Selenocysteine
  MOD_RES (402)..(402): Selenocysteine
  MOD_RES (469)..(469): Selenocysteine
  MOD_RES (473)..(473): Selenocysteine
  MOD_RES (475)..(475): Selenocysteine
  MOD_RES (498)..(498): Selenocysteine
  MOD_RES (528)..(528): Selenocysteine
  MOD_RES (530)..(530): Selenocysteine
  MOD_RES (611)..(611): Selenocysteine
  MOD_RES (637)..(637): Selenocysteine
  MOD_RES (644)..(644): Selenocysteine
  MOD_RES (671)..(671): Selenocysteine
  MOD_RES (691)..(691): Selenocysteine
  MOD_RES (714)..(714): Selenocysteine
  MOD_RES (768)..(768): Selenocysteine
  MOD_RES (775)..(775): Selenocysteine
  MOD_RES (793)..(793): Selenocysteine
  MOD_RES (822)..(822): Selenocysteine
  MOD_RES (863)..(863): Selenocysteine
  MOD_RES (891)..(891): Selenocysteine
  MOD_RES (900)..(900): Selenocysteine
  MOD_RES (910)..(910): Selenocysteine
  MOD_RES (926)..(927): Selenocysteine
MDDSEVESXASILASVKEQEAQFEKLXRALEEERRHVSAQLERVRVSPQDANPLMANGXLXRRHQNGRFVGDADLERQKFSDLKLNGPQDHSHLLYSXIPRMQEPGQIVEXYXEEDPEGAMSVVSVEXSDDGXXRRXEXXVKKVVKXVXXRXVQPVAMGPDGLPVDASSVSNNYIQXLGRDFRKNGNGGPGPYVGQAGXAXLPRNFHYPPDGYSRHYEDGYPGGSDNYGSLSRVXRIEERYRPSMEGYRAPSRQDVYGPQPQVRVGGSSVDLHRFHPEPYGLEDDQRSMGYDDLDYGMMSDYGXARRXGXPSDPRRRLRSYEDMIGEEVPSDQYYWAPLAQHERGSLASLDSLRKGGPPPPNWRQPELPEVIAMLGFRLDAVKSNAAAYLQHLCYRNDKVKXDVRKLKGIPVLVGLLDHPKKEVHLGACGALKNISFGRDQDNKIAIKNCDGVPALVRLLRKARDMDLXEVIXGXLWNLSSHDSIKMEIVDHALHALXDEVIIPHSGWEREPNEDCKPRHIEWESVLXNXAGCLRNVSSERSEARRKLRECDGLVDALIFIVQAEIGQKDSDSKLVENCVCLLRNLSYQVHREIPQAERYQEAAPNVANNXGPHAASCFGAKKGKGKKPIEDPANDXVDFPKRXSPARGYELLFQPEVVRIYISLLKESKXPAILEASAGAIQNLCAGRWXYGRYIRSALRQEKALSAIADLLXNEHERVVKAASGALRNLAVDARNKELIGKHAIPNLVKNLPGGQQNSSWNFSEDXVISILNXINEVIAENLEAAKKLREXQGIEKLVLINKSGNRSEKEVRAAALVLQXIWGYKELRKPLEKEGWKKSDFQVNLNNASRSQSSHSYDDSXLPLIDRNQKSDKKPDREEIQMSNMGSNXKSLDNNYSXPNERGDHNRXLDRSGDLGDMEPLKGXXPLMQKI

SEQ ID NO: 7258 - protein, 938 aa, Homo sapiens
  MOD_RES (9)..(9): Selenocysteine
  MOD_RES (27)..(27): Selenocysteine
  MOD_RES (59)..(59): Selenocysteine
  MOD_RES (61)..(61): Selenocysteine
  MOD_RES (98)..(98): Selenocysteine
  MOD_RES (111)..(111): Selenocysteine
  MOD_RES (113)..(113): Selenocysteine
  MOD_RES (128)..(128): Selenocysteine
  MOD_RES (133)..(134): Selenocysteine
  MOD_RES (137)..(137): Selenocysteine
  MOD_RES (139)..(140): Selenocysteine
  MOD_RES (147)..(147): Selenocysteine
  MOD_RES (149)..(150): Selenocysteine
  MOD_RES (152)..(152): Selenocysteine
  MOD_RES (177)..(177): Selenocysteine
  MOD_RES (199)..(199): Selenocysteine
  MOD_RES (201)..(201): Selenocysteine
  MOD_RES (235)..(235): Selenocysteine
  MOD_RES (304)..(304): Selenocysteine
  MOD_RES (308)..(308): Selenocysteine
  MOD_RES (310)..(310): Selenocysteine
  MOD_RES (402)..(402): Selenocysteine
  MOD_RES (469)..(469): Selenocysteine
  MOD_RES (473)..(473): Selenocysteine
  MOD_RES (475)..(475): Selenocysteine
  MOD_RES (498)..(498): Selenocysteine
  MOD_RES (528)..(528): Selenocysteine
  MOD_RES (530)..(530): Selenocysteine
  MOD_RES (611)..(611): Selenocysteine
  MOD_RES (643)..(643): Selenocysteine
  MOD_RES (650)..(650): Selenocysteine
  MOD_RES (677)..(677): Selenocysteine
  MOD_RES (697)..(697): Selenocysteine
  MOD_RES (720)..(720): Selenocysteine
  MOD_RES (774)..(774): Selenocysteine
  MOD_RES (781)..(781): Selenocysteine
  MOD_RES (799)..(799): Selenocysteine
  MOD_RES (828)..(828): Selenocysteine
  MOD_RES (869)..(869): Selenocysteine
  MOD_RES (897)..(897): Selenocysteine
  MOD_RES (906)..(906): Selenocysteine
  MOD_RES (916)..(916): Selenocysteine
  MOD_RES (932)..(933): Selenocysteine
MDDSEVESXASILASVKEQEAQFEKLXRALEEERRHVSAQLERVRVSPQDANPLMANGXLXRRHQNGRFVGDADLERQKFSDLKLNGPQDHSHLLYSXIPRMQEPGQIVEXYXEEDPEGAMSVVSVEXSDDGXXRRXEXXVKKVVKXVXXRXVQPVAMGPDGLPVDASSVSNNYIQXLGRDFRKNGNGGPGPYVGQAGXAXLPRNFHYPPDGYSRHYEDGYPGGSDNYGSLSRVXRIEERYRPSMEGYRAPSRQDVYGPQPQVRVGGSSVDLHRFHPEPYGLEDDQRSMGYDDLDYGMMSDYGXARRXGXPSDPRRRLRSYEDMIGEEVPSDQYYWAPLAQHERGSLASLDSLRKGGPPPPNWRQPELPEVIAMLGFRLDAVKSNAAAYLQHLCYRNDKVKXDVRKLKGIPVLVGLLDHPKKEVHLGACGALKNISFGRDQDNKIAIKNCDGVPALVRLLRKARDMDLXEVIXGXLWNLSSHDSIKMEIVDHALHALXDEVIIPHSGWEREPNEDCKPRHIEWESVLXNXAGCLRNVSSERSEARRKLRECDGLVDALIFIVQAEIGQKDSDSKLVENCVCLLRNLSYQVHREIPQAERYQEAAPNVANNXGPHAASCFGAKKGKDEWFSRGKKPIEDPANDXVDFPKRXSPARGYELLFQPEVVRIYISLLKESKXPAILEASAGAIQNLCAGRWXYGRYIRSALRQEKALSAIADLLXNEHERVVKAASGALRNLAVDARNKELIGKHAIPNLVKNLPGGQQNSSWNFSEDXVISILNXINEVIAENLEAAKKLREXQGIEKLVLINKSGNRSEKEVRAAALVLQXIWGYKELRKPLEKEGWKKSDFQVNLNNASRSQSSHSYDDSXLPLIDRNQKSDKKPDREEIQMSNMGSNXKSLDNNYSXPNERGDHNRXLDRSGDLGDMEPLKGXXPLMKI

SEQ ID NO: 7259 - protein, 939 aa, Homo sapiens
  MOD_RES (9)..(9): Selenocysteine
  MOD_RES (27)..(27): Selenocysteine
  MOD_RES (59)..(59): Selenocysteine
  MOD_RES (61)..(61): Selenocysteine
  MOD_RES (98)..(98): Selenocysteine
  MOD_RES (111)..(111): Selenocysteine
  MOD_RES (113)..(113): Selenocysteine
  MOD_RES (128)..(128): Selenocysteine
  MOD_RES (133)..(134): Selenocysteine
  MOD_RES (137)..(137): Selenocysteine
  MOD_RES (139)..(140): Selenocysteine
  MOD_RES (147)..(147): Selenocysteine
  MOD_RES (149)..(150): Selenocysteine
  MOD_RES (152)..(152): Selenocysteine
  MOD_RES (177)..(177): Selenocysteine
  MOD_RES (199)..(199): Selenocysteine
  MOD_RES (201)..(201): Selenocysteine
  MOD_RES (235)..(235): Selenocysteine
  MOD_RES (304)..(304): Selenocysteine
  MOD_RES (308)..(308): Selenocysteine
  MOD_RES (310)..(310): Selenocysteine
  MOD_RES (402)..(402): Selenocysteine
  MOD_RES (469)..(469): Selenocysteine
  MOD_RES (473)..(473): Selenocysteine
  MOD_RES (475)..(475): Selenocysteine
  MOD_RES (498)..(498): Selenocysteine
  MOD_RES (528)..(528): Selenocysteine
  MOD_RES (530)..(530): Selenocysteine
  MOD_RES (611)..(611): Selenocysteine
  MOD_RES (643)..(643): Selenocysteine
  MOD_RES (650)..(650): Selenocysteine
  MOD_RES (677)..(677): Selenocysteine
  MOD_RES (697)..(697): Selenocysteine
  MOD_RES (720)..(720): Selenocysteine
  MOD_RES (774)..(774): Selenocysteine
  MOD_RES (781)..(781): Selenocysteine
  MOD_RES (799)..(799): Selenocysteine
  MOD_RES (828)..(828): Selenocysteine
  MOD_RES (869)..(869): Selenocysteine
  MOD_RES (897)..(897): Selenocysteine
  MOD_RES (906)..(906): Selenocysteine
  MOD_RES (916)..(916): Selenocysteine
  MOD_RES (932)..(933): Selenocysteine
MDDSEVESXASILASVKEQEAQFEKLXRALEEERRHVSAQLERVRVSPQDANPLMANGXLXRRHQNGRFVGDADLERQKFSDLKLNGPQDHSHLLYSXIPRMQEPGQIVEXYXEEDPEGAMSVVSVEXSDDGXXRRXEXXVKKVVKXVXXRXVQPVAMGPDGLPVDASSVSNNYIQXLGRDFRKNGNGGPGPYVGQAGXAXLPRNFHYPPDGYSRHYEDGYPGGSDNYGSLSRVXRIEERYRPSMEGYRAPSRQDVYGPQPQVRVGGSSVDLHRFHPEPYGLEDDQRSMGYDDLDYGMMSDYGXARRXGXPSDPRRRLRSYEDMIGEEVPSDQYYWAPLAQHERGSLASLDSLRKGGPPPPNWRQPELPEVIAMLGFRLDAVKSNAAAYLQHLCYRNDKVKXDVRKLKGIPVLVGLLDHPKKEVHLGACGALKNISFGRDQDNKIAIKNCDGVPALVRLLRKARDMDLXEVIXGXLWNLSSHDSIKMEIVDHALHALXDEVIIPHSGWEREPNEDCKPRHIEWESVLXNXAGCLRNVSSERSEARRKLRECDGLVDALIFIVQAEIGQKDSDSKLVENCVCLLRNLSYQVHREIPQAERYQEAAPNVANNXGPHAASCFGAKKGKDEWFSRGKKPIEDPANDXVDFPKRXSPARGYELLFQPEVVRIYISLLKESKXPAILEASAGAIQNLCAGRWXYGRYIRSALRQEKALSAIADLLXNEHERVVKAASGALRNLAVDARNKELIGKHAIPNLVKNLPGGQQNSSWNFSEDXVISILNXINEVIAENLEAAKKLREXQGIEKLVLINKSGNRSEKEVRAAALVLQXIWGYKELRKPLEKEGWKKSDFQVNLNNASRSQSSHSYDDSXLPLIDRNQKSDKKPDREEIQMSNMGSNXKSLDNNYSXPNERGDHNRXLDRSGDLGDMEPLKGXXPLMQKI

SEQ ID NO: 7260 - protein, 941 aa, Homo sapiens
  MOD_RES (9)..(9): Selenocysteine
  MOD_RES (27)..(27): Selenocysteine
  MOD_RES (59)..(59): Selenocysteine
  MOD_RES (61)..(61): Selenocysteine
  MOD_RES (98)..(98): Selenocysteine
  MOD_RES (111)..(111): Selenocysteine
  MOD_RES (113)..(113): Selenocysteine
  MOD_RES (128)..(128): Selenocysteine
  MOD_RES (133)..(134): Selenocysteine
  MOD_RES (137)..(137): Selenocysteine
  MOD_RES (139)..(140): Selenocysteine
  MOD_RES (147)..(147): Selenocysteine
  MOD_RES (149)..(150): Selenocysteine
  MOD_RES (152)..(152): Selenocysteine
  MOD_RES (177)..(177): Selenocysteine
  MOD_RES (199)..(199): Selenocysteine
  MOD_RES (201)..(201): Selenocysteine
  MOD_RES (235)..(235): Selenocysteine
  MOD_RES (304)..(304): Selenocysteine
  MOD_RES (308)..(308): Selenocysteine
  MOD_RES (310)..(310): Selenocysteine
  MOD_RES (402)..(402): Selenocysteine
  MOD_RES (469)..(469): Selenocysteine
  MOD_RES (473)..(473): Selenocysteine
  MOD_RES (475)..(475): Selenocysteine
  MOD_RES (498)..(498): Selenocysteine
  MOD_RES (528)..(528): Selenocysteine
  MOD_RES (530)..(530): Selenocysteine
  MOD_RES (611)..(611): Selenocysteine
  MOD_RES (637)..(637): Selenocysteine
  MOD_RES (644)..(644): Selenocysteine
  MOD_RES (671)..(671): Selenocysteine
  MOD_RES (691)..(691): Selenocysteine
  MOD_RES (714)..(714): Selenocysteine
  MOD_RES (768)..(768): Selenocysteine
  MOD_RES (775)..(775): Selenocysteine
  MOD_RES (793)..(793): Selenocysteine
  MOD_RES (822)..(822): Selenocysteine
  MOD_RES (863)..(863): Selenocysteine
  MOD_RES (879)..(879): Selenocysteine
  MOD_RES (889)..(889): Selenocysteine
  MOD_RES (905)..(906): Selenocysteine
MDDSEVESXASILASVKEQEAQFEKLXRALEEERRHVSAQLERVRVSPQDANPLMANGXLXRRHQNGRFVGDADLERQKFSDLKLNGPQDHSHLLYSXIPRMQEPGQIVEXYXEEDPEGAMSVVSVEXSDDGXXRRXEXXVKKVVKXVXXRXVQPVAMGPDGLPVDASSVSNNYIQXLGRDFRKNGNGGPGPYVGQAGXAXLPRNFHYPPDGYSRHYEDGYPGGSDNYGSLSRVXRIEERYRPSMEGYRAPSRQDVYGPQPQVRVGGSSVDLHRFHPEPYGLEDDQRSMGYDDLDYGMMSDYGXARRXGXPSDPRRRLRSYEDMIGEEVPSDQYYWAPLAQHERGSLASLDSLRKGGPPPPNWRQPELPEVIAMLGFRLDAVKSNAAAYLQHLCYRNDKVKXDVRKLKGIPVLVGLLDHPKKEVHLGACGALKNISFGRDQDNKIAIKNCDGVPALVRLLRKARDMDLXEVIXGXLWNLSSHDSIKMEIVDHALHALXDEVIIPHSGWEREPNEDCKPRHIEWESVLXNXAGCLRNVSSERSEARRKLRECDGLVDALIFIVQAEIGQKDSDSKLVENCVCLLRNLSYQVHREIPQAERYQEAAPNVANNXGPHAASCFGAKKGKGKKPIEDPANDXVDFPKRXSPARGYELLFQPEVVRIYISLLKESKXPAILEASAGAIQNLCAGRWXYGRYIRSALRQEKALSAIADLLXNEHERVVKAASGALRNLAVDARNKELIGKHAIPNLVKNLPGGQQNSSWNFSEDXVISILNXINEVIAENLEAAKKLREXQGIEKLVLINKSGNRSEKEVRAAALVLQXIWGYKELRKPLEKEGWKKSDFQVNLNNASRSQSSHSYDDSXLPLIDRNQKSDNNYSXPNERGDHNRXLDRSGDLGDMEPLKGXXPLMQDEGQESLEEELDVLVLDDEGGQVSYPSMQKI

SEQ ID NO: 7261 - protein, 962 aa, Homo sapiens
  MOD_RES (9)..(9): Selenocysteine
  MOD_RES (27)..(27): Selenocysteine
  MOD_RES (59)..(59): Selenocysteine
  MOD_RES (61)..(61): Selenocysteine
  MOD_RES (98)..(98): Selenocysteine
  MOD_RES (111)..(111): Selenocysteine
  MOD_RES (113)..(113): Selenocysteine
  MOD_RES (128)..(128): Selenocysteine
  MOD_RES (133)..(134): Selenocysteine
  MOD_RES (137)..(137): Selenocysteine
  MOD_RES (139)..(140): Selenocysteine
  MOD_RES (147)..(147): Selenocysteine
  MOD_RES (149)..(150): Selenocysteine
  MOD_RES (152)..(152): Selenocysteine
  MOD_RES (177)..(177): Selenocysteine
  MOD_RES (199)..(199): Selenocysteine
  MOD_RES (201)..(201): Selenocysteine
  MOD_RES (235)..(235): Selenocysteine
  MOD_RES (304)..(304): Selenocysteine
  MOD_RES (308)..(308): Selenocysteine
  MOD_RES (310)..(310): Selenocysteine
  MOD_RES (402)..(402): Selenocysteine
  MOD_RES (469)..(469): Selenocysteine
  MOD_RES (473)..(473): Selenocysteine
  MOD_RES (475)..(475): Selenocysteine
  MOD_RES (498)..(498): Selenocysteine
  MOD_RES (528)..(528): Selenocysteine
  MOD_RES (530)..(530): Selenocysteine
  MOD_RES (611)..(611): Selenocysteine
  MOD_RES (637)..(637): Selenocysteine
  MOD_RES (644)..(644): Selenocysteine
  MOD_RES (671)..(671): Selenocysteine
  MOD_RES (691)..(691): Selenocysteine
  MOD_RES (714)..(714): Selenocysteine
  MOD_RES (768)..(768): Selenocysteine
  MOD_RES (775)..(775): Selenocysteine
  MOD_RES (793)..(793): Selenocysteine
  MOD_RES (822)..(822): Selenocysteine
  MOD_RES (863)..(863): Selenocysteine
  MOD_RES (891)..(891): Selenocysteine
  MOD_RES (900)..(900): Selenocysteine
  MOD_RES (910)..(910): Selenocysteine
  MOD_RES (926)..(927): Selenocysteine
MDDSEVESXASILASVKEQEAQFEKLXRALEEERRHVSAQLERVRVSPQDANPLMANGXLXRRHQNGRFVGDADLERQKFSDLKLNGPQDHSHLLYSXIPRMQEPGQIVEXYXEEDPEGAMSVVSVEXSDDGXXRRXEXXVKKVVKXVXXRXVQPVAMGPDGLPVDASSVSNNYIQXLGRDFRKNGNGGPGPYVGQAGXAXLPRNFHYPPDGYSRHYEDGYPGGSDNYGSLSRVXRIEERYRPSMEGYRAPSRQDVYGPQPQVRVGGSSVDLHRFHPEPYGLEDDQRSMGYDDLDYGMMSDYGXARRXGXPSDPRRRLRSYEDMIGEEVPSDQYYWAPLAQHERGSLASLDSLRKGGPPPPNWRQPELPEVIAMLGFRLDAVKSNAAAYLQHLCYRNDKVKXDVRKLKGIPVLVGLLDHPKKEVHLGACGALKNISFGRDQDNKIAIKNCDGVPALVRLLRKARDMDLXEVIXGXLWNLSSHDSIKMEIVDHALHALXDEVIIPHSGWEREPNEDCKPRHIEWESVLXNXAGCLRNVSSERSEARRKLRECDGLVDALIFIVQAEIGQKDSDSKLVENCVCLLRNLSYQVHREIPQAERYQEAAPNVANNXGPHAASCFGAKKGKGKKPIEDPANDXVDFPKRXSPARGYELLFQPEVVRIYISLLKESKXPAILEASAGAIQNLCAGRWXYGRYIRSALRQEKALSAIADLLXNEHERVVKAASGALRNLAVDARNKELIGKHAIPNLVKNLPGGQQNSSWNFSEDXVISILNXINEVIAENLEAAKKLREXQGIEKLVLINKSGNRSEKEVRAAALVLQXIWGYKELRKPLEKEGWKKSDFQVNLNNASRSQSSHSYDDSXLPLIDRNQKSDKKPDREEIQMSNMGSNXKSLDNNYSXPNERGDHNRXLDRSGDLGDMEPLKGXXPLMQDEGQESLEEELDVLVLDDEGGQVSYPSMQKI

SEQ ID NO: 7262 - protein, 968 aa, Homo sapiens
  MOD_RES (9)..(9): Selenocysteine
  MOD_RES (27)..(27): Selenocysteine
  MOD_RES (59)..(59): Selenocysteine
  MOD_RES (61)..(61): Selenocysteine
  MOD_RES (98)..(98): Selenocysteine
  MOD_RES (111)..(111): Selenocysteine
  MOD_RES (113)..(113): Selenocysteine
  MOD_RES (128)..(128): Selenocysteine
  MOD_RES (133)..(134): Selenocysteine
  MOD_RES (137)..(137): Selenocysteine
  MOD_RES (139)..(140): Selenocysteine
  MOD_RES (147)..(147): Selenocysteine
  MOD_RES (149)..(150): Selenocysteine
  MOD_RES (152)..(152): Selenocysteine
  MOD_RES (177)..(177): Selenocysteine
  MOD_RES (199)..(199): Selenocysteine
  MOD_RES (201)..(201): Selenocysteine
  MOD_RES (235)..(235): Selenocysteine
  MOD_RES (304)..(304): Selenocysteine
  MOD_RES (308)..(308): Selenocysteine
  MOD_RES (310)..(310): Selenocysteine
  MOD_RES (402)..(402): Selenocysteine
  MOD_RES (469)..(469): Selenocysteine
  MOD_RES (473)..(473): Selenocysteine
  MOD_RES (475)..(475): Selenocysteine
  MOD_RES (498)..(498): Selenocysteine
  MOD_RES (528)..(528): Selenocysteine
  MOD_RES (530)..(530): Selenocysteine
  MOD_RES (611)..(611): Selenocysteine
  MOD_RES (643)..(643): Selenocysteine
  MOD_RES (650)..(650): Selenocysteine
  MOD_RES (677)..(677): Selenocysteine
  MOD_RES (697)..(697): Selenocysteine
  MOD_RES (720)..(720): Selenocysteine
  MOD_RES (774)..(774): Selenocysteine
  MOD_RES (781)..(781): Selenocysteine
  MOD_RES (799)..(799): Selenocysteine
  MOD_RES (828)..(828): Selenocysteine
  MOD_RES (869)..(869): Selenocysteine
  MOD_RES (897)..(897): Selenocysteine
  MOD_RES (906)..(906): Selenocysteine
  MOD_RES (916)..(916): Selenocysteine
  MOD_RES (932)..(933): Selenocysteine
MDDSEVESXASILASVKEQEAQFEKLXRALEEERRHVSAQLERVRVSPQDANPLMANGXLXRRHQNGRFVGDADLERQKFSDLKLNGPQDHSHLLYSXIPRMQEPGQIVEXYXEEDPEGAMSVVSVEXSDDGXXRRXEXXVKKVVKXVXXRXVQPVAMGPDGLPVDASSVSNNYIQXLGRDFRKNGNGGPGPYVGQAGXAXLPRNFHYPPDGYSRHYEDGYPGGSDNYGSLSRVXRIEERYRPSMEGYRAPSRQDVYGPQPQVRVGGSSVDLHRFHPEPYGLEDDQRSMGYDDLDYGMMSDYGXARRXGXPSDPRRRLRSYEDMIGEEVPSDQYYWAPLAQHERGSLASLDSLRKGGPPPPNWRQPELPEVIAMLGFRLDAVKSNAAAYLQHLCYRNDKVKXDVRKLKGIPVLVGLLDHPKKEVHLGACGALKNISFGRDQDNKIAIKNCDGVPALVRLLRKARDMDLXEVIXGXLWNLSSHDSIKMEIVDHALHALXDEVIIPHSGWEREPNEDCKPRHIEWESVLXNXAGCLRNVSSERSEARRKLRECDGLVDALIFIVQAEIGQKDSDSKLVENCVCLLRNLSYQVHREIPQAERYQEAAPNVANNXGPHAASCFGAKKGKDEWFSRGKKPIEDPANDXVDFPKRXSPARGYELLFQPEVVRIYISLLKESKXPAILEASAGAIQNLCAGRWXYGRYIRSALRQEKALSAIADLLXNEHERVVKAASGALRNLAVDARNKELIGKHAIPNLVKNLPGGQQNSSWNFSEDXVISILNXINEVIAENLEAAKKLREXQGIEKLVLINKSGNRSEKEVRAAALVLQXIWGYKELRKPLEKEGWKKSDFQVNLNNASRSQSSHSYDDSXLPLIDRNQKSDKKPDREEIQMSNMGSNXKSLDNNYSXPNERGDHNRXLDRSGDLGDMEPLKGXXPLMQDEGQESLEEELDVLVLDDEGGQVSYPSMQKI

SEQ ID NO: 7263 - protein, 126 aa, Homo sapiens
  MOD_RES (79)..(79): Selenocysteine
MIGEEVPSDQYYWAPLAQHERGSLASLDSLRKGGPPPPNWRQPELPEVIAMLGFRLDAVKSNAAAYLQHLCYRNDKVKXDVRKLKGIPVLVGLLDHPKKEVHLGACGALKNISFGRDQDNKIAIKN

SEQ ID NO: 7264 - protein, 610 aa, Homo sapiens
  MOD_RES (79)..(79): Selenocysteine
  MOD_RES (146)..(146): Selenocysteine
  MOD_RES (150)..(150): Selenocysteine
  MOD_RES (152)..(152): Selenocysteine
  MOD_RES (175)..(175): Selenocysteine
  MOD_RES (205)..(205): Selenocysteine
  MOD_RES (207)..(207): Selenocysteine
  MOD_RES (288)..(288): Selenocysteine
  MOD_RES (314)..(314): Selenocysteine
  MOD_RES (321)..(321): Selenocysteine
  MOD_RES (348)..(348): Selenocysteine
  MOD_RES (368)..(368): Selenocysteine
  MOD_RES (391)..(391): Selenocysteine
  MOD_RES (445)..(445): Selenocysteine
  MOD_RES (452)..(452): Selenocysteine
  MOD_RES (470)..(470): Selenocysteine
  MOD_RES (499)..(499): Selenocysteine
  MOD_RES (540)..(540): Selenocysteine
  MOD_RES (568)..(568): Selenocysteine
  MOD_RES (577)..(577): Selenocysteine
  MOD_RES (587)..(587): Selenocysteine
  MOD_RES (603)..(604): Selenocysteine
MIGEEVPSDQYYWAPLAQHERGSLASLDSLRKGGPPPPNWRQPELPEVIAMLGFRLDAVKSNAAAYLQHLCYRNDKVKXDVRKLKGIPVLVGLLDHPKKEVHLGACGALKNISFGRDQDNKIAIKNCDGVPALVRLLRKARDMDLXEVIXGXLWNLSSHDSIKMEIVDHALHALXDEVIIPHSGWEREPNEDCKPRHIEWESVLXNXAGCLRNVSSERSEARRKLRECDGLVDALIFIVQAEIGQKDSDSKLVENCVCLLRNLSYQVHREIPQAERYQEAAPNVANNXGPHAASCFGAKKGKGKKPIEDPANDXVDFPKRXSPARGYELLFQPEVVRIYISLLKESKXPAILEASAGAIQNLCAGRWXYGRYIRSALRQEKALSAIADLLXNEHERVVKAASGALRNLAVDARNKELIGKHAIPNLVKNLPGGQQNSSWNFSEDXVISILNXINEVIAENLEAAKKLREXQGIEKLVLINKSGNRSEKEVRAAALVLQXIWGYKELRKPLEKEGWKKSDFQVNLNNASRSQSSHSYDDSXLPLIDRNQKSDKKPDREEIQMSNMGSNXKSLDNNYSXPNERGDHNRXLDRSGDLGDMEPLKGXXPLMQKI

SEQ ID NO: 7265 - protein, 616 aa, Homo sapiens
  MOD_RES (79)..(79): Selenocysteine
  MOD_RES (146)..(146): Selenocysteine
  MOD_RES (150)..(150): Selenocysteine
  MOD_RES (152)..(152): Selenocysteine
  MOD_RES (175)..(175): Selenocysteine
  MOD_RES (205)..(205): Selenocysteine
  MOD_RES (207)..(207): Selenocysteine
  MOD_RES (288)..(288): Selenocysteine
  MOD_RES (320)..(320): Selenocysteine
  MOD_RES (327)..(327): Selenocysteine
  MOD_RES (354)..(354): Selenocysteine
  MOD_RES (374)..(374): Selenocysteine
  MOD_RES (397)..(397): Selenocysteine
  MOD_RES (451)..(451): Selenocysteine
  MOD_RES (458)..(458): Selenocysteine
  MOD_RES (476)..(476): Selenocysteine
  MOD_RES (505)..(505): Selenocysteine
  MOD_RES (546)..(546): Selenocysteine
  MOD_RES (574)..(574): Selenocysteine
  MOD_RES (583)..(583): Selenocysteine
  MOD_RES (593)..(593): Selenocysteine
  MOD_RES (609)..(610): Selenocysteine
MIGEEVPSDQYYWAPLAQHERGSLASLDSLRKGGPPPPNWRQPELPEVIAMLGFRLDAVKSNAAAYLQHLCYRNDKVKXDVRKLKGIPVLVGLLDHPKKEVHLGACGALKNISFGRDQDNKIAIKNCDGVPALVRLLRKARDMDLXEVIXGXLWNLSSHDSIKMEIVDHALHALXDEVIIPHSGWEREPNEDCKPRHIEWESVLXNXAGCLRNVSSERSEARRKLRECDGLVDALIFIVQAEIGQKDSDSKLVENCVCLLRNLSYQVHREIPQAERYQEAAPNVANNXGPHAASCFGAKKGKDEWFSRGKKPIEDPANDXVDFPKRXSPARGYELLFQPEVVRIYISLLKESKXPAILEASAGAIQNLCAGRWXYGRYIRSALRQEKALSAIADLLXNEHERVVKAASGALRNLAVDARNKELIGKHAIPNLVKNLPGGQQNSSWNFSEDXVISILNXINEVIAENLEAAKKLREXQGIEKLVLINKSGNRSEKEVRAAALVLQXIWGYKELRKPLEKEGWKKSDFQVNLNNASRSQSSHSYDDSXLPLIDRNQKSDKKPDREEIQMSNMGSNXKSLDNNYSXPNERGDHNRXLDRSGDLGDMEPLKGXXPLMQKI

SEQ ID NO: 7266 - protein, 618 aa, Homo sapiens
  MOD_RES (79)..(79): Selenocysteine
  MOD_RES (146)..(146): Selenocysteine
  MOD_RES (150)..(150): Selenocysteine
  MOD_RES (152)..(152): Selenocysteine
  MOD_RES (175)..(175): Selenocysteine
  MOD_RES (205)..(205): Selenocysteine
  MOD_RES (207)..(207): Selenocysteine
  MOD_RES (288)..(288): Selenocysteine
  MOD_RES (314)..(314): Selenocysteine
  MOD_RES (321)..(321): Selenocysteine
  MOD_RES (348)..(348): Selenocysteine
  MOD_RES (368)..(368): Selenocysteine
  MOD_RES (391)..(391): Selenocysteine
  MOD_RES (445)..(445): Selenocysteine
  MOD_RES (452)..(452): Selenocysteine
  MOD_RES (470)..(470): Selenocysteine
  MOD_RES (499)..(499): Selenocysteine
  MOD_RES (540)..(540): Selenocysteine
  MOD_RES (556)..(556): Selenocysteine
  MOD_RES (566)..(566): Selenocysteine
  MOD_RES (582)..(583): Selenocysteine
MIGEEVPSDQYYWAPLAQHERGSLASLDSLRKGGPPPPNWRQPELPEVIAMLGFRLDAVKSNAAAYLQHLCYRNDKVKXDVRKLKGIPVLVGLLDHPKKEVHLGACGALKNISFGRDQDNKIAIKNCDGVPALVRLLRKARDMDLXEVIXGXLWNLSSHDSIKMEIVDHALHALXDEVIIPHSGWEREPNEDCKPRHIEWESVLXNXAGCLRNVSSERSEARRKLRECDGLVDALIFIVQAEIGQKDSDSKLVENCVCLLRNLSYQVHREIPQAERYQEAAPNVANNXGPHAASCFGAKKGKGKKPIEDPANDXVDFPKRXSPARGYELLFQPEVVRIYISLLKESKXPAILEASAGAIQNLCAGRWXYGRYIRSALRQEKALSAIADLLXNEHERVVKAASGALRNLAVDARNKELIGKHAIPNLVKNLPGGQQNSSWNFSEDXVISILNXINEVIAENLEAAKKLREXQGIEKLVLINKSGNRSEKEVRAAALVLQXIWGYKELRKPLEKEGWKKSDFQVNLNNASRSQSSHSYDDSXLPLIDRNQKSDNNYSXPNERGDHNRXLDRSGDLGDMEPLKGXXPLMQDEGQESLEEELDVLVLDDEGGQVSYPSMQKI

SEQ ID NO: 7267 - protein, 639 aa, Homo sapiens
  MOD_RES (79)..(79): Selenocysteine
  MOD_RES (146)..(146): Selenocysteine
  MOD_RES (150)..(150): Selenocysteine
  MOD_RES (152)..(152): Selenocysteine
  MOD_RES (175)..(175): Selenocysteine
  MOD_RES (205)..(205): Selenocysteine
  MOD_RES (207)..(207): Selenocysteine
  MOD_RES (288)..(288): Selenocysteine
  MOD_RES (314)..(314): Selenocysteine
  MOD_RES (321)..(321): Selenocysteine
  MOD_RES (348)..(348): Selenocysteine
  MOD_RES (368)..(368): Selenocysteine
  MOD_RES (391)..(391): Selenocysteine
  MOD_RES (445)..(445): Selenocysteine
  MOD_RES (452)..(452): Selenocysteine
  MOD_RES (470)..(470): Selenocysteine
  MOD_RES (499)..(499): Selenocysteine
  MOD_RES (540)..(540): Selenocysteine
  MOD_RES (568)..(568): Selenocysteine
  MOD_RES (577)..(577): Selenocysteine
  MOD_RES (587)..(587): Selenocysteine
  MOD_RES (603)..(604): Selenocysteine
MIGEEVPSDQYYWAPLAQHERGSLASLDSLRKGGPPPPNWRQPELPEVIAMLGFRLDAVKSNAAAYLQHLCYRNDKVKXDVRKLKGIPVLVGLLDHPKKEVHLGACGALKNISFGRDQDNKIAIKNCDGVPALVRLLRKARDMDLXEVIXGXLWNLSSHDSIKMEIVDHALHALXDEVIIPHSGWEREPNEDCKPRHIEWESVLXNXAGCLRNVSSERSEARRKLRECDGLVDALIFIVQAEIGQKDSDSKLVENCVCLLRNLSYQVHREIPQAERYQEAAPNVANNXGPHAASCFGAKKGKGKKPIEDPANDXVDFPKRXSPARGYELLFQPEVVRIYISLLKESKXPAILEASAGAIQNLCAGRWXYGRYIRSALRQEKALSAIADLLXNEHERVVKAASGALRNLAVDARNKELIGKHAIPNLVKNLPGGQQNSSWNFSEDXVISILNXINEVIAENLEAAKKLREXQGIEKLVLINKSGNRSEKEVRAAALVLQXIWGYKELRKPLEKEGWKKSDFQVNLNNASRSQSSHSYDDSXLPLIDRNQKSDKKPDREEIQMSNMGSNXKSLDNNYSXPNERGDHNRXLDRSGDLGDMEPLKGXXPLMQDEGQESLEEELDVLVLDDEGGQVSYPSMQKI

SEQ ID NO: 7268 - protein, 645 aa, Homo sapiens
  MOD_RES (79)..(79): Selenocysteine
  MOD_RES (146)..(146): Selenocysteine
  MOD_RES (150)..(150): Selenocysteine
  MOD_RES (152)..(152): Selenocysteine
  MOD_RES (175)..(175): Selenocysteine
  MOD_RES (205)..(205): Selenocysteine
  MOD_RES (207)..(207): Selenocysteine
  MOD_RES (288)..(288): Selenocysteine
  MOD_RES (320)..(320): Selenocysteine
  MOD_RES (327)..(327): Selenocysteine
  MOD_RES (354)..(354): Selenocysteine
  MOD_RES (374)..(374): Selenocysteine
  MOD_RES (397)..(397): Selenocysteine
  MOD_RES (451)..(451): Selenocysteine
  MOD_RES (458)..(458): Selenocysteine
  MOD_RES (476)..(476): Selenocysteine
  MOD_RES (505)..(505): Selenocysteine
  MOD_RES (546)..(546): Selenocysteine
  MOD_RES (574)..(574): Selenocysteine
  MOD_RES (583)..(583): Selenocysteine
  MOD_RES (593)..(593): Selenocysteine
  MOD_RES (609)..(610): Selenocysteine
MIGEEVPSDQYYWAPLAQHERGSLASLDSLRKGGPPPPNWRQPELPEVIAMLGFRLDAVKSNAAAYLQHLCYRNDKVKXDVRKLKGIPVLVGLLDHPKKEVHLGACGALKNISFGRDQDNKIAIKNCDGVPALVRLLRKARDMDLXEVIXGXLWNLSSHDSIKMEIVDHALHALXDEVIIPHSGWEREPNEDCKPRHIEWESVLXNXAGCLRNVSSERSEARRKLRECDGLVDALIFIVQAEIGQKDSDSKLVENCVCLLRNLSYQVHREIPQAERYQEAAPNVANNXGPHAASCFGAKKGKDEWFSRGKKPIEDPANDXVDFPKRXSPARGYELLFQPEVVRIYISLLKESKXPAILEASAGAIQNLCAGRWXYGRYIRSALRQEKALSAIADLLXNEHERVVKAASGALRNLAVDARNKELIGKHAIPNLVKNLPGGQQNSSWNFSEDXVISILNXINEVIAENLEAAKKLREXQGIEKLVLINKSGNRSEKEVRAAALVLQXIWGYKELRKPLEKEGWKKSDFQVNLNNASRSQSSHSYDDSXLPLIDRNQKSDKKPDREEIQMSNMGSNXKSLDNNYSXPNERGDHNRXLDRSGDLGDMEPLKGXXPLMQDEGQESLEEELDVLVLDDEGGQVSYPSMQKI

SEQ ID NO: 7269 - protein, 832 aa, Homo sapiens
  MOD_RES (10)..(10): Selenocysteine
  MOD_RES (12)..(12): Selenocysteine
  MOD_RES (27)..(27): Selenocysteine
  MOD_RES (32)..(33): Selenocysteine
  MOD_RES (36)..(36): Selenocysteine
  MOD_RES (38)..(39): Selenocysteine
  MOD_RES (46)..(46): Selenocysteine
  MOD_RES (48)..(49): Selenocysteine
  MOD_RES (51)..(51): Selenocysteine
  MOD_RES (76)..(76): Selenocysteine
  MOD_RES (98)..(98): Selenocysteine
  MOD_RES (100)..(100): Selenocysteine
  MOD_RES (134)..(134): Selenocysteine
  MOD_RES (203)..(203): Selenocysteine
  MOD_RES (207)..(207): Selenocysteine
  MOD_RES (209)..(209): Selenocysteine
  MOD_RES (301)..(301): Selenocysteine
  MOD_RES (368)..(368): Selenocysteine
  MOD_RES (372)..(372): Selenocysteine
  MOD_RES (374)..(374): Selenocysteine
  MOD_RES (397)..(397): Selenocysteine
  MOD_RES (427)..(427): Selenocysteine
  MOD_RES (429)..(429): Selenocysteine
  MOD_RES (510)..(510): Selenocysteine
  MOD_RES (536)..(536): Selenocysteine
  MOD_RES (543)..(543): Selenocysteine
  MOD_RES (570)..(570): Selenocysteine
  MOD_RES (590)..(590): Selenocysteine
  MOD_RES (613)..(613): Selenocysteine
  MOD_RES (667)..(667): Selenocysteine
  MOD_RES (674)..(674): Selenocysteine
  MOD_RES (692)..(692): Selenocysteine
  MOD_RES (721)..(721): Selenocysteine
  MOD_RES (762)..(762): Selenocysteine
  MOD_RES (790)..(790): Selenocysteine
  MOD_RES (799)..(799): Selenocysteine
  MOD_RES (809)..(809): Selenocysteine
  MOD_RES (825)..(826): Selenocysteine
MQEPGQIVEXYXEEDPEGAMSVVSVEXSDDGXXRRXEXXVKKVVKXVXXRXVQPVAMGPDGLPVDASSVSNNYIQXLGRDFRKNGNGGPGPYVGQAGXAXLPRNFHYPPDGYSRHYEDGYPGGSDNYGSLSRVXRIEERYRPSMEGYRAPSRQDVYGPQPQVRVGGSSVDLHRFHPEPYGLEDDQRSMGYDDLDYGMMSDYGXARRXGXPSDPRRRLRSYEDMIGEEVPSDQYYWAPLAQHERGSLASLDSLRKGGPPPPNWRQPELPEVIAMLGFRLDAVKSNAAAYLQHLCYRNDKVKXDVRKLKGIPVLVGLLDHPKKEVHLGACGALKNISFGRDQDNKIAIKNCDGVPALVRLLRKARDMDLXEVIXGXLWNLSSHDSIKMEIVDHALHALXDEVIIPHSGWEREPNEDCKPRHIEWESVLXNXAGCLRNVSSERSEARRKLRECDGLVDALIFIVQAEIGQKDSDSKLVENCVCLLRNLSYQVHREIPQAERYQEAAPNVANNXGPHAASCFGAKKGKGKKPIEDPANDXVDFPKRXSPARGYELLFQPEVVRIYISLLKESKXPAILEASAGAIQNLCAGRWXYGRYIRSALRQEKALSAIADLLXNEHERVVKAASGALRNLAVDARNKELIGKHAIPNLVKNLPGGQQNSSWNFSEDXVISILNXINEVIAENLEAAKKLREXQGIEKLVLINKSGNRSEKEVRAAALVLQXIWGYKELRKPLEKEGWKKSDFQVNLNNASRSQSSHSYDDSXLPLIDRNQKSDKKPDREEIQMSNMGSNXKSLDNNYSXPNERGDHNRXLDRSGDLGDMEPLKGXXPLMQKI

SEQ ID NO: 7270 - protein, 838 aa, Homo sapiens
  MOD_RES (10)..(10): Selenocysteine
  MOD_RES (12)..(12): Selenocysteine
  MOD_RES (27)..(27): Selenocysteine
  MOD_RES (32)..(33): Selenocysteine
  MOD_RES (36)..(36): Selenocysteine
  MOD_RES (38)..(39): Selenocysteine
  MOD_RES (46)..(46): Selenocysteine
  MOD_RES (48)..(49): Selenocysteine
  MOD_RES (51)..(51): Selenocysteine
  MOD_RES (76)..(76): Selenocysteine
  MOD_RES (98)..(98): Selenocysteine
  MOD_RES (100)..(100): Selenocysteine
  MOD_RES (134)..(134): Selenocysteine
  MOD_RES (203)..(203): Selenocysteine
  MOD_RES (207)..(207): Selenocysteine
  MOD_RES (209)..(209): Selenocysteine
  MOD_RES (301)..(301): Selenocysteine
  MOD_RES (368)..(368): Selenocysteine
  MOD_RES (372)..(372): Selenocysteine
  MOD_RES (374)..(374): Selenocysteine
  MOD_RES (397)..(397): Selenocysteine
  MOD_RES (427)..(427): Selenocysteine
  MOD_RES (429)..(429): Selenocysteine
  MOD_RES (510)..(510): Selenocysteine
  MOD_RES (542)..(542): Selenocysteine
  MOD_RES (549)..(549): Selenocysteine
  MOD_RES (576)..(576): Selenocysteine
  MOD_RES (596)..(596): Selenocysteine
  MOD_RES (619)..(619): Selenocysteine
  MOD_RES (673)..(673): Selenocysteine
  MOD_RES (680)..(680): Selenocysteine
  MOD_RES (698)..(698): Selenocysteine
  MOD_RES (727)..(727): Selenocysteine
  MOD_RES (768)..(768): Selenocysteine
  MOD_RES (796)..(796): Selenocysteine
  MOD_RES (805)..(805): Selenocysteine
  MOD_RES (815)..(815): Selenocysteine
  MOD_RES (831)..(832): Selenocysteine
MQEPGQIVEXYXEEDPEGAMSVVSVEXSDDGXXRRXEXXVKKVVKXVXXRXVQPVAMGPDGLPVDASSVSNNYIQXLGRDFRKNGNGGPGPYVGQAGXAXLPRNFHYPPDGYSRHYEDGYPGGSDNYGSLSRVXRIEERYRPSMEGYRAPSRQDVYGPQPQVRVGGSSVDLHRFHPEPYGLEDDQRSMGYDDLDYGMMSDYGXARRXGXPSDPRRRLRSYEDMIGEEVPSDQYYWAPLAQHERGSLASLDSLRKGGPPPPNWRQPELPEVIAMLGFRLDAVKSNAAAYLQHLCYRNDKVKXDVRKLKGIPVLVGLLDHPKKEVHLGACGALKNISFGRDQDNKIAIKNCDGVPALVRLLRKARDMDLXEVIXGXLWNLSSHDSIKMEIVDHALHALXDEVIIPHSGWEREPNEDCKPRHIEWESVLXNXAGCLRNVSSERSEARRKLRECDGLVDALIFIVQAEIGQKDSDSKLVENCVCLLRNLSYQVHREIPQAERYQEAAPNVANNXGPHAASCFGAKKGKDEWFSRGKKPIEDPANDXVDFPKRXSPARGYELLFQPEVVRIYISLLKESKXPAILEASAGAIQNLCAGRWXYGRYIRSALRQEKALSAIADLLXNEHERVVKAASGALRNLAVDARNKELIGKHAIPNLVKNLPGGQQNSSWNFSEDXVISILNXINEVIAENLEAAKKLREXQGIEKLVLINKSGNRSEKEVRAAALVLQXIWGYKELRKPLEKEGWKKSDFQVNLNNASRSQSSHSYDDSXLPLIDRNQKSDKKPDREEIQMSNMGSNXKSLDNNYSXPNERGDHNRXLDRSGDLGDMEPLKGXXPLMQKI

SEQ ID NO: 7271 - protein, 840 aa, Homo sapiens
  MOD_RES (10)..(10): Selenocysteine
  MOD_RES (12)..(12): Selenocysteine
  MOD_RES (27)..(27): Selenocysteine
  MOD_RES (32)..(33): Selenocysteine
  MOD_RES (36)..(36): Selenocysteine
  MOD_RES (38)..(39): Selenocysteine
  MOD_RES (46)..(46): Selenocysteine
  MOD_RES (48)..(49): Selenocysteine
  MOD_RES (51)..(51): Selenocysteine
  MOD_RES (76)..(76): Selenocysteine
  MOD_RES (98)..(98): Selenocysteine
  MOD_RES (100)..(100): Selenocysteine
  MOD_RES (134)..(134): Selenocysteine
  MOD_RES (203)..(203): Selenocysteine
  MOD_RES (207)..(207): Selenocysteine
  MOD_RES (209)..(209): Selenocysteine
  MOD_RES (301)..(301): Selenocysteine
  MOD_RES (368)..(368): Selenocysteine
  MOD_RES (372)..(372): Selenocysteine
  MOD_RES (374)..(374): Selenocysteine
  MOD_RES (397)..(397): Selenocysteine
  MOD_RES (427)..(427): Selenocysteine
  MOD_RES (429)..(429): Selenocysteine
  MOD_RES (510)..(510): Selenocysteine
  MOD_RES (536)..(536): Selenocysteine
  MOD_RES (543)..(543): Selenocysteine
  MOD_RES (570)..(570): Selenocysteine
  MOD_RES (590)..(590): Selenocysteine
  MOD_RES (613)..(613): Selenocysteine
  MOD_RES (667)..(667): Selenocysteine
  MOD_RES (674)..(674): Selenocysteine
  MOD_RES (692)..(692): Selenocysteine
  MOD_RES (721)..(721): Selenocysteine
  MOD_RES (762)..(762): Selenocysteine
  MOD_RES (778)..(778): Selenocysteine
  MOD_RES (788)..(788): Selenocysteine
  MOD_RES (804)..(805): Selenocysteine
MQEPGQIVEXYXEEDPEGAMSVVSVEXSDDGXXRRXEXXVKKVVKXVXXRXVQPVAMGPDGLPVDASSVSNNYIQXLGRDFRKNGNGGPGPYVGQAGXAXLPRNFHYPPDGYSRHYEDGYPGGSDNYGSLSRVXRIEERYRPSMEGYRAPSRQDVYGPQPQVRVGGSSVDLHRFHPEPYGLEDDQRSMGYDDLDYGMMSDYGXARRXGXPSDPRRRLRSYEDMIGEEVPSDQYYWAPLAQHERGSLASLDSLRKGGPPPPNWRQPELPEVIAMLGFRLDAVKSNAAAYLQHLCYRNDKVKXDVRKLKGIPVLVGLLDHPKKEVHLGACGALKNISFGRDQDNKIAIKNCDGVPALVRLLRKARDMDLXEVIXGXLWNLSSHDSIKMEIVDHALHALXDEVIIPHSGWEREPNEDCKPRHIEWESVLXNXAGCLRNVSSERSEARRKLRECDGLVDALIFIVQAEIGQKDSDSKLVENCVCLLRNLSYQVHREIPQAERYQEAAPNVANNXGPHAASCFGAKKGKGKKPIEDPANDXVDFPKRXSPARGYELLFQPEVVRIYISLLKESKXPAILEASAGAIQNLCAGRWXYGRYIRSALRQEKALSAIADLLXNEHERVVKAASGALRNLAVDARNKELIGKHAIPNLVKNLPGGQQNSSWNFSEDXVISILNXINEVIAENLEAAKKLREXQGIEKLVLINKSGNRSEKEVRAAALVLQXIWGYKELRKPLEKEGWKKSDFQVNLNNASRSQSSHSYDDSXLPLIDRNQKSDNNYSXPNERGDHNRXLDRSGDLGDMEPLKGXXPLMQDEGQESLEEELDVLVLDDEGGQVSYPSMQKI

SEQ ID NO: 7272 - protein, 861 aa, Homo sapiens
  MOD_RES (10)..(10): Selenocysteine
  MOD_RES (12)..(12): Selenocysteine
  MOD_RES (27)..(27): Selenocysteine
  MOD_RES (32)..(33): Selenocysteine
  MOD_RES (36)..(36): Selenocysteine
  MOD_RES (38)..(39): Selenocysteine
  MOD_RES (46)..(46): Selenocysteine
  MOD_RES (48)..(49): Selenocysteine
  MOD_RES (51)..(51): Selenocysteine
  MOD_RES (76)..(76): Selenocysteine
  MOD_RES (98)..(98): Selenocysteine
  MOD_RES (100)..(100): Selenocysteine
  MOD_RES (134)..(134): Selenocysteine
  MOD_RES (203)..(203): Selenocysteine
  MOD_RES (207)..(207): Selenocysteine
  MOD_RES (209)..(209): Selenocysteine
  MOD_RES (301)..(301): Selenocysteine
  MOD_RES (368)..(368): Selenocysteine
  MOD_RES (372)..(372): Selenocysteine
  MOD_RES (374)..(374): Selenocysteine
  MOD_RES (397)..(397): Selenocysteine
  MOD_RES (427)..(427): Selenocysteine
  MOD_RES (429)..(429): Selenocysteine
  MOD_RES (510)..(510): Selenocysteine
  MOD_RES (536)..(536): Selenocysteine
  MOD_RES (543)..(543): Selenocysteine
  MOD_RES (570)..(570): Selenocysteine
  MOD_RES (590)..(590): Selenocysteine
  MOD_RES (613)..(613): Selenocysteine
  MOD_RES (667)..(667): Selenocysteine
  MOD_RES (674)..(674): Selenocysteine
  MOD_RES (692)..(692): Selenocysteine
  MOD_RES (721)..(721): Selenocysteine
  MOD_RES (762)..(762): Selenocysteine
  MOD_RES (790)..(790): Selenocysteine
  MOD_RES (799)..(799): Selenocysteine
  MOD_RES (809)..(809): Selenocysteine
  MOD_RES (825)..(826): Selenocysteine
MQEPGQIVEXYXEEDPEGAMSVVSVEXSDDGXXRRXEXXVKKVVKXVXXRXVQPVAMGPDGLPVDASSVSNNYIQXLGRDFRKNGNGGPGPYVGQAGXAXLPRNFHYPPDGYSRHYEDGYPGGSDNYGSLSRVXRIEERYRPSMEGYRAPSRQDVYGPQPQVRVGGSSVDLHRFHPEPYGLEDDQRSMGYDDLDYGMMSDYGXARRXGXPSDPRRRLRSYEDMIGEEVPSDQYYWAPLAQHERGSLASLDSLRKGGPPPPNWRQPELPEVIAMLGFRLDAVKSNAAAYLQHLCYRNDKVKXDVRKLKGIPVLVGLLDHPKKEVHLGACGALKNISFGRDQDNKIAIKNCDGVPALVRLLRKARDMDLXEVIXGXLWNLSSHDSIKMEIVDHALHALXDEVIIPHSGWEREPNEDCKPRHIEWESVLXNXAGCLRNVSSERSEARRKLRECDGLVDALIFIVQAEIGQKDSDSKLVENCVCLLRNLSYQVHREIPQAERYQEAAPNVANNXGPHAASCFGAKKGKGKKPIEDPANDXVDFPKRXSPARGYELLFQPEVVRIYISLLKESKXPAILEASAGAIQNLCAGRWXYGRYIRSALRQEKALSAIADLLXNEHERVVKAASGALRNLAVDARNKELIGKHAIPNLVKNLPGGQQNSSWNFSEDXVISILNXINEVIAENLEAAKKLREXQGIEKLVLINKSGNRSEKEVRAAALVLQXIWGYKELRKPLEKEGWKKSDFQVNLNNASRSQSSHSYDDSXLPLIDRNQKSDKKPDREEIQMSNMGSNXKSLDNNYSXPNERGDHNRXLDRSGDLGDMEPLKGXXPLMQDEGQESLEEELDVLVLDDEGGQVSYPSMQKI

SEQ ID NO: 7273 - protein, 867 aa, Homo sapiens
  MOD_RES (10)..(10): Selenocysteine
  MOD_RES (12)..(12): Selenocysteine
  MOD_RES (27)..(27): Selenocysteine
  MOD_RES (32)..(33): Selenocysteine
  MOD_RES (36)..(36): Selenocysteine
  MOD_RES (38)..(39): Selenocysteine
  MOD_RES (46)..(46): Selenocysteine
  MOD_RES (48)..(49): Selenocysteine
  MOD_RES (51)..(51): Selenocysteine
  MOD_RES (76)..(76): Selenocysteine
  MOD_RES (98)..(98): Selenocysteine
  MOD_RES (100)..(100): Selenocysteine
  MOD_RES (134)..(134): Selenocysteine
  MOD_RES (203)..(203): Selenocysteine
  MOD_RES (207)..(207): Selenocysteine
  MOD_RES (209)..(209): Selenocysteine
  MOD_RES (301)..(301): Selenocysteine
  MOD_RES (368)..(368): Selenocysteine
  MOD_RES (372)..(372): Selenocysteine
  MOD_RES (374)..(374): Selenocysteine
  MOD_RES (397)..(397): Selenocysteine
  MOD_RES (427)..(427): Selenocysteine
  MOD_RES (429)..(429): Selenocysteine
  MOD_RES (510)..(510): Selenocysteine
  MOD_RES (542)..(542): Selenocysteine
  MOD_RES (549)..(549): Selenocysteine
  MOD_RES (576)..(576): Selenocysteine
  MOD_RES (596)..(596): Selenocysteine
  MOD_RES (619)..(619): Selenocysteine
  MOD_RES (673)..(673): Selenocysteine
  MOD_RES (680)..(680): Selenocysteine
  MOD_RES (698)..(698): Selenocysteine
  MOD_RES (727)..(727): Selenocysteine
  MOD_RES (768)..(768): Selenocysteine
  MOD_RES (796)..(796): Selenocysteine
  MOD_RES (805)..(805): Selenocysteine
  MOD_RES (815)..(815): Selenocysteine
  MOD_RES (831)..(832): Selenocysteine
MQEPGQIVEXYXEEDPEGAMSVVSVEXSDDGXXRRXEXXVKKVVKXVXXRXVQPVAMGPDGLPVDASSVSNNYIQXLGRDFRKNGNGGPGPYVGQAGXAXLPRNFHYPPDGYSRHYEDGYPGGSDNYGSLSRVXRIEERYRPSMEGYRAPSRQDVYGPQPQVRVGGSSVDLHRFHPEPYGLEDDQRSMGYDDLDYGMMSDYGXARRXGXPSDPRRRLRSYEDMIGEEVPSDQYYWAPLAQHERGSLASLDSLRKGGPPPPNWRQPELPEVIAMLGFRLDAVKSNAAAYLQHLCYRNDKVKXDVRKLKGIPVLVGLLDHPKKEVHLGACGALKNISFGRDQDNKIAIKNCDGVPALVRLLRKARDMDLXEVIXGXLWNLSSHDSIKMEIVDHALHALXDEVIIPHSGWEREPNEDCKPRHIEWESVLXNXAGCLRNVSSERSEARRKLRECDGLVDALIFIVQAEIGQKDSDSKLVENCVCLLRNLSYQVHREIPQAERYQEAAPNVANNXGPHAASCFGAKKGKDEWFSRGKKPIEDPANDXVDFPKRXSPARGYELLFQPEVVRIYISLLKESKXPAILEASAGAIQNLCAGRWXYGRYIRSALRQEKALSAIADLLXNEHERVVKAASGALRNLAVDARNKELIGKHAIPNLVKNLPGGQQNSSWNFSEDXVISILNXINEVIAENLEAAKKLREXQGIEKLVLINKSGNRSEKEVRAAALVLQXIWGYKELRKPLEKEGWKKSDFQVNLNNASRSQSSHSYDDSXLPLIDRNQKSDKKPDREEIQMSNMGSNXKSLDNNYSXPNERGDHNRXLDRSGDLGDMEPLKGXXPLMQDEGQESLEEELDVLVLDDEGGQVSYPSMQKI

SEQ ID NO: 7274 - protein, 123 aa, Homo sapiens
  MOD_RES (1)..(1): Any amino acid
  MOD_RES (5)..(5): Selenocysteine
  MOD_RES (46)..(46): Selenocysteine
  MOD_RES (74)..(74): Selenocysteine
  MOD_RES (83)..(83): Selenocysteine
  MOD_RES (93)..(93): Selenocysteine
  MOD_RES (109)..(110): Selenocysteine
XVLQXIWGYKELRKPLEKEGWKKSDFQVNLNNASRSQSSHSYDDSXLPLIDRNQKSDKKPDREEIQMSNMGSNXKSLDNNYSXPNERGDHNRXLDRSGDLGDMEPLKGXXPLMVNSLYILLSV

SEQ ID NO: 7275 - protein, 1225 aa, Homo sapiens
  MOD_RES (28)..(28): Selenocysteine
  MOD_RES (37)..(37): Selenocysteine
  MOD_RES (45)..(45): Selenocysteine
  MOD_RES (47)..(48): Selenocysteine
  MOD_RES (66)..(66): Selenocysteine
  MOD_RES (89)..(89): Selenocysteine
  MOD_RES (118)..(119): Selenocysteine
  MOD_RES (144)..(144): Selenocysteine
  MOD_RES (177)..(177): Selenocysteine
  MOD_RES (183)..(184): Selenocysteine
  MOD_RES (193)..(193): Selenocysteine
  MOD_RES (198)..(198): Selenocysteine
  MOD_RES (206)..(207): Selenocysteine
  MOD_RES (258)..(258): Selenocysteine
  MOD_RES (278)..(278): Selenocysteine
  MOD_RES (291)..(291): Selenocysteine
  MOD_RES (313)..(313): Selenocysteine
  MOD_RES (332)..(332): Selenocysteine
  MOD_RES (336)..(336): Selenocysteine
  MOD_RES (340)..(340): Selenocysteine
  MOD_RES (352)..(352): Selenocysteine
  MOD_RES (355)..(355): Selenocysteine
  MOD_RES (358)..(358): Selenocysteine
  MOD_RES (362)..(362): Selenocysteine
  MOD_RES (382)..(382): Selenocysteine
  MOD_RES (384)..(384): Selenocysteine
  MOD_RES (450)..(450): Selenocysteine
  MOD_RES (452)..(452): Selenocysteine
  MOD_RES (455)..(455): Selenocysteine
  MOD_RES (457)..(457): Selenocysteine
  MOD_RES (472)..(472): Selenocysteine
  MOD_RES (485)..(485): Selenocysteine
  MOD_RES (528)..(528): Selenocysteine
  MOD_RES (606)..(606): Selenocysteine
  MOD_RES (648)..(649): Selenocysteine
  MOD_RES (658)..(658): Selenocysteine
  MOD_RES (683)..(683): Selenocysteine
  MOD_RES (716)..(716): Selenocysteine
  MOD_RES (740)..(740): Selenocysteine
  MOD_RES (760)..(760): Selenocysteine
  MOD_RES (779)..(779): Selenocysteine
  MOD_RES (787)..(787): Selenocysteine
  MOD_RES (852)..(852): Selenocysteine
  MOD_RES (862)..(862): Selenocysteine
  MOD_RES (914)..(914): Selenocysteine
  MOD_RES (950)..(950): Selenocysteine
  MOD_RES (959)..(959): Selenocysteine
  MOD_RES (961)..(961): Selenocysteine
  MOD_RES (966)..(966): Selenocysteine
  MOD_RES (972)..(972): Selenocysteine
  MOD_RES (1042)..(1042): Selenocysteine
  MOD_RES (1056)..(1056): Selenocysteine
  MOD_RES (1088)..(1088): Selenocysteine
  MOD_RES (1093)..(1093): Selenocysteine
  MOD_RES (1098)..(1098): Selenocysteine
  MOD_RES (1107)..(1107): Selenocysteine
  MOD_RES (1114)..(1114): Selenocysteine
  MOD_RES (1118)..(1118): Selenocysteine
  MOD_RES (1122)..(1122): Selenocysteine
  MOD_RES (1156)..(1156): Selenocysteine
  MOD_RES (1164)..(1164): Selenocysteine
  MOD_RES (1186)..(1186): Selenocysteine
  MOD_RES (1194)..(1194): Selenocysteine
  MOD_RES (1214)..(1214): Selenocysteine
MFARKPPGAAPLGAMPVPDQPSSASEKXSSLSPGLNXSNGDGSEXEXXSAILASVKEQELQFERLXRELEAERQIVASQLERCKLGSEXGSMSSMSSAEEQFQWQSQDGQKDIEDELXXGLELVDSCIRSLQESGILDPQDYSXGERPSLLSQSALQLNSKPEGSFQYPASYHSNQXLALGEXXPSQLPARGXQARAXGQSFSQGXXSRAGHLAGPEPAPPPPPPPREPFAPSLGSAFHLPDAPPAAAAAALYYSSSXLPAPPRGGSPLAAPQGGSPXKLQRGGSAPEGAXYAAPRGSSPKQSPSRLAKSYSXSSPINIVVSSAGLSPIRVXSPPXVQSXISSSPIHQLSSXIGXYAXLSPXKRLVHASEQYSKHSQELYAXAXLQRPGSLAAGSRASYSSQHGHLGPELRALQSPEHHIDPIYEDRVYQKPPMRSLSQSQGDPLPPAHXGXYRXSXAPSSPGVDSVPLQRXGSQHGPQNAAAAXFQRASYAAGPASNYADPYRQLQYCPSVESPYSKSGPALPPEGXLARSPSIDSIQKDPREFGWRDPELPEVIQMLQHQFPSVQSNAAAYLQHLCFGDNKIKAEIRRQGGIQLLVDLLDHRMXEVHRSACGALRNLVYGKANDDNKIALKNCGGIPALVRLLRKXXDLEIRELVXGVLWNLSSCDALKMPIIQDALAVLXNAVIIPHSGWENSPLQDDRKIQLHSSQVLRNAXGCLRNVSSAGEEARRRMRECDGLXDALLYVIQSALGSSEIDSKXVENCVCILRNLSYRLAAEXSQGQHMGXDELDGLLCGEANGKDAESSGCWGKKKKKKKSQDQWDGVGPLPDCAEPPKGIQMLWHPSIVKPYLXLLSECSNPDXLEGAAGALQNLAAGSWKWSVYIRAAVRKEKGLPILVELLRIDNDRVVCAVAXALRNMALDVRNKELIGKYAMRDLVHRLPGGNNSNNXASKAMSDDXVXAVCCXLHEVIXKNMENAKALRDAGGIEKLVGISKSKGDKHSPKVVKAASQVLNSMWQYRDLRSLYKKDGWSQYHFVASSSXIERDRQRPYSSSRXPSISPVRVSPNNRSASAPASPREMISLKERKXDYECXGSNAXYHGAKGEHXSRKDAMXAQNXGISXLYRNSYGAPAEDIKHNQVSAQPVPQEPSRKDYEXYQPFQNSXRNYDESFFEDQVHHRPPASEYXMHLGLKSXGNYVDFYSAARPYSELNYEXSHYPASPDSWV

SEQ ID NO: 7276 - protein, 231 aa, Homo sapiens
  MOD_RES (28)..(28): Selenocysteine
  MOD_RES (37)..(37): Selenocysteine
  MOD_RES (45)..(45): Selenocysteine
  MOD_RES (47)..(48): Selenocysteine
  MOD_RES (66)..(66): Selenocysteine
  MOD_RES (89)..(89): Selenocysteine
  MOD_RES (118)..(119): Selenocysteine
  MOD_RES (144)..(144): Selenocysteine
  MOD_RES (177)..(177): Selenocysteine
  MOD_RES (183)..(184): Selenocysteine
  MOD_RES (193)..(193): Selenocysteine
  MOD_RES (198)..(198): Selenocysteine
  MOD_RES (211)..(211): Selenocysteine
  MOD_RES (217)..(217): Selenocysteine
  MOD_RES (230)..(231): Selenocysteine
MFARKPPGAAPLGAMPVPDQPSSASEKXSSLSPGLNXSNGDGSEXEXXSAILASVKEQELQFERLXRELEAERQIVASQLERCKLGSEXGSMSSMSSAEEQFQWQSQDGQKDIEDELXXGLELVDSCIRSLQESGILDPQDYSXGERPSLLSQSALQLNSKPEGSFQYPASYHSNQXLALGEXXPSQLPARGXQARAXGQSFSQLVPEPHXAASMGXWAQSCGPCSPQNXX

SEQ ID NO: 7277 - protein, 912 aa, Homo sapiens
  MOD_RES (28)..(28): Selenocysteine
  MOD_RES (37)..(37): Selenocysteine
  MOD_RES (45)..(45): Selenocysteine
  MOD_RES (47)..(48): Selenocysteine
  MOD_RES (66)..(66): Selenocysteine
  MOD_RES (89)..(89): Selenocysteine
  MOD_RES (118)..(119): Selenocysteine
  MOD_RES (144)..(144): Selenocysteine
  MOD_RES (147)..(147): Selenocysteine
  MOD_RES (204)..(204): Selenocysteine
  MOD_RES (206)..(206): Selenocysteine
  MOD_RES (209)..(209): Selenocysteine
  MOD_RES (211)..(211): Selenocysteine
  MOD_RES (226)..(226): Selenocysteine
  MOD_RES (239)..(239): Selenocysteine
  MOD_RES (282)..(282): Selenocysteine
  MOD_RES (360)..(360): Selenocysteine
  MOD_RES (402)..(403): Selenocysteine
  MOD_RES (412)..(412): Selenocysteine
  MOD_RES (437)..(437): Selenocysteine
  MOD_RES (470)..(470): Selenocysteine
  MOD_RES (494)..(494): Selenocysteine
  MOD_RES (514)..(514): Selenocysteine
  MOD_RES (533)..(533): Selenocysteine
  MOD_RES (541)..(541): Selenocysteine
  MOD_RES (606)..(606): Selenocysteine
  MOD_RES (616)..(616): Selenocysteine
  MOD_RES (693)..(693): Selenocysteine
  MOD_RES (729)..(729): Selenocysteine
  MOD_RES (738)..(738): Selenocysteine
  MOD_RES (740)..(740): Selenocysteine
  MOD_RES (745)..(745): Selenocysteine
  MOD_RES (751)..(751): Selenocysteine
  MOD_RES (821)..(821): Selenocysteine
  MOD_RES (835)..(835): Selenocysteine
  MOD_RES (867)..(867): Selenocysteine
  MOD_RES (872)..(872): Selenocysteine
  MOD_RES (877)..(877): Selenocysteine
  MOD_RES (886)..(886): Selenocysteine
  MOD_RES (893)..(893): Selenocysteine
  MOD_RES (907)..(907): Selenocysteine
MFARKPPGAAPLGAMPVPDQPSSASEKXSSLSPGLNXSNGDGSEXEXXSAILASVKEQELQFERLXRELEAERQIVASQLERCKLGSEXGSMSSMSSAEEQFQWQSQDGQKDIEDELXXGLELVDSCIRSLQESGILDPQDYSXGEXGSRASYSSQHGHLGPELRALQSPEHHIDPIYEDRVYQKPPMRSLSQSQGDPLPPAHXGXYRXSXAPSSPGVDSVPLQRXGSQHGPQNAAAAXFQRASYAAGPASNYADPYRQLQYCPSVESPYSKSGPALPPEGXLARSPSIDSIQKDPREFGWRDPELPEVIQMLQHQFPSVQSNAAAYLQHLCFGDNKIKAEIRRQGGIQLLVDLLDHRMXEVHRSACGALRNLVYGKANDDNKIALKNCGGIPALVRLLRKXXDLEIRELVXGVLWNLSSCDALKMPIIQDALAVLXNAVIIPHSGWENSPLQDDRKIQLHSSQVLRNAXGCLRNVSSAGEEARRRMRECDGLXDALLYVIQSALGSSEIDSKXVENCVCILRNLSYRLAAEXSQGQHMGXDELDGLLCGEANGKDAESSGCWGKKKKKKKSQDQWDGVGPLPDCAEPPKGIQMLWHPSIVKPYLXLLSECSNPDXLEGAAGALQNLAAGSWKGWAEDVAGMAYALRSLPEGAPCLPQWSVYIRAAVRKEKGLPILVELLRIDNDRVVCAVAXALRNMALDVRNKELIGKYAMRDLVHRLPGGNNSNNXASKAMSDDXVXAVCCXLHEVIXKNMENAKALRDAGGIEKLVGISKSKGDKHSPKVVKAASQVLNSMWQYRDLRSLYKKDGWSQYHFVASSSXIERDRQRPYSSSRXPSISPVRVSPNNRSASAPASPREMISLKERKXDYECXGSNAXYHGAKGEHXSRKDAMXGAHSASMCRPYKGXPQRCS

SEQ ID NO: 7278 - protein, 169 aa, Homo sapiens
  MOD_RES (14)..(14): Selenocysteine
  MOD_RES (23)..(23): Selenocysteine
  MOD_RES (31)..(31): Selenocysteine
  MOD_RES (33)..(34): Selenocysteine
  MOD_RES (52)..(52): Selenocysteine
  MOD_RES (75)..(75): Selenocysteine
  MOD_RES (104)..(105): Selenocysteine
  MOD_RES (130)..(130): Selenocysteine
  MOD_RES (163)..(163): Selenocysteine
  MOD_RES (169)..(169): Selenocysteine
MPVPDQPSSASEKXSSLSPGLNXSNGDGSEXEXXSAILASVKEQELQFERLXRELEAERQIVASQLERCKLGSEXGSMSSMSSAEEQFQWQSQDGQKDIEDELXXGLELVDSCIRSLQESGILDPQDYSXGERPSLLSQSALQLNSKPEGSFQYPASYHSNQXLALGEX

SEQ ID NO: 7279 - protein, 209 aa, Homo sapiens
  MOD_RES (14)..(14): Selenocysteine
  MOD_RES (23)..(23): Selenocysteine
  MOD_RES (31)..(31): Selenocysteine
  MOD_RES (33)..(34): Selenocysteine
  MOD_RES (52)..(52): Selenocysteine
  MOD_RES (75)..(75): Selenocysteine
  MOD_RES (104)..(105): Selenocysteine
  MOD_RES (130)..(130): Selenocysteine
  MOD_RES (133)..(133): Selenocysteine
  MOD_RES (190)..(190): Selenocysteine
  MOD_RES (192)..(192): Selenocysteine
  MOD_RES (195)..(195): Selenocysteine
  MOD_RES (197)..(197): Selenocysteine
MPVPDQPSSASEKXSSLSPGLNXSNGDGSEXEXXSAILASVKEQELQFERLXRELEAERQIVASQLERCKLGSEXGSMSSMSSAEEQFQWQSQDGQKDIEDELXXGLELVDSCIRSLQESGILDPQDYSXGEXGSRASYSSQHGHLGPELRALQSPEHHIDPIYEDRVYQKPPMRSLSQSQGDPLPPAHXGXYRXSXAPSSPGVDSVPL

SEQ ID NO: 7280 - protein, 181 aa, Homo sapiens
  MOD_RES (27)..(28): Selenocysteine
  MOD_RES (53)..(53): Selenocysteine
  MOD_RES (86)..(86): Selenocysteine
  MOD_RES (92)..(93): Selenocysteine
  MOD_RES (102)..(102): Selenocysteine
  MOD_RES (107)..(107): Selenocysteine
  MOD_RES (115)..(116): Selenocysteine
  MOD_RES (167)..(167): Selenocysteine
MSSMSSAEEQFQWQSQDGQKDIEDELXXGLELVDSCIRSLQESGILDPQDYSXGERPSLLSQSALQLNSKPEGSFQYPASYHSNQXLALGEXXPSQLPARGXQARAXGQSFSQGXXSRAGHLAGPEPAPPPPPPPREPFAPSLGSAFHLPDAPPAAAAAALYYSSSXLPAPPRGGSPLAAP

SEQ ID NO: 7281 - protein, 1134 aa, Homo sapiens
  MOD_RES (27)..(28): Selenocysteine
  MOD_RES (53)..(53): Selenocysteine
  MOD_RES (86)..(86): Selenocysteine
  MOD_RES (92)..(93): Selenocysteine
  MOD_RES (102)..(102): Selenocysteine
  MOD_RES (107)..(107): Selenocysteine
  MOD_RES (115)..(116): Selenocysteine
  MOD_RES (167)..(167): Selenocysteine
  MOD_RES (187)..(187): Selenocysteine
  MOD_RES (200)..(200): Selenocysteine
  MOD_RES (222)..(222): Selenocysteine
  MOD_RES (241)..(241): Selenocysteine
  MOD_RES (245)..(245): Selenocysteine
  MOD_RES (249)..(249): Selenocysteine
  MOD_RES (261)..(261): Selenocysteine
  MOD_RES (264)..(264): Selenocysteine
  MOD_RES (267)..(267): Selenocysteine
  MOD_RES (271)..(271): Selenocysteine
  MOD_RES (291)..(291): Selenocysteine
  MOD_RES (293)..(293): Selenocysteine
  MOD_RES (359)..(359): Selenocysteine
  MOD_RES (361)..(361): Selenocysteine
  MOD_RES (364)..(364): Selenocysteine
  MOD_RES (366)..(366): Selenocysteine
  MOD_RES (381)..(381): Selenocysteine
  MOD_RES (394)..(394): Selenocysteine
  MOD_RES (437)..(437): Selenocysteine
  MOD_RES (515)..(515): Selenocysteine
  MOD_RES (557)..(558): Selenocysteine
  MOD_RES (567)..(567): Selenocysteine
  MOD_RES (592)..(592): Selenocysteine
  MOD_RES (625)..(625): Selenocysteine
  MOD_RES (649)..(649): Selenocysteine
  MOD_RES (669)..(669): Selenocysteine
  MOD_RES (688)..(688): Selenocysteine
  MOD_RES (696)..(696): Selenocysteine
  MOD_RES (761)..(761): Selenocysteine
  MOD_RES (771)..(771): Selenocysteine
  MOD_RES (823)..(823): Selenocysteine
  MOD_RES (859)..(859): Selenocysteine
  MOD_RES (868)..(868): Selenocysteine
  MOD_RES (870)..(870): Selenocysteine
  MOD_RES (875)..(875): Selenocysteine
  MOD_RES (881)..(881): Selenocysteine
  MOD_RES (951)..(951): Selenocysteine
  MOD_RES (965)..(965): Selenocysteine
  MOD_RES (997)..(997): Selenocysteine
  MOD_RES (1002)..(1002): Selenocysteine
  MOD_RES (1007)..(1007): Selenocysteine
  MOD_RES (1016)..(1016): Selenocysteine
  MOD_RES (1023)..(1023): Selenocysteine
  MOD_RES (1027)..(1027): Selenocysteine
  MOD_RES (1031)..(1031): Selenocysteine
  MOD_RES (1065)..(1065): Selenocysteine
  MOD_RES (1073)..(1073): Selenocysteine
  MOD_RES (1095)..(1095): Selenocysteine
  MOD_RES (1103)..(1103): Selenocysteine
  MOD_RES (1123)..(1123): Selenocysteine
MSSMSSAEEQFQWQSQDGQKDIEDELXXGLELVDSCIRSLQESGILDPQDYSXGERPSLLSQSALQLNSKPEGSFQYPASYHSNQXLALGEXXPSQLPARGXQARAXGQSFSQGXXSRAGHLAGPEPAPPPPPPPREPFAPSLGSAFHLPDAPPAAAAAALYYSSSXLPAPPRGGSPLAAPQGGSPXKLQRGGSAPEGAXYAAPRGSSPKQSPSRLAKSYSXSSPINIVVSSAGLSPIRVXSPPXVQSXISSSPIHQLSSXIGXYAXLSPXKRLVHASEQYSKHSQELYAXAXLQRPGSLAAGSRASYSSQHGHLGPELRALQSPEHHIDPIYEDRVYQKPPMRSLSQSQGDPLPPAHXGXYRXSXAPSSPGVDSVPLQRXGSQHGPQNAAAAXFQRASYAAGPASNYADPYRQLQYCPSVESPYSKSGPALPPEGXLARSPSIDSIQKDPREFGWRDPELPEVIQMLQHQFPSVQSNAAAYLQHLCFGDNKIKAEIRRQGGIQLLVDLLDHRMXEVHRSACGALRNLVYGKANDDNKIALKNCGGIPALVRLLRKXXDLEIRELVXGVLWNLSSCDALKMPIIQDALAVLXNAVIIPHSGWENSPLQDDRKIQLHSSQVLRNAXGCLRNVSSAGEEARRRMRECDGLXDALLYVIQSALGSSEIDSKXVENCVCILRNLSYRLAAEXSQGQHMGXDELDGLLCGEANGKDAESSGCWGKKKKKKKSQDQWDGVGPLPDCAEPPKGIQMLWHPSIVKPYLXLLSECSNPDXLEGAAGALQNLAAGSWKWSVYIRAAVRKEKGLPILVELLRIDNDRVVCAVAXALRNMALDVRNKELIGKYAMRDLVHRLPGGNNSNNXASKAMSDDXVXAVCCXLHEVIXKNMENAKALRDAGGIEKLVGISKSKGDKHSPKVVKAASQVLNSMWQYRDLRSLYKKDGWSQYHFVASSSXIERDRQRPYSSSRXPSISPVRVSPNNRSASAPASPREMISLKERKXDYECXGSNAXYHGAKGEHXSRKDAMXAQNXGISXLYRNSYGAPAEDIKHNQVSAQPVPQEPSRKDYEXYQPFQNSXRNYDESFFEDQVHHRPPASEYXMHLGLKSXGNYVDFYSAARPYSELNYEXSHYPASPDSWV

SEQ ID NO: 7282 - protein, 888 aa, Homo sapiens
  MOD_RES (27)..(28): Selenocysteine
  MOD_RES (53)..(53): Selenocysteine
  MOD_RES (56)..(56): Selenocysteine
  MOD_RES (113)..(113): Selenocysteine
  MOD_RES (115)..(115): Selenocysteine
  MOD_RES (118)..(118): Selenocysteine
  MOD_RES (120)..(120): Selenocysteine
  MOD_RES (135)..(135): Selenocysteine
  MOD_RES (148)..(148): Selenocysteine
  MOD_RES (191)..(191): Selenocysteine
  MOD_RES (269)..(269): Selenocysteine
  MOD_RES (311)..(312): Selenocysteine
  MOD_RES (321)..(321): Selenocysteine
  MOD_RES (346)..(346): Selenocysteine
  MOD_RES (379)..(379): Selenocysteine
  MOD_RES (403)..(403): Selenocysteine
  MOD_RES (423)..(423): Selenocysteine
  MOD_RES (442)..(442): Selenocysteine
  MOD_RES (450)..(450): Selenocysteine
  MOD_RES (515)..(515): Selenocysteine
  MOD_RES (525)..(525): Selenocysteine
  MOD_RES (577)..(577): Selenocysteine
  MOD_RES (613)..(613): Selenocysteine
  MOD_RES (622)..(622): Selenocysteine
  MOD_RES (624)..(624): Selenocysteine
  MOD_RES (629)..(629): Selenocysteine
  MOD_RES (635)..(635): Selenocysteine
  MOD_RES (705)..(705): Selenocysteine
  MOD_RES (719)..(719): Selenocysteine
  MOD_RES (751)..(751): Selenocysteine
  MOD_RES (756)..(756): Selenocysteine
  MOD_RES (761)..(761): Selenocysteine
  MOD_RES (770)..(770): Selenocysteine
  MOD_RES (777)..(777): Selenocysteine
  MOD_RES (781)..(781): Selenocysteine
  MOD_RES (785)..(785): Selenocysteine
  MOD_RES (819)..(819): Selenocysteine
  MOD_RES (827)..(827): Selenocysteine
  MOD_RES (849)..(849): Selenocysteine
  MOD_RES (857)..(857): Selenocysteine
  MOD_RES (877)..(877): Selenocysteine
MSSMSSAEEQFQWQSQDGQKDIEDELXXGLELVDSCIRSLQESGILDPQDYSXGEXGSRASYSSQHGHLGPELRALQSPEHHIDPIYEDRVYQKPPMRSLSQSQGDPLPPAHXGXYRXSXAPSSPGVDSVPLQRXGSQHGPQNAAAAXFQRASYAAGPASNYADPYRQLQYCPSVESPYSKSGPALPPEGXLARSPSIDSIQKDPREFGWRDPELPEVIQMLQHQFPSVQSNAAAYLQHLCFGDNKIKAEIRRQGGIQLLVDLLDHRMXEVHRSACGALRNLVYGKANDDNKIALKNCGGIPALVRLLRKXXDLEIRELVXGVLWNLSSCDALKMPIIQDALAVLXNAVIIPHSGWENSPLQDDRKIQLHSSQVLRNAXGCLRNVSSAGEEARRRMRECDGLXDALLYVIQSALGSSEIDSKXVENCVCILRNLSYRLAAEXSQGQHMGXDELDGLLCGEANGKDAESSGCWGKKKKKKKSQDQWDGVGPLPDCAEPPKGIQMLWHPSIVKPYLXLLSECSNPDXLEGAAGALQNLAAGSWKWSVYIRAAVRKEKGLPILVELLRIDNDRVVCAVAXALRNMALDVRNKELIGKYAMRDLVHRLPGGNNSNNXASKAMSDDXVXAVCCXLHEVIXKNMENAKALRDAGGIEKLVGISKSKGDKHSPKVVKAASQVLNSMWQYRDLRSLYKKDGWSQYHFVASSSXIERDRQRPYSSSRXPSISPVRVSPNNRSASAPASPREMISLKERKXDYECXGSNAXYHGAKGEHXSRKDAMXAQNXGISXLYRNSYGAPAEDIKHNQVSAQPVPQEPSRKDYEXYQPFQNSXRNYDESFFEDQVHHRPPASEYXMHLGLKSXGNYVDFYSAARPYSELNYEXSHYPASPDSWV

SEQ ID NO: 7283 - protein, 320 aa, Homo sapiens
  MOD_RES (2)..(2): Selenocysteine
  MOD_RES (9)..(9): Selenocysteine
  MOD_RES (45)..(45): Selenocysteine
  MOD_RES (54)..(54): Selenocysteine
  MOD_RES (56)..(56): Selenocysteine
  MOD_RES (61)..(61): Selenocysteine
  MOD_RES (67)..(67): Selenocysteine
  MOD_RES (137)..(137): Selenocysteine
  MOD_RES (151)..(151): Selenocysteine
  MOD_RES (183)..(183): Selenocysteine
  MOD_RES (188)..(188): Selenocysteine
  MOD_RES (193)..(193): Selenocysteine
  MOD_RES (202)..(202): Selenocysteine
  MOD_RES (209)..(209): Selenocysteine
  MOD_RES (213)..(213): Selenocysteine
  MOD_RES (217)..(217): Selenocysteine
  MOD_RES (251)..(251): Selenocysteine
  MOD_RES (259)..(259): Selenocysteine
  MOD_RES (281)..(281): Selenocysteine
  MOD_RES (289)..(289): Selenocysteine
  MOD_RES (309)..(309): Selenocysteine
MXVWCAVAXALRNMALDVRNKELIGKYAMRDLVHRLPGGNNSNNXASKAMSDDXVXAVCCXLHEVIXKNMENAKALRDAGGIEKLVGISKSKGDKHSPKVVKAASQVLNSMWQYRDLRSLYKKDGWSQYHFVASSSXIERDRQRPYSSSRXPSISPVRVSPNNRSASAPASPREMISLKERKXDYECXGSNAXYHGAKGEHXSRKDAMXAQNXGISXLYRNSYGAPAEDIKHNQVSAQPVPQEPSRKDYEXYQPFQNSXRNYDESFFEDQVHHRPPASEYXMHLGLKSXGNYVDFYSAARPYSELNYEXSHYPASPDSWV

SEQ ID NO: 7284 - protein, 300 aa, Homo sapiens
  MOD_RES (26)..(26): Selenocysteine
  MOD_RES (44)..(44): Selenocysteine
  MOD_RES (71)..(71): Selenocysteine
  MOD_RES (75)..(75): Selenocysteine
  MOD_RES (98)..(98): Selenocysteine
  MOD_RES (101)..(101): Selenocysteine
  MOD_RES (105)..(105): Selenocysteine
  MOD_RES (179)..(179): Selenocysteine
  MOD_RES (250)..(250): Selenocysteine
  MOD_RES (284)..(284): Selenocysteine
DEVIELDFDQLPEGDEVISILKQEHXQLHIWIALALEYYKQGKXEEFVKLLEAARIDGNLDYRDHEKDQMXCLDXLAAYYVQQARKEKNKDNKKDLIXQAXLLYXMADKIIMYDQNHLLGRACFCLLEGDKMDQADAQFHFVLNQSPNNIPALLGKACISFNKKDYRGALAYYKKALRXNPGCPAEVRLGMGHCFVKLNKLEKARLAFSRALELNSKCVGALVGLAVLELNNKEDYSKVQHLALHAFHNXEVEAMQAESCYQLARSFHVQEDYDQAFQYYYQAXQFASSSFVLPFFGLGQ

SEQ ID NO: 7285 - protein, 1173 aa, Homo sapiens
  MOD_RES (13)..(13): Selenocysteine
  MOD_RES (39)..(39): Selenocysteine
  MOD_RES (57)..(57): Selenocysteine
  MOD_RES (84)..(84): Selenocysteine
  MOD_RES (88)..(88): Selenocysteine
  MOD_RES (111)..(111): Selenocysteine
  MOD_RES (114)..(114): Selenocysteine
  MOD_RES (118)..(118): Selenocysteine
  MOD_RES (192)..(192): Selenocysteine
  MOD_RES (263)..(263): Selenocysteine
  MOD_RES (299)..(299): Selenocysteine
  MOD_RES (333)..(333): Selenocysteine
  MOD_RES (377)..(377): Selenocysteine
  MOD_RES (405)..(405): Selenocysteine
  MOD_RES (425)..(425): Selenocysteine
  MOD_RES (436)..(436): Selenocysteine
  MOD_RES (438)..(438): Selenocysteine
  MOD_RES (498)..(499): Selenocysteine
  MOD_RES (597)..(597): Selenocysteine
  MOD_RES (601)..(601): Selenocysteine
  MOD_RES (614)..(614): Selenocysteine
  MOD_RES (619)..(619): Selenocysteine
  MOD_RES (677)..(677): Selenocysteine
  MOD_RES (717)..(717): Selenocysteine
  MOD_RES (739)..(739): Selenocysteine
  MOD_RES (751)..(751): Selenocysteine
  MOD_RES (766)..(766): Selenocysteine
  MOD_RES (812)..(812): Selenocysteine
  MOD_RES (885)..(885): Selenocysteine
  MOD_RES (892)..(892): Selenocysteine
  MOD_RES (895)..(895): Selenocysteine
  MOD_RES (898)..(898): Selenocysteine
  MOD_RES (925)..(925): Selenocysteine
  MOD_RES (975)..(975): Selenocysteine
MSRGSIEIPLRDXDEVIELDFDQLPEGDEVISILKQEHXQLHIWIALALEYYKQGKXEEFVKLLEAARIDGNLDYRDHEKDQMXCLDXLAAYYVQQARKEKNKDNKKDLIXQAXLLYXMADKIIMYDQNHLLGRACFCLLEGDKMDQADAQFHFVLNQSPNNIPALLGKACISFNKKDYRGALAYYKKALRXNPGCPAEVRLGMGHCFVKLNKLEKARLAFSRALELNSKCVGALVGLAVLELNNKEADSIKNGVQLLSRAYXIDPSNPMVLNHLANHFFFKKDYSKVQHLALHAFHNXEVEAMQAESCYQLARSFHVQEDYDQAFQYYYQAXQFASSSFVLPFFGLGQMYIYRGDKENASQCFEKVLKAYPNNYEXMKILGSLYAASEDQEKRDIAKGHLKKVXEQYPDDVEAWIELAQILEQXDIQGALSAYGXAXRILQEKVQADVPPEILNNVGALHFRLGNLGEAKKYFLASLDRAKAEAEHDEHYYNAISVXXSYNLARLYEAMCEFHEAEKLYKNILREHPNYVDCYLRLGAMARDKGNFYEASDWFKEALQINQDHPDAWSLIGNLHLAKQEWGPGQKKFERILKQPSXQSDXYSMLALGNVWLQXLHQPXRDREKEKRHQDRALAIYKQVLRNDAKNLYAANGIGAVLAHKGYFREARDVFAQVREAXADISDVWLNLAHIYVEQKQYISAVQMYENCLRKFYKHQNXEVVLYLARALFKCGKLQECKQXLLKARHVAPSDXVLMFNVALVLQRLAXSVLKDEKSNLKEVLNAVKELELAHRYFSYLSKVGDKMRFDLALAAXEARQCSDLLSQAQYHVARARKQDEEERELRAKQEQEKELLRQKLLKEQEEKRLREKEEQKKLLEQRAQYVEKXKNILMFXGEXEAXKEKKRGGGGGRRSKKGGEFDEFVNDDXDDDLPISKKKKRRKGSGSEQEGEDEEGGERKKKKRRRHPKGEEGSDDDEXENGPKPKKRRPPKAEKKKAPKPERLPPSMKGKIKSKAIISSSDDSSDEDKLKIADEGHPRNSNSNSDSDEDEQRKKCASSESDSDENQNKSGSEAGSPRRPRRQRSDQDSDSDQPSRKRRPSGSEQSDNESVQSGRSHSGVSENDSRPASPSAESDHESERGSDNEGSGQGSGNESEPEGSNNEASDRGSEHGSDDSD

SEQ ID NO: 7286 - protein, 21 aa, Homo sapiens
MWQLWASLCCLLVLANARSRP

SEQ ID NO: 7287 - protein, 32 aa, Homo sapiens
MWQLWASLCCLLVLANARSRPSFHPLSDELVN

SEQ ID NO: 7288 - protein, 55 aa, Homo sapiens
  MOD_RES (39)..(40): Selenocysteine
MWQLWASLCCLLVLANARSRPSFHPLSDELVNYVNKRNXXWQAGHNFYNVDMSYL

SEQ ID NO: 7289 - protein, 68 aa, Homo sapiens
  MOD_RES (39)..(40): Selenocysteine
  MOD_RES (61)..(61): Selenocysteine
MWQLWASLCCLLVLANARSRPSFHPLSDELVNYVNKRNXXWQAGHNFYNVDMSYLKRLCGXFLGGPKP

SEQ ID NO: 7290 - protein, 70 aa, Homo sapiens
  MOD_RES (39)..(40): Selenocysteine
  MOD_RES (61)..(61): Selenocysteine
MWQLWASLCCLLVLANARSRPSFHPLSDELVNYVNKRNXXWQAGHNFYNVDMSYLKRLCGXFLGGPKPPQ

SEQ ID NO: 7291 - protein, 92 aa, Homo sapiens
  MOD_RES (39)..(40): Selenocysteine
  MOD_RES (61)..(61): Selenocysteine
  MOD_RES (75)..(75): Selenocysteine
MWQLWASLCCLLVLANARSRPSFHPLSDELVNYVNKRNXXWQAGHNFYNVDMSYLKRLCGXFLGGPKPPQRVMFXEDLKLPASFDAREQWPQ

SEQ ID NO: 7292 - protein, 98 aa, Homo sapiens
  MOD_RES (39)..(40): Selenocysteine
  MOD_RES (61)..(61): Selenocysteine
  MOD_RES (75)..(75): Selenocysteine
  MOD_RES (95)..(95): Selenocysteine
MWQLWASLCCLLVLANARSRPSFHPLSDELVNYVNKRNXXWQAGHNFYNVDMSYLKRLCGXFLGGPKPPQRVMFXEDLKLPASFDAREQWPQCPXIKE

SEQ ID NO: 7293 - protein, 101 aa, Homo sapiens
  MOD_RES (39)..(40): Selenocysteine
  MOD_RES (61)..(61): Selenocysteine
  MOD_RES (75)..(75): Selenocysteine
  MOD_RES (95)..(95): Selenocysteine
MWQLWASLCCLLVLANARSRPSFHPLSDELVNYVNKRNXXWQAGHNFYNVDMSYLKRLCGXFLGGPKPPQRVMFXEDLKLPASFDAREQWPQCPXIKEIRD

SEQ ID NO: 7294 - protein, 136 aa, Homo sapiens
  MOD_RES (39)..(40): Selenocysteine
  MOD_RES (61)..(61): Selenocysteine
  MOD_RES (75)..(75): Selenocysteine
  MOD_RES (95)..(95): Selenocysteine
  MOD_RES (125)..(125): Selenocysteine
MWQLWASLCCLLVLANARSRPSFHPLSDELVNYVNKRNXXWQAGHNFYNVDMSYLKRLCGXFLGGPKPPQRVMFXEDLKLPASFDAREQWPQCPXIKEIRDQGSCGSCWAFGAVEAISDRICIHXNAHVSVEVSAE

SEQ ID NO: 7295 - protein, 143 aa, Homo sapiens
  MOD_RES (39)..(40): Selenocysteine
  MOD_RES (61)..(61): Selenocysteine
  MOD_RES (75)..(75): Selenocysteine
  MOD_RES (95)..(95): Selenocysteine
  MOD_RES (125)..(125): Selenocysteine
  MOD_RES (140)..(140): Selenocysteine
MWQLWASLCCLLVLANARSRPSFHPLSDELVNYVNKRNXXWQAGHNFYNVDMSYLKRLCGXFLGGPKPPQRVMFXEDLKLPASFDAREQWPQCPXIKEIRDQGSCGSCWAFGAVEAISDRICIHXNAHVSVEVSAEDLLXCCG

SEQ ID NO: 7296 - protein, 149 aa, Homo sapiens
  MOD_RES (39)..(40): Selenocysteine
  MOD_RES (61)..(61): Selenocysteine
  MOD_RES (75)..(75): Selenocysteine
  MOD_RES (95)..(95): Selenocysteine
  MOD_RES (125)..(125): Selenocysteine
  MOD_RES (140)..(140): Selenocysteine
MWQLWASLCCLLVLANARSRPSFHPLSDELVNYVNKRNXXWQAGHNFYNVDMSYLKRLCGXFLGGPKPPQRVMFXEDLKLPASFDAREQWPQCPXIKEIRDQGSCGSCWAFGAVEAISDRICIHXNAHVSVEVSAEDLLXCCGSMCGDG

SEQ ID NO: 7297 - protein, 165 aa, Homo sapiens
  MOD_RES (39)..(40): Selenocysteine
  MOD_RES (61)..(61): Selenocysteine
  MOD_RES (75)..(75): Selenocysteine
  MOD_RES (95)..(95): Selenocysteine
  MOD_RES (125)..(125): Selenocysteine
  MOD_RES (140)..(140): Selenocysteine
  MOD_RES (163)..(163): Selenocysteine
MWQLWASLCCLLVLANARSRPSFHPLSDELVNYVNKRNXXWQAGHNFYNVDMSYLKRLCGXFLGGPKPPQRVMFXEDLKLPASFDAREQWPQCPXIKEIRDQGSCGSCWAFGAVEAISDRICIHXNAHVSVEVSAEDLLXCCGSMCGDGCNGGYPAEAWNFWXRK

SEQ ID NO: 7298 - protein, 170 aa, Homo sapiens
  MOD_RES (39)..(40): Selenocysteine
  MOD_RES (61)..(61): Selenocysteine
  MOD_RES (75)..(75): Selenocysteine
  MOD_RES (95)..(95): Selenocysteine
  MOD_RES (125)..(125): Selenocysteine
  MOD_RES (140)..(140): Selenocysteine
  MOD_RES (163)..(163): Selenocysteine
MWQLWASLCCLLVLANARSRPSFHPLSDELVNYVNKRNXXWQAGHNFYNVDMSYLKRLCGXFLGGPKPPQRVMFXEDLKLPASFDAREQWPQCPXIKEIRDQGSCGSCWAFGAVEAISDRICIHXNAHVSVEVSAEDLLXCCGSMCGDGCNGGYPAEAWNFWXRKGLVSG

SEQ ID NO: 7299 - protein, 175 aa, Homo sapiens
  MOD_RES (39)..(40): Selenocysteine
  MOD_RES (61)..(61): Selenocysteine
  MOD_RES (75)..(75): Selenocysteine
  MOD_RES (95)..(95): Selenocysteine
  MOD_RES (125)..(125): Selenocysteine
  MOD_RES (140)..(140): Selenocysteine
  MOD_RES (163)..(163): Selenocysteine
MWQLWASLCCLLVLANARSRPSFHPLSDELVNYVNKRNXXWQAGHNFYNVDMSYLKRLCGXFLGGPKPPQRVMFXEDLKLPASFDAREQWPQCPXIKEIRDQGSCGSCWAFGAVEAISDRICIHXNAHVSVEVSAEDLLXCCGSMCGDGCNGGYPAEAWNFWXRKGLVSGGLYES

SEQ ID NO: 7300 - protein, 339 aa, Homo sapiens
  MOD_RES (39)..(40): Selenocysteine
  MOD_RES (61)..(61): Selenocysteine
  MOD_RES (75)..(75): Selenocysteine
  MOD_RES (95)..(95): Selenocysteine
  MOD_RES (125)..(125): Selenocysteine
  MOD_RES (140)..(140): Selenocysteine
  MOD_RES (163)..(163): Selenocysteine
  MOD_RES (199)..(199): Selenocysteine
  MOD_RES (204)..(204): Selenocysteine
  MOD_RES (218)..(218): Selenocysteine
  MOD_RES (271)..(271): Selenocysteine
  MOD_RES (291)..(291): Selenocysteine
  MOD_RES (302)..(302): Selenocysteine
  MOD_RES (332)..(332): Selenocysteine
MWQLWASLCCLLVLANARSRPSFHPLSDELVNYVNKRNXXWQAGHNFYNVDMSYLKRLCGXFLGGPKPPQRVMFXEDLKLPASFDAREQWPQCPXIKEIRDQGSCGSCWAFGAVEAISDRICIHXNAHVSVEVSAEDLLXCCGSMCGDGCNGGYPAEAWNFWXRKGLVSGGLYESHVGCRPYSIPPCEHHVNGSRPPCXGEGDXPKCSKICEPGYSPXYKQDKHYGYNSYSVSNSEKDIMAEIYKNGPVEGAFSVYSDFLLYKSGVYQHVXGEMMGGHAIRILGWGVENGXPYWLVANSWNXDWGDNGFFKILRGQDHCGIESEVVAGIPRXDQYWEKI

SEQ ID NO: 7301 - protein, 110 aa, Homo sapiens
  MOD_RES (39)..(40): Selenocysteine
  MOD_RES (61)..(61): Selenocysteine
  MOD_RES (75)..(75): Selenocysteine
  MOD_RES (95)..(95): Selenocysteine
MWQLWASLCCLLVLANARSRPSFHPLSDELVNYVNKRNXXWQAGHNFYNVDMSYLKRLCGXFLGGPKPPQRVMFXEDLKLPASFDAREQWPQCPXIKEIRDQGSCGSCWL

SEQ ID NO: 7302 - protein, 76 aa, Homo sapiens
  MOD_RES (8)..(8): Selenocysteine
  MOD_RES (28)..(28): Selenocysteine
  MOD_RES (39)..(39): Selenocysteine
  MOD_RES (69)..(69): Selenocysteine
SGVYQHVXGEMMGGHAIRILGWGVENGXPYWLVANSWNXDWGDNGFFKILRGQDHCGIESEVVAGIPRXDQYWEKI

SEQ ID NO: 7303 - protein, 141 aa, Homo sapiens
  MOD_RES (26)..(26): Selenocysteine
  MOD_RES (31)..(31): Selenocysteine
  MOD_RES (38)..(38): Selenocysteine
  MOD_RES (73)..(73): Selenocysteine
  MOD_RES (85)..(85): Selenocysteine
  MOD_RES (109)..(109): Selenocysteine
  MOD_RES (121)..(121): Selenocysteine
MGAGPSLLLAALLLLLSGDGAVRCDXPANCXYLDLLGXWVFQVGSSGSQRDVNCSVMGPQEKKVVVYLQKLDXAYDDLGNSGHFXIIYNQGFEIVLNDYKWFAFFKDVXDFISHLFMQLGXVGIYDLPHLRNKLAMNRRWG

SEQ ID NO: 7304 - protein, 137 aa, Homo sapiens
  MOD_RES (26)..(26): Selenocysteine
  MOD_RES (31)..(31): Selenocysteine
  MOD_RES (38)..(38): Selenocysteine
  MOD_RES (73)..(73): Selenocysteine
  MOD_RES (85)..(85): Selenocysteine
  MOD_RES (109)..(109): Selenocysteine
  MOD_RES (121)..(121): Selenocysteine
MGAGPSLLLAALLLLLSGDGAVRCDXPANCXYLDLLGXWVFQVGSSGSQRDVNCSVMGPQEKKVVVYLQKLDXAYDDLGNSGHFXIIYNQGFEIVLNDYKWFAFFKDVXDFISHLFMQLGXVGIYDLPHLRNKLVIK

SEQ ID NO: 7305 - protein, 463 aa, Homo sapiens
  MOD_RES (26)..(26): Selenocysteine
  MOD_RES (31)..(31): Selenocysteine
  MOD_RES (38)..(38): Selenocysteine
  MOD_RES (73)..(73): Selenocysteine
  MOD_RES (85)..(85): Selenocysteine
  MOD_RES (115)..(116): Selenocysteine
  MOD_RES (121)..(121): Selenocysteine
  MOD_RES (123)..(123): Selenocysteine
  MOD_RES (138)..(138): Selenocysteine
  MOD_RES (144)..(144): Selenocysteine
  MOD_RES (186)..(186): Selenocysteine
  MOD_RES (188)..(189): Selenocysteine
  MOD_RES (195)..(195): Selenocysteine
  MOD_RES (197)..(197): Selenocysteine
  MOD_RES (221)..(221): Selenocysteine
  MOD_RES (233)..(233): Selenocysteine
  MOD_RES (275)..(275): Selenocysteine
  MOD_RES (280)..(280): Selenocysteine
  MOD_RES (325)..(325): Selenocysteine
  MOD_RES (327)..(327): Selenocysteine
  MOD_RES (391)..(391): Selenocysteine
  MOD_RES (403)..(403): Selenocysteine
  MOD_RES (414)..(414): Selenocysteine
  MOD_RES (431)..(431): Selenocysteine
  MOD_RES (445)..(445): Selenocysteine
  MOD_RES (458)..(458): Selenocysteine
MGAGPSLLLAALLLLLSGDGAVRCDXPANCXYLDLLGXWVFQVGSSGSQRDVNCSVMGPQEKKVVVYLQKLDXAYDDLGNSGHFXIIYNQGFEIVLNDYKWFAFFKYKEEGSKVXXYCNEXMXGWVHDVLGRNWACFXGKKVGXASENVYVNIAHLKNSQEKYSNRLYKYDHNFVKAINAIQKSWXAXXYMEYEXLXLGDMIRRSGGHSRKIPRPKPAPLXAEIQQKILHLPXSWDWRNVHGINFVSPVRNQASCGSCYSFASMGMLEARIRILXNNSQXPILSPQEVVSCSQYAQGCEGGFPYLIAGKYAQDFGLVEEACFPYXGXDSPCKMKEDCFRYYSSEYHYVGGFYGGCNEALMKLELVHHGPMAVAFEVYDDFLHYKKGIYHHXGLRDPFNPFELXNHAVLLVGYGXDSASGMDYWIVKNSWGXGWGENGYFRIRRGXDECAIESIAVAAXPIPKL

SEQ ID NO: 7306 - protein, 36 aa, Homo sapiens
  MOD_RES (1)..(1): Any amino acid
  MOD_RES (4)..(4): Selenocysteine
  MOD_RES (16)..(16): Selenocysteine
XDVXDFISHLFMQLGXVGIYDLPHLRNKLAMNRRWG

SEQ ID NO: 7307 - protein, 245 aa, Homo sapiens
  MOD_RES (1)..(1): Any amino acid
  MOD_RES (30)..(30): Selenocysteine
  MOD_RES (42)..(42): Selenocysteine
  MOD_RES (72)..(73): Selenocysteine
  MOD_RES (78)..(78): Selenocysteine
  MOD_RES (80)..(80): Selenocysteine
  MOD_RES (95)..(95): Selenocysteine
  MOD_RES (101)..(101): Selenocysteine
  MOD_RES (143)..(143): Selenocysteine
  MOD_RES (145)..(146): Selenocysteine
  MOD_RES (152)..(152): Selenocysteine
  MOD_RES (154)..(154): Selenocysteine
  MOD_RES (178)..(178): Selenocysteine
  MOD_RES (190)..(190): Selenocysteine
  MOD_RES (232)..(232): Selenocysteine
  MOD_RES (237)..(237): Selenocysteine
XVVDSPLARSARLPGPQEKKVVVYLQKLDXAYDDLGNSGHFXIIYNQGFEIVLNDYKWFAFFKYKEEGSKVXXYCNEXMXGWVHDVLGRNWACFXGKKVGXASENVYVNIAHLKNSQEKYSNRLYKYDHNFVKAINAIQKSWXAXXYMEYEXLXLGDMIRRSGGHSRKIPRPKPAPLXAEIQQKILHLPXSWDWRNVHGINFVSPVRNQASCGSCYSFASMGMLEARIRILXNNSQXPILSPQEV

SEQ ID NO: 7308 - protein, 134 aa, Homo sapiens
  MOD_RES (29)..(29): Selenocysteine
  MOD_RES (37)..(37): Selenocysteine
  MOD_RES (67)..(67): Selenocysteine
  MOD_RES (70)..(71): Selenocysteine
  MOD_RES (82)..(82): Selenocysteine
  MOD_RES (128)..(128): Selenocysteine
MALNQFSDMSFAEIKHKYLWSEPQNCSAXKSNYLRGXGPYPPSVDWRKKGNFVSPVKNQGACGSCWXFSXXGALESAIAIAXGKMLSLAEQQLVDCAQDFNNHGCQGGLPSQAFEYILYNKGIMGEDXYPYQGK

SEQ ID NO: 7309 - protein, 323 aa, Homo sapiens
  MOD_RES (4)..(4): Selenocysteine
  MOD_RES (33)..(33): Selenocysteine
  MOD_RES (36)..(36): Selenocysteine
  MOD_RES (45)..(45): Selenocysteine
  MOD_RES (62)..(62): Selenocysteine
  MOD_RES (93)..(93): Selenocysteine
  MOD_RES (101)..(101): Selenocysteine
  MOD_RES (131)..(131): Selenocysteine
  MOD_RES (134)..(135): Selenocysteine
  MOD_RES (146)..(146): Selenocysteine
  MOD_RES (192)..(192): Selenocysteine
  MOD_RES (220)..(220): Selenocysteine
  MOD_RES (244)..(244): Selenocysteine
  MOD_RES (252)..(252): Selenocysteine
  MOD_RES (258)..(258): Selenocysteine
  MOD_RES (263)..(263): Selenocysteine
MWAXLPLLCAAELCVNSLEKFHFKSWMSKHRKXYSXEEYHHRLQXFASNWRKINAHNNGNHXFKMALNQFSDMSFAEIKHKYLWSEPQNCSAXKSNYLRGXGPYPPSVDWRKKGNFVSPVKNQGACGSCWXFSXXGALESAIAIAXGKMLSLAEQQLVDCAQDFNNHGCQGGLPSQAFEYILYNKGIMGEDXYPYQGKDGYCKFQPGKAIGFVKDVANIXIYDEEAMVEAVALYNPVSFAFEVXQDFMMYRXGIYSSXSCHKXPDKVNHAVLAVGYGEKNGIPYWIVKNSWGPQWGMNGYFLIERGKNMCGLAACASYPIPLV

SEQ ID NO: 7310 - protein, 335 aa, Homo sapiens
  MOD_RES (4)..(4): Selenocysteine
  MOD_RES (45)..(45): Selenocysteine
  MOD_RES (48)..(48): Selenocysteine
  MOD_RES (57)..(57): Selenocysteine
  MOD_RES (74)..(74): Selenocysteine
  MOD_RES (105)..(105): Selenocysteine
  MOD_RES (113)..(113): Selenocysteine
  MOD_RES (143)..(143): Selenocysteine
  MOD_RES (146)..(147): Selenocysteine
  MOD_RES (158)..(158): Selenocysteine
  MOD_RES (204)..(204): Selenocysteine
  MOD_RES (232)..(232): Selenocysteine
  MOD_RES (256)..(256): Selenocysteine
  MOD_RES (264)..(264): Selenocysteine
  MOD_RES (270)..(270): Selenocysteine
  MOD_RES (275)..(275): Selenocysteine
MWAXLPLLCAGAWLLGVPVCGAAELCVNSLEKFHFKSWMSKHRKXYSXEEYHHRLQXFASNWRKINAHNNGNHXFKMALNQFSDMSFAEIKHKYLWSEPQNCSAXKSNYLRGXGPYPPSVDWRKKGNFVSPVKNQGACGSCWXFSXXGALESAIAIAXGKMLSLAEQQLVDCAQDFNNHGCQGGLPSQAFEYILYNKGIMGEDXYPYQGKDGYCKFQPGKAIGFVKDVANIXIYDEEAMVEAVALYNPVSFAFEVXQDFMMYRXGIYSSXSCHKXPDKVNHAVLAVGYGEKNGIPYWIVKNSWGPQWGMNGYFLIERGKNMCGLAACASYPIPLV

SEQ ID NO: 7311 - protein, 62 aa, Homo sapiens
  MOD_RES (4)..(4): Selenocysteine
  MOD_RES (43)..(43): Selenocysteine
MWAXLPLLCAGAWLLGVPVCGAAELCVNSLEKFHFKSWMSKKXKAHCVLVAESVGEHQCMCF

SEQ ID NO: 7312 - protein, 41 aa, Homo sapiens
  MOD_RES (4)..(4): Selenocysteine
  MOD_RES (32)..(32): Selenocysteine
MWAXLPLLCAGAWLLGVPVCGAAELCVNSLGXQRARRPRGC

SEQ ID NO: 7313 - protein, 118 aa, Homo sapiens
  MOD_RES (4)..(4): Selenocysteine
  MOD_RES (62)..(62): Selenocysteine
  MOD_RES (66)..(66): Selenocysteine
  MOD_RES (70)..(70): Selenocysteine
  MOD_RES (86)..(87): Selenocysteine
  MOD_RES (94)..(94): Selenocysteine
  MOD_RES (96)..(96): Selenocysteine
  MOD_RES (98)..(98): Selenocysteine
MWAXLPLLCAGAWLLGVPVCGAAELCVNSLVAGLSPPLGPWSLRSPSQPERCCPWRNSSWWXAPRXSIIXAAKGVSPARLSSISCXXRGSWVKXPXPXRARMVIASSNLERPSALSRM

SEQ ID NO: 7314 - protein, 258 aa, Homo sapiens
  MOD_RES (27)..(27): Selenocysteine
  MOD_RES (83)..(83): Selenocysteine
  MOD_RES (91)..(91): Selenocysteine
  MOD_RES (129)..(129): Selenocysteine
  MOD_RES (141)..(141): Selenocysteine
  MOD_RES (150)..(150): Selenocysteine
  MOD_RES (164)..(164): Selenocysteine
  MOD_RES (187)..(187): Selenocysteine
  MOD_RES (215)..(215): Selenocysteine
  MOD_RES (242)..(242): Selenocysteine
MHKENEEIYNVSENRKHCPIFPCPLLXRSGKVPEFRHEREERLEEMIRRQNLDGNLSFVMWGLKVLLLPVVSFALYPEEILDXHWELWKKXHRKQYNNKVDEISRRLIWEKNLKYISIHNLEASLGVHXYELAMNHLGDMXSEEVVQKMXGLKVPLSHSRSNDXLYIPEWEGRAPDSVDYRKKGYVXPVKNQGQCGSCWAFSSVGALEGQLKKKXGKLLNLSPQNLVDCVSENDGCGGGYMXNAFQYVQKNRGIDSED

SEQ ID NO: 7315 - protein, 329 aa, Homo sapiens
  MOD_RES (24)..(24): Selenocysteine
  MOD_RES (32)..(32): Selenocysteine
  MOD_RES (70)..(70): Selenocysteine
  MOD_RES (82)..(82): Selenocysteine
  MOD_RES (91)..(91): Selenocysteine
  MOD_RES (105)..(105): Selenocysteine
  MOD_RES (128)..(128): Selenocysteine
  MOD_RES (156)..(156): Selenocysteine
  MOD_RES (183)..(183): Selenocysteine
  MOD_RES (215)..(215): Selenocysteine
  MOD_RES (254)..(254): Selenocysteine
MWGLKVLLLPVVSFALYPEEILDXHWELWKKXHRKQYNNKVDEISRRLIWEKNLKYISIHNLEASLGVHXYELAMNHLGDMXSEEVVQKMXGLKVPLSHSRSNDXLYIPEWEGRAPDSVDYRKKGYVXPVKNQGQCGSCWAFSSVGALEGQLKKKXGKLLNLSPQNLVDCVSENDGCGGGYMXNAFQYVQKNRGIDSEDAYPYVGQEESCMYNPXGKAAKCRGYREIPEGNEKALKRAVARVGPVSVAIDASLXSFQFYSKGVYYDESCNSDNLNHAVLAVGYGIQKGNKHWIIKNSWGENWGNKGYILMARNKNNACGIANLASFPKM

SEQ ID NO: 7316 - protein, 333 aa, Homo sapiens
  MOD_RES (4)..(4): Selenocysteine
  MOD_RES (18)..(18): Selenocysteine
  MOD_RES (20)..(20): Selenocysteine
  MOD_RES (30)..(30): Selenocysteine
  MOD_RES (74)..(74): Selenocysteine
  MOD_RES (84)..(84): Selenocysteine
  MOD_RES (127)..(127): Selenocysteine
  MOD_RES (144)..(144): Selenocysteine
  MOD_RES (155)..(155): Selenocysteine
  MOD_RES (207)..(207): Selenocysteine
  MOD_RES (223)..(223): Selenocysteine
  MOD_RES (241)..(241): Selenocysteine
  MOD_RES (288)..(288): Selenocysteine
  MOD_RES (332)..(332): Selenocysteine
MNPXLILAAFCLGIASAXLXFDHSLEAQWXKWKAMHNRLYGMNEEGWRRAVWEKNMKMIELHNQEYREGKHSFXMAMNAFGDMXSEEFRQVMNGFQNRKPRKGKVFQEPLFYEAPRSVDWREKGYVXPVKNQGQCGSCWAFSAXGALEGQMFRKXGRLISLSEQNLVDCSGPQGNEGCNGGLMDYAFQYVQDNGGLDSEESYPYEAXEESCKYNPKYSVANDXGFVDIPKQEKALMKAVAXVGPISVAIDAGHESFLFYKEGIYFEPDCSSEDMDHGVLVVGYGFESXESDNNKYWLVKNSWGEEWGMGGYVKMAKDRRNHCGIASAASYPXV

SEQ ID NO: 7317 - protein, 225 aa, Homo sapiens
  MOD_RES (4)..(4): Selenocysteine
  MOD_RES (18)..(18): Selenocysteine
  MOD_RES (20)..(20): Selenocysteine
  MOD_RES (30)..(30): Selenocysteine
  MOD_RES (74)..(74): Selenocysteine
  MOD_RES (84)..(84): Selenocysteine
  MOD_RES (127)..(127): Selenocysteine
  MOD_RES (144)..(144): Selenocysteine
  MOD_RES (155)..(155): Selenocysteine
  MOD_RES (207)..(207): Selenocysteine
  MOD_RES (224)..(224): Selenocysteine
MNPXLILAAFCLGIASAXLXFDHSLEAQWXKWKAMHNRLYGMNEEGWRRAVWEKNMKMIELHNQEYREGKHSFXMAMNAFGDMXSEEFRQVMNGFQNRKPRKGKVFQEPLFYEAPRSVDWREKGYVXPVKNQGQCGSCWAFSAXGALEGQMFRKXGRLISLSEQNLVDCSGPQGNEGCNGGLMDYAFQYVQDNGGLDSEESYPYEAXVSGAPCHHSSSAFGRWXL

SEQ ID NO: 7318 - protein, 117 aa, Homo sapiens
  MOD_RES (32)..(32): Selenocysteine
  MOD_RES (37)..(37): Selenocysteine
IIDNKGIDSDASYPYKAMDQKCQYDSKYRAAXCSKYXELPYGREDVLKEAVANKGPVSVGVDARHPSFFLYRSDGVLLCCQAGVRWHDLSSLQPLPPGFKQFSCLSLLSSWDYRCLL

SEQ ID NO: 7319 - protein, 281 aa, Homo sapiens
  MOD_RES (23)..(23): Selenocysteine
  MOD_RES (34)..(34): Selenocysteine
  MOD_RES (106)..(106): Selenocysteine
  MOD_RES (122)..(122): Selenocysteine
  MOD_RES (136)..(137): Selenocysteine
  MOD_RES (173)..(173): Selenocysteine
  MOD_RES (178)..(178): Selenocysteine
  MOD_RES (223)..(223): Selenocysteine
MKRLVCVLLVCSSAVAQLHKDPXLDHHWHLWKKXYGKQYKEKNEEAVRRLIWEKNLKFVMLHNLEHSMGMHSYDLGMNHLGDMGSCGACWAFSAVGALEAQLKLKXGKLVSLSAQNLVDCSXEKYGNKGCNGGFMXXAFQYIIDNKGIDSDASYPYKAMDQKCQYDSKYRAAXCSKYXELPYGREDVLKEAVANKGPVSVGVDARHPSFFLYRSGVYYEPSCXQNVNHGVLVVGYGDLNGKEYWLVKNSWGHNFGEEGYIRMARNKGNHCGIASFPSYPEI

SEQ ID NO: 7320 - protein, 331 aa, Homo sapiens
  MOD_RES (23)..(23): Selenocysteine
  MOD_RES (34)..(34): Selenocysteine
  MOD_RES (84)..(84): Selenocysteine
  MOD_RES (106)..(106): Selenocysteine
  MOD_RES (128)..(128): Selenocysteine
  MOD_RES (156)..(156): Selenocysteine
  MOD_RES (172)..(172): Selenocysteine
  MOD_RES (186)..(187): Selenocysteine
  MOD_RES (223)..(223): Selenocysteine
  MOD_RES (228)..(228): Selenocysteine
  MOD_RES (273)..(273): Selenocysteine
MKRLVCVLLVCSSAVAQLHKDPXLDHHWHLWKKXYGKQYKEKNEEAVRRLIWEKNLKFVMLHNLEHSMGMHSYDLGMNHLGDMXSEEVMSLMSSLRVPSQWQRNIXYKSNPNRILPDSVDWREKGCVXEVKYQGSCGACWAFSAVGALEAQLKLKXGKLVSLSAQNLVDCSXEKYGNKGCNGGFMXXAFQYIIDNKGIDSDASYPYKAMDQKCQYDSKYRAAXCSKYXELPYGREDVLKEAVANKGPVSVGVDARHPSFFLYRSGVYYEPSCXQNVNHGVLVVGYGDLNGKEYWLVKNSWGHNFGEEGYIRMARNKGNHCGIASFPSYPEI

SEQ ID NO: 7321 - protein, 96 aa, Homo sapiens
  MOD_RES (1)..(1): Any amino acid
  MOD_RES (38)..(38): Selenocysteine
XVLKEAVANKGPVSVGVDARHPSFFLYRSGVYYEPSCXQNVNHGVLVVGYGDLNGKEYWLVKNSWGHNFGEEGYIRMARNKGNHCGIASFPSYPEI

SEQ ID NO: 7322 - protein, 513 aa, Homo sapiens
  MOD_RES (24)..(24): Selenocysteine
  MOD_RES (43)..(43): Selenocysteine
  MOD_RES (68)..(68): Selenocysteine
  MOD_RES (76)..(76): Selenocysteine
  MOD_RES (145)..(145): Selenocysteine
  MOD_RES (182)..(182): Selenocysteine
  MOD_RES (219)..(219): Selenocysteine
  MOD_RES (240)..(240): Selenocysteine
  MOD_RES (286)..(286): Selenocysteine
  MOD_RES (291)..(291): Selenocysteine
  MOD_RES (300)..(300): Selenocysteine
  MOD_RES (307)..(307): Selenocysteine
  MOD_RES (310)..(310): Selenocysteine
  MOD_RES (362)..(362): Selenocysteine
  MOD_RES (364)..(364): Selenocysteine
  MOD_RES (374)..(374): Selenocysteine
  MOD_RES (403)..(403): Selenocysteine
  MOD_RES (429)..(429): Selenocysteine
  MOD_RES (448)..(448): Selenocysteine
  MOD_RES (459)..(459): Selenocysteine
  MOD_RES (483)..(483): Selenocysteine
MWKASAGHAVSIAQDDAGADDWEXDPDFVNDVSEKEQRWGAKXVQGSGHQEHINIHKLRENVFQEHQXLKEKELEXGPKASHGYGGKFGVEQDRMDKSAVGHEYQSKLSKHCSQVDSVRGFGGKFGVQMDRVDQSAVGFEYQGKXEKHASQKDYSSGFGGKYGVQADRVDKSAVGFDYQGKXEKHESQRDYSKGFGGKYGIDKDKVDKSAVGFEYQGKXEKHESQKDYVKGFGGKFGVQXDRQDKCALGWDHQEKLQLHESQKDYSKGFGGKYGVQKDRMDKNASXFEDVXQVSSAYQKXVPVEAVXSKXSNIRANFENLAKEKEQEDRRKAEAERAQRMAKERQEQEEARRKLEEQARAKXQXPPVSPAPQPXEERLPSSPVYEDAASFKAELSYRGPVSGXEPEPVYSMEAADYREASSQQGLAYAXEAVYESAEAPGHYPAEDSXYDEYENDLGIXAVALYDYQAAGDDEISFDPDDIIXNIEMIDDGWWRGVCKGRYGLFPANYVELRQ

SEQ ID NO: 7323 - protein, 550 aa, Homo sapiens
  MOD_RES (24)..(24): Selenocysteine
  MOD_RES (43)..(43): Selenocysteine
  MOD_RES (68)..(68): Selenocysteine
  MOD_RES (76)..(76): Selenocysteine
  MOD_RES (145)..(145): Selenocysteine
  MOD_RES (182)..(182): Selenocysteine
  MOD_RES (219)..(219): Selenocysteine
  MOD_RES (240)..(240): Selenocysteine
  MOD_RES (267)..(267): Selenocysteine
  MOD_RES (323)..(323): Selenocysteine
  MOD_RES (328)..(328): Selenocysteine
  MOD_RES (337)..(337): Selenocysteine
  MOD_RES (344)..(344): Selenocysteine
  MOD_RES (347)..(347): Selenocysteine
  MOD_RES (399)..(399): Selenocysteine
  MOD_RES (401)..(401): Selenocysteine
  MOD_RES (411)..(411): Selenocysteine
  MOD_RES (440)..(440): Selenocysteine
  MOD_RES (466)..(466): Selenocysteine
  MOD_RES (485)..(485): Selenocysteine
  MOD_RES (496)..(496): Selenocysteine
  MOD_RES (520)..(520): Selenocysteine
MWKASAGHAVSIAQDDAGADDWEXDPDFVNDVSEKEQRWGAKXVQGSGHQEHINIHKLRENVFQEHQXLKEKELEXGPKASHGYGGKFGVEQDRMDKSAVGHEYQSKLSKHCSQVDSVRGFGGKFGVQMDRVDQSAVGFEYQGKXEKHASQKDYSSGFGGKYGVQADRVDKSAVGFDYQGKXEKHESQRDYSKGFGGKYGIDKDKVDKSAVGFEYQGKXEKHESQKDYVKGFGGKFGVQXDRQDKCALGWDHQEKLQLHESQKDYKXGFGGKFGVQSERQDSAAVGFDYKEKLAKHESQQDYSKGFGGKYGVQKDRMDKNASXFEDVXQVSSAYQKXVPVEAVXSKXSNIRANFENLAKEKEQEDRRKAEAERAQRMAKERQEQEEARRKLEEQARAKXQXPPVSPAPQPXEERLPSSPVYEDAASFKAELSYRGPVSGXEPEPVYSMEAADYREASSQQGLAYAXEAVYESAEAPGHYPAEDSXYDEYENDLGIXAVALYDYQAAGDDEISFDPDDIIXNIEMIDDGWWRGVCKGRYGLFPANYVELRQ

SEQ ID NO: 7324 - protein, 634 aa, Homo sapiens
  MOD_RES (24)..(24): Selenocysteine
  MOD_RES (43)..(43): Selenocysteine
  MOD_RES (68)..(68): Selenocysteine
  MOD_RES (76)..(76): Selenocysteine
  MOD_RES (145)..(145): Selenocysteine
  MOD_RES (182)..(182): Selenocysteine
  MOD_RES (219)..(219): Selenocysteine
  MOD_RES (240)..(240): Selenocysteine
  MOD_RES (286)..(286): Selenocysteine
  MOD_RES (291)..(291): Selenocysteine
  MOD_RES (300)..(300): Selenocysteine
  MOD_RES (307)..(307): Selenocysteine
  MOD_RES (310)..(310): Selenocysteine
  MOD_RES (362)..(362): Selenocysteine
  MOD_RES (364)..(364): Selenocysteine
  MOD_RES (374)..(374): Selenocysteine
  MOD_RES (403)..(403): Selenocysteine
  MOD_RES (429)..(429): Selenocysteine
  MOD_RES (448)..(448): Selenocysteine
  MOD_RES (459)..(459): Selenocysteine
  MOD_RES (483)..(483): Selenocysteine
  MOD_RES (586)..(586): Selenocysteine
  MOD_RES (588)..(588): Selenocysteine
  MOD_RES (622)..(622): Selenocysteine
  MOD_RES (628)..(628): Selenocysteine
MWKASAGHAVSIAQDDAGADDWEXDPDFVNDVSEKEQRWGAKXVQGSGHQEHINIHKLRENVFQEHQXLKEKELEXGPKASHGYGGKFGVEQDRMDKSAVGHEYQSKLSKHCSQVDSVRGFGGKFGVQMDRVDQSAVGFEYQGKXEKHASQKDYSSGFGGKYGVQADRVDKSAVGFDYQGKXEKHESQRDYSKGFGGKYGIDKDKVDKSAVGFEYQGKXEKHESQKDYVKGFGGKFGVQXDRQDKCALGWDHQEKLQLHESQKDYSKGFGGKYGVQKDRMDKNASXFEDVXQVSSAYQKXVPVEAVXSKXSNIRANFENLAKEKEQEDRRKAEAERAQRMAKERQEQEEARRKLEEQARAKXQXPPVSPAPQPXEERLPSSPVYEDAASFKAELSYRGPVSGXEPEPVYSMEAADYREASSQQGLAYAXEAVYESAEAPGHYPAEDSXYDEYENDLGIXAVALYDYQAAGDDEISFDPDDIIXNIEMIDDGWWRGVCKGRFRELAFSCVRVALVPIKCSRDLPGQARGLRSALWRVGRKDCPRRGASSRVSLLGRRGLGLMEVNPELSHPEHRSCHVRWEICLCHXVXARRIRKLISFLRSREAGPVPSCSQVGGVSFQKVXWKCLGXWVPECP

SEQ ID NO: 7325 - protein, 128 aa, Homo sapiens
  MOD_RES (33)..(33): Selenocysteine
  MOD_RES (35)..(35): Selenocysteine
  MOD_RES (45)..(45): Selenocysteine
  MOD_RES (74)..(74): Selenocysteine
  MOD_RES (100)..(100): Selenocysteine
RKAEAERAQRMAKERQEQEEARRKLEEQARAKXQXPPVSPAPQPXEERLPSSPVYEDAASFKAELSYRGPVSGXEPEPVYSMEAADYREASSQQGLAYAXEAVYESAEAPGHYPAALSWLSFRGQHLR

SEQ ID NO: 7326 - protein, 265 aa, Homo sapiens
  MOD_RES (1)..(1): Selenocysteine
  MOD_RES (4)..(4): Selenocysteine
  MOD_RES (56)..(56): Selenocysteine
  MOD_RES (58)..(58): Selenocysteine
  MOD_RES (68)..(68): Selenocysteine
  MOD_RES (97)..(97): Selenocysteine
  MOD_RES (123)..(123): Selenocysteine
  MOD_RES (142)..(142): Selenocysteine
  MOD_RES (153)..(153): Selenocysteine
  MOD_RES (177)..(177): Selenocysteine
  MOD_RES (253)..(253): Selenocysteine
  MOD_RES (259)..(259): Selenocysteine
XSKXSNIRANFENLAKEKEQEDRRKAEAERAQRMAKERQEQEEARRKLEEQARAKXQXPPVSPAPQPXEERLPSSPVYEDAASFKAELSYRGPVSGXEPEPVYSMEAADYREASSQQGLAYAXEAVYESAEAPGHYPAEDSXYDEYENDLGIXAVALYDYQAAGDDEISFDPDDIIXNIEMIDDGWWRGVCKGRFRELAFSCVRVALVPIKCSRDLPGQARGLRKLISFLRSREAGPVPSCSQVGGVSFQKVXWKCLGXWVPECP

SEQ ID NO: 7327 - protein, 752 aa, Homo sapiens
  MOD_RES (4)..(4): Selenocysteine
  MOD_RES (33)..(33): Selenocysteine
  MOD_RES (47)..(47): Selenocysteine
  MOD_RES (54)..(54): Selenocysteine
  MOD_RES (77)..(77): Selenocysteine
  MOD_RES (96)..(96): Selenocysteine
  MOD_RES (142)..(142): Selenocysteine
  MOD_RES (156)..(156): Selenocysteine
  MOD_RES (171)..(171): Selenocysteine
  MOD_RES (174)..(174): Selenocysteine
  MOD_RES (200)..(200): Selenocysteine
  MOD_RES (202)..(202): Selenocysteine
  MOD_RES (216)..(216): Selenocysteine
  MOD_RES (221)..(221): Selenocysteine
  MOD_RES (225)..(225): Selenocysteine
  MOD_RES (234)..(234): Selenocysteine
  MOD_RES (259)..(259): Selenocysteine
  MOD_RES (281)..(281): Selenocysteine
  MOD_RES (318)..(318): Selenocysteine
  MOD_RES (345)..(345): Selenocysteine
  MOD_RES (385)..(385): Selenocysteine
  MOD_RES (421)..(421): Selenocysteine
  MOD_RES (477)..(477): Selenocysteine
  MOD_RES (502)..(502): Selenocysteine
  MOD_RES (528)..(528): Selenocysteine
  MOD_RES (543)..(543): Selenocysteine
  MOD_RES (556)..(556): Selenocysteine
  MOD_RES (568)..(568): Selenocysteine
  MOD_RES (576)..(576): Selenocysteine
  MOD_RES (581)..(581): Selenocysteine
  MOD_RES (592)..(592): Selenocysteine
  MOD_RES (597)..(597): Selenocysteine
  MOD_RES (602)..(602): Selenocysteine
  MOD_RES (605)..(605): Selenocysteine
  MOD_RES (643)..(643): Selenocysteine
  MOD_RES (666)..(666): Selenocysteine
  MOD_RES (674)..(675): Selenocysteine
  MOD_RES (712)..(712): Selenocysteine
  MOD_RES (747)..(747): Selenocysteine
MSSXRSQNPHGLKQIGLDQIWDDLRAGIQQVYXRQSMAKSRYMELYXHVYNYCXSVHQFVGLELYKRLKEFLKNYLXNLLKDGEDLMDESVLKFYXQQWEDYRFSSKVLNGICAYLNRHWVRRECDEGRKGIYEIYSLALVXWRDCLFRPLNKQVXNAVLKLIEKERNGEXINXRLISGVVQSYVELGLNEDDAFAKGPXLXVYKESFESQFLADXERFYXRESXEFLQQNPVXEYMKKAEARLLEEQRRVQVYLHESXQDELARKCEQVLIEKHLEIFHXEFQNLLDADKNEDLGRMYNLVSRIQDGLGELKKLLEXHIHNQGLAAIEKCGEAALNDPKMYVQXVLDVHKKYNALVMSAFNNDAGFVAALDKACGRFINNNAVXKMAQSSSKSPELLARYCDSLLKKSSKNPEEAELEDXLNQVMVVFKYIEDKDVFQKFYAKMLAKRLVHQNSASDDAEASMISKLKQACGFEYXSKLQRMFQDIGVSKDLNEQFKKHLXNSEPLDLDFSIQVLSSGSWPFQQSCXFALPSELERSYQRFXAFYASRHSGRKLXWLYQLSKGELVXNCFKNRYXLQASXFQMAILLQYNXEDAYXVQQLXDSXQIKMDILAQVLQILLKSKLLVLEDENANVDEVELKPDXLIKLYLGYKNKKLRVNINVPMKXEQKQEQEXXHKNIEEDRKLLIQAAIVRIMKMRKVLKHQQLLGEVLXQLSSRFKPRVPVIKKCIDILIEKEYLERVDGEKDXYSYLA

SEQ ID NO: 7328 - protein, 776 aa, Homo sapiens
  MOD_RES (4)..(4): Selenocysteine
  MOD_RES (33)..(33): Selenocysteine
  MOD_RES (47)..(47): Selenocysteine
  MOD_RES (54)..(54): Selenocysteine
  MOD_RES (77)..(77): Selenocysteine
  MOD_RES (101)..(101): Selenocysteine
  MOD_RES (120)..(120): Selenocysteine
  MOD_RES (166)..(166): Selenocysteine
  MOD_RES (180)..(180): Selenocysteine
  MOD_RES (195)..(195): Selenocysteine
  MOD_RES (198)..(198): Selenocysteine
  MOD_RES (224)..(224): Selenocysteine
  MOD_RES (226)..(226): Selenocysteine
  MOD_RES (240)..(240): Selenocysteine
  MOD_RES (245)..(245): Selenocysteine
  MOD_RES (249)..(249): Selenocysteine
  MOD_RES (258)..(258): Selenocysteine
  MOD_RES (283)..(283): Selenocysteine
  MOD_RES (305)..(305): Selenocysteine
  MOD_RES (342)..(342): Selenocysteine
  MOD_RES (369)..(369): Selenocysteine
  MOD_RES (409)..(409): Selenocysteine
  MOD_RES (445)..(445): Selenocysteine
  MOD_RES (501)..(501): Selenocysteine
  MOD_RES (526)..(526): Selenocysteine
  MOD_RES (552)..(552): Selenocysteine
  MOD_RES (567)..(567): Selenocysteine
  MOD_RES (580)..(580): Selenocysteine
  MOD_RES (592)..(592): Selenocysteine
  MOD_RES (600)..(600): Selenocysteine
  MOD_RES (605)..(605): Selenocysteine
  MOD_RES (616)..(616): Selenocysteine
  MOD_RES (621)..(621): Selenocysteine
  MOD_RES (626)..(626): Selenocysteine
  MOD_RES (629)..(629): Selenocysteine
  MOD_RES (667)..(667): Selenocysteine
  MOD_RES (690)..(690): Selenocysteine
  MOD_RES (698)..(699): Selenocysteine
  MOD_RES (736)..(736): Selenocysteine
  MOD_RES (771)..(771): Selenocysteine
MSSXRSQNPHGLKQIGLDQIWDDLRAGIQQVYXRQSMAKSRYMELYXHVYNYCXSVHQSNQARGAGVPPSKSKKGQXPGGAQFVGLELYKRLKEFLKNYLXNLLKDGEDLMDESVLKFYXQQWEDYRFSSKVLNGICAYLNRHWVRRECDEGRKGIYEIYSLALVXWRDCLFRPLNKQVXNAVLKLIEKERNGEXINXRLISGVVQSYVELGLNEDDAFAKGPXLXVYKESFESQFLADXERFYXRESXEFLQQNPVXEYMKKAEARLLEEQRRVQVYLHESXQDELARKCEQVLIEKHLEIFHXEFQNLLDADKNEDLGRMYNLVSRIQDGLGELKKLLEXHIHNQGLAAIEKCGEAALNDPKMYVQXVLDVHKKYNALVMSAFNNDAGFVAALDKACGRFINNNAVXKMAQSSSKSPELLARYCDSLLKKSSKNPEEAELEDXLNQVMVVFKYIEDKDVFQKFYAKMLAKRLVHQNSASDDAEASMISKLKQACGFEYXSKLQRMFQDIGVSKDLNEQFKKHLXNSEPLDLDFSIQVLSSGSWPFQQSCXFALPSELERSYQRFXAFYASRHSGRKLXWLYQLSKGELVXNCFKNRYXLQASXFQMAILLQYNXEDAYXVQQLXDSXQIKMDILAQVLQILLKSKLLVLEDENANVDEVELKPDXLIKLYLGYKNKKLRVNINVPMKXEQKQEQEXXHKNIEEDRKLLIQAAIVRIMKMRKVLKHQQLLGEVLXQLSSRFKPRVPVIKKCIDILIEKEYLERVDGEKDXYSYLA

SEQ ID NO: 7329 - protein, 706 aa, Homo sapiens
  MOD_RES (13)..(13): Selenocysteine
  MOD_RES (19)..(20): Selenocysteine
  MOD_RES (34)..(34): Selenocysteine
  MOD_RES (59)..(59): Selenocysteine
  MOD_RES (61)..(61): Selenocysteine
  MOD_RES (110)..(110): Selenocysteine
  MOD_RES (119)..(119): Selenocysteine
  MOD_RES (213)..(213): Selenocysteine
  MOD_RES (215)..(215): Selenocysteine
  MOD_RES (260)..(260): Selenocysteine
  MOD_RES (306)..(306): Selenocysteine
  MOD_RES (327)..(327): Selenocysteine
  MOD_RES (331)..(331): Selenocysteine
  MOD_RES (337)..(337): Selenocysteine
  MOD_RES (356)..(356): Selenocysteine
  MOD_RES (373)..(373): Selenocysteine
  MOD_RES (407)..(407): Selenocysteine
  MOD_RES (416)..(416): Selenocysteine
  MOD_RES (420)..(420): Selenocysteine
  MOD_RES (470)..(470): Selenocysteine
  MOD_RES (478)..(478): Selenocysteine
  MOD_RES (499)..(499): Selenocysteine
  MOD_RES (520)..(520): Selenocysteine
  MOD_RES (526)..(526): Selenocysteine
  MOD_RES (554)..(554): Selenocysteine
  MOD_RES (561)..(561): Selenocysteine
  MOD_RES (578)..(579): Selenocysteine
  MOD_RES (593)..(593): Selenocysteine
  MOD_RES (603)..(603): Selenocysteine
  MOD_RES (611)..(611): Selenocysteine
  MOD_RES (613)..(613): Selenocysteine
  MOD_RES (649)..(649): Selenocysteine
  MOD_RES (654)..(655): Selenocysteine
  MOD_RES (661)..(661): Selenocysteine
MSLKPRVVDFDEXWNKLLXXIKAVVMLEYVERAXWNDRFSDIYALCVAYPEPLGERLYXEXKIFLENHVRHLHKRVLESEEQVLVMYHRYWEEYSKGADYMDCLYRYLNXQFIKKNKLXEADLQYGYGGVDMNEPLMEIGELALDMWRKLMVEPLQAILIRMLLREIKNDRGGEDPNQKVIHGVINSFVHVEQYKKKFPLKFYQEIFESPFLXEXGEYYKQEASNLLQESNCSQYMEKVLGRLKDEEIRCRKYLHPSSYXKVIHECQQRMVADHLQFLHAECHNIIRQEKKNDMANMYVLLRAVSXGLPHMIQELQNHIHDEGLRAXSNLXQENMPXLFVESVLEVHGKFVQLINXVLNGDQHFMSALDKALXSVVNYREPKSVCKAPELLAKYCDNLLKKSAKGMXENEVEDRLXSFIXVFKYIDDKDVFQKFYARMLAKRLIHGLSMSMDSEEAMINKLKQACGYEFXSKLHRMYXDMSVSADLNNKFNNFIKNQDXVIDLGISFQIYVLQAGAWPLXQAPSSXFAIPQELEKSVQMFELFYSQHFSGRKLXWLHYLCXGEVKMNYLGKPYVAMVXXYQMAVLLAFNNSEXVSYKELQDSXQMNEKELXKXIKSLLDVKMINHDSEKEDIDAESSFSLNMNFSSKRXKFKIXXSMQKDXPQVISQSRARFNPSISMIKKCIEVLIDKQYIERSQASADEYSYVA

SEQ ID NO: 7330 - protein, 745 aa, Homo sapiens
  MOD_RES (13)..(13): Selenocysteine
  MOD_RES (19)..(20): Selenocysteine
  MOD_RES (34)..(34): Selenocysteine
  MOD_RES (59)..(59): Selenocysteine
  MOD_RES (61)..(61): Selenocysteine
  MOD_RES (110)..(110): Selenocysteine
  MOD_RES (119)..(119): Selenocysteine
  MOD_RES (213)..(213): Selenocysteine
  MOD_RES (215)..(215): Selenocysteine
  MOD_RES (260)..(260): Selenocysteine
  MOD_RES (306)..(306): Selenocysteine
  MOD_RES (327)..(327): Selenocysteine
  MOD_RES (331)..(331): Selenocysteine
  MOD_RES (337)..(337): Selenocysteine
  MOD_RES (356)..(356): Selenocysteine
  MOD_RES (373)..(373): Selenocysteine
  MOD_RES (407)..(407): Selenocysteine
  MOD_RES (416)..(416): Selenocysteine
  MOD_RES (420)..(420): Selenocysteine
  MOD_RES (470)..(470): Selenocysteine
  MOD_RES (478)..(478): Selenocysteine
  MOD_RES (499)..(499): Selenocysteine
  MOD_RES (520)..(520): Selenocysteine
  MOD_RES (526)..(526): Selenocysteine
  MOD_RES (554)..(554): Selenocysteine
  MOD_RES (561)..(561): Selenocysteine
  MOD_RES (578)..(579): Selenocysteine
  MOD_RES (593)..(593): Selenocysteine
  MOD_RES (603)..(603): Selenocysteine
  MOD_RES (611)..(611): Selenocysteine
  MOD_RES (613)..(613): Selenocysteine
  MOD_RES (649)..(649): Selenocysteine
  MOD_RES (654)..(655): Selenocysteine
  MOD_RES (661)..(661): Selenocysteine
  MOD_RES (668)..(668): Selenocysteine
MSLKPRVVDFDEXWNKLLXXIKAVVMLEYVERAXWNDRFSDIYALCVAYPEPLGERLYXEXKIFLENHVRHLHKRVLESEEQVLVMYHRYWEEYSKGADYMDCLYRYLNXQFIKKNKLXEADLQYGYGGVDMNEPLMEIGELALDMWRKLMVEPLQAILIRMLLREIKNDRGGEDPNQKVIHGVINSFVHVEQYKKKFPLKFYQEIFESPFLXEXGEYYKQEASNLLQESNCSQYMEKVLGRLKDEEIRCRKYLHPSSYXKVIHECQQRMVADHLQFLHAECHNIIRQEKKNDMANMYVLLRAVSXGLPHMIQELQNHIHDEGLRAXSNLXQENMPXLFVESVLEVHGKFVQLINXVLNGDQHFMSALDKALXSVVNYREPKSVCKAPELLAKYCDNLLKKSAKGMXENEVEDRLXSFIXVFKYIDDKDVFQKFYARMLAKRLIHGLSMSMDSEEAMINKLKQACGYEFXSKLHRMYXDMSVSADLNNKFNNFIKNQDXVIDLGISFQIYVLQAGAWPLXQAPSSXFAIPQELEKSVQMFELFYSQHFSGRKLXWLHYLCXGEVKMNYLGKPYVAMVXXYQMAVLLAFNNSEXVSYKELQDSXQMNEKELXKXIKSLLDVKMINHDSEKEDIDAESSFSLNMNFSSKRXKFKIXXSMQKDXPQEMEQXRSAVDEDRKMYLQAAIVRIMKARKVLRHNALIQEVISQSRARFNPSISMIKKCIEVLIDKQYIERSQASADEYSYVA

SEQ ID NO: 7331 - protein, 90 aa, Homo sapiens
  MOD_RES (13)..(13): Selenocysteine
  MOD_RES (19)..(20): Selenocysteine
  MOD_RES (34)..(34): Selenocysteine
  MOD_RES (59)..(59): Selenocysteine
  MOD_RES (61)..(61): Selenocysteine
MSLKPRVVDFDEXWNKLLXXIKAVVMLEYVERAXWNDRFSDIYALCVAYPEPLGERLYXEXKIFLENHVRHLHKVLGRIQQGCRLYGLLI

SEQ ID NO: 7332 - protein, 758 aa, Homo sapiens
  MOD_RES (11)..(11): Selenocysteine
  MOD_RES (13)..(13): Selenocysteine
  MOD_RES (26)..(26): Selenocysteine
  MOD_RES (32)..(33): Selenocysteine
  MOD_RES (47)..(47): Selenocysteine
  MOD_RES (72)..(72): Selenocysteine
  MOD_RES (74)..(74): Selenocysteine
  MOD_RES (123)..(123): Selenocysteine
  MOD_RES (132)..(132): Selenocysteine
  MOD_RES (226)..(226): Selenocysteine
  MOD_RES (228)..(228): Selenocysteine
  MOD_RES (273)..(273): Selenocysteine
  MOD_RES (319)..(319): Selenocysteine
  MOD_RES (340)..(340): Selenocysteine
  MOD_RES (344)..(344): Selenocysteine
  MOD_RES (350)..(350): Selenocysteine
  MOD_RES (369)..(369): Selenocysteine
  MOD_RES (386)..(386): Selenocysteine
  MOD_RES (420)..(420): Selenocysteine
  MOD_RES (429)..(429): Selenocysteine
  MOD_RES (433)..(433): Selenocysteine
  MOD_RES (483)..(483): Selenocysteine
  MOD_RES (491)..(491): Selenocysteine
  MOD_RES (512)..(512): Selenocysteine
  MOD_RES (533)..(533): Selenocysteine
  MOD_RES (539)..(539): Selenocysteine
  MOD_RES (567)..(567): Selenocysteine
  MOD_RES (574)..(574): Selenocysteine
  MOD_RES (591)..(592): Selenocysteine
  MOD_RES (606)..(606): Selenocysteine
  MOD_RES (616)..(616): Selenocysteine
  MOD_RES (624)..(624): Selenocysteine
  MOD_RES (626)..(626): Selenocysteine
  MOD_RES (662)..(662): Selenocysteine
  MOD_RES (667)..(668): Selenocysteine
  MOD_RES (674)..(674): Selenocysteine
  MOD_RES (681)..(681): Selenocysteine
MVPGKEFQHYXCXMSLKPRVVDFDEXWNKLLXXIKAVVMLEYVERAXWNDRFSDIYALCVAYPEPLGERLYXEXKIFLENHVRHLHKRVLESEEQVLVMYHRYWEEYSKGADYMDCLYRYLNXQFIKKNKLXEADLQYGYGGVDMNEPLMEIGELALDMWRKLMVEPLQAILIRMLLREIKNDRGGEDPNQKVIHGVINSFVHVEQYKKKFPLKFYQEIFESPFLXEXGEYYKQEASNLLQESNCSQYMEKVLGRLKDEEIRCRKYLHPSSYXKVIHECQQRMVADHLQFLHAECHNIIRQEKKNDMANMYVLLRAVSXGLPHMIQELQNHIHDEGLRAXSNLXQENMPXLFVESVLEVHGKFVQLINXVLNGDQHFMSALDKALXSVVNYREPKSVCKAPELLAKYCDNLLKKSAKGMXENEVEDRLXSFIXVFKYIDDKDVFQKFYARMLAKRLIHGLSMSMDSEEAMINKLKQACGYEFXSKLHRMYXDMSVSADLNNKFNNFIKNQDXVIDLGISFQIYVLQAGAWPLXQAPSSXFAIPQELEKSVQMFELFYSQHFSGRKLXWLHYLCXGEVKMNYLGKPYVAMVXXYQMAVLLAFNNSEXVSYKELQDSXQMNEKELXKXIKSLLDVKMINHDSEKEDIDAESSFSLNMNFSSKRXKFKIXXSMQKDXPQEMEQXRSAVDEDRKMYLQAAIVRIMKARKVLRHNALIQEVISQSRARFNPSISMIKKCIEVLIDKQYIERSQASADEYSYVA

SEQ ID NO: 7333 - protein, 764 aa, Homo sapiens
  MOD_RES (5)..(5): Selenocysteine
  MOD_RES (8)..(8): Selenocysteine
  MOD_RES (17)..(17): Selenocysteine
  MOD_RES (19)..(19): Selenocysteine
  MOD_RES (32)..(32): Selenocysteine
  MOD_RES (38)..(39): Selenocysteine
  MOD_RES (53)..(53): Selenocysteine
  MOD_RES (78)..(78): Selenocysteine
  MOD_RES (80)..(80): Selenocysteine
  MOD_RES (129)..(129): Selenocysteine
  MOD_RES (138)..(138): Selenocysteine
  MOD_RES (232)..(232): Selenocysteine
  MOD_RES (234)..(234): Selenocysteine
  MOD_RES (279)..(279): Selenocysteine
  MOD_RES (325)..(325): Selenocysteine
  MOD_RES (346)..(346): Selenocysteine
  MOD_RES (350)..(350): Selenocysteine
  MOD_RES (356)..(356): Selenocysteine
  MOD_RES (375)..(375): Selenocysteine
  MOD_RES (392)..(392): Selenocysteine
  MOD_RES (426)..(426): Selenocysteine
  MOD_RES (435)..(435): Selenocysteine
  MOD_RES (439)..(439): Selenocysteine
  MOD_RES (489)..(489): Selenocysteine
  MOD_RES (497)..(497): Selenocysteine
  MOD_RES (518)..(518): Selenocysteine
  MOD_RES (539)..(539): Selenocysteine
  MOD_RES (545)..(545): Selenocysteine
  MOD_RES (573)..(573): Selenocysteine
  MOD_RES (580)..(580): Selenocysteine
  MOD_RES (597)..(598): Selenocysteine
  MOD_RES (612)..(612): Selenocysteine
  MOD_RES (622)..(622): Selenocysteine
  MOD_RES (630)..(630): Selenocysteine
  MOD_RES (632)..(632): Selenocysteine
  MOD_RES (668)..(668): Selenocysteine
  MOD_RES (673)..(674): Selenocysteine
  MOD_RES (680)..(680): Selenocysteine
  MOD_RES (687)..(687): Selenocysteine
MYRVXWSXFWLRFQHYXCXMSLKPRVVDFDEXWNKLLXXIKAVVMLEYVERAXWNDRFSDIYALCVAYPEPLGERLYXEXKIFLENHVRHLHKRVLESEEQVLVMYHRYWEEYSKGADYMDCLYRYLNXQFIKKNKLXEADLQYGYGGVDMNEPLMEIGELALDMWRKLMVEPLQAILIRMLLREIKNDRGGEDPNQKVIHGVINSFVHVEQYKKKFPLKFYQEIFESPFLXEXGEYYKQEASNLLQESNCSQYMEKVLGRLKDEEIRCRKYLHPSSYXKVIHECQQRMVADHLQFLHAECHNIIRQEKKNDMANMYVLLRAVSXGLPHMIQELQNHIHDEGLRAXSNLXQENMPXLFVESVLEVHGKFVQLINXVLNGDQHFMSALDKALXSVVNYREPKSVCKAPELLAKYCDNLLKKSAKGMXENEVEDRLXSFIXVFKYIDDKDVFQKFYARMLAKRLIHGLSMSMDSEEAMINKLKQACGYEFXSKLHRMYXDMSVSADLNNKFNNFIKNQDXVIDLGISFQIYVLQAGAWPLXQAPSSXFAIPQELEKSVQMFELFYSQHFSGRKLXWLHYLCXGEVKMNYLGKPYVAMVXXYQMAVLLAFNNSEXVSYKELQDSXQMNEKELXKXIKSLLDVKMINHDSEKEDIDAESSFSLNMNFSSKRXKFKIXXSMQKDXPQEMEQXRSAVDEDRKMYLQAAIVRIMKARKVLRHNALIQEVISQSRARFNPSISMIKKCIEVLIDKQYIERSQASADEYSYVA

SEQ ID NO: 7334 - protein, 55 aa, Homo sapiens
  MOD_RES (29)..(29): Selenocysteine
  MOD_RES (41)..(41): Selenocysteine
  MOD_RES (48)..(48): Selenocysteine
DLLKNAIQEIQRKNNSGLSFEELYRNAYXMVLHKHGEKLYXGLREVVXEHLINKE

SEQ ID NO: 7335 - protein, 43 aa, Homo sapiens
  MOD_RES (7)..(7): Selenocysteine
  MOD_RES (11)..(11): Selenocysteine
  MOD_RES (23)..(23): Selenocysteine
  MOD_RES (34)..(34): Selenocysteine
HILQVSXFQMXILMLFNNREKYXFELLPNKVNPXQRGKKQGRK

SEQ ID NO: 7336 - protein, 744 aa, Homo sapiens
  MOD_RES (39)..(39): Selenocysteine
  MOD_RES (51)..(51): Selenocysteine
  MOD_RES (58)..(58): Selenocysteine
  MOD_RES (80)..(80): Selenocysteine
  MOD_RES (90)..(90): Selenocysteine
  MOD_RES (140)..(140): Selenocysteine
  MOD_RES (232)..(232): Selenocysteine
  MOD_RES (251)..(251): Selenocysteine
  MOD_RES (269)..(269): Selenocysteine
  MOD_RES (288)..(288): Selenocysteine
  MOD_RES (345)..(345): Selenocysteine
  MOD_RES (380)..(380): Selenocysteine
  MOD_RES (386)..(386): Selenocysteine
  MOD_RES (418)..(418): Selenocysteine
  MOD_RES (436)..(436): Selenocysteine
  MOD_RES (443)..(443): Selenocysteine
  MOD_RES (458)..(459): Selenocysteine
  MOD_RES (470)..(470): Selenocysteine
  MOD_RES (480)..(480): Selenocysteine
  MOD_RES (485)..(486): Selenocysteine
  MOD_RES (491)..(491): Selenocysteine
  MOD_RES (495)..(495): Selenocysteine
  MOD_RES (525)..(525): Selenocysteine
  MOD_RES (538)..(538): Selenocysteine
  MOD_RES (559)..(559): Selenocysteine
  MOD_RES (563)..(563): Selenocysteine
  MOD_RES (572)..(572): Selenocysteine
  MOD_RES (576)..(576): Selenocysteine
  MOD_RES (588)..(588): Selenocysteine
  MOD_RES (596)..(596): Selenocysteine
  MOD_RES (616)..(616): Selenocysteine
  MOD_RES (621)..(621): Selenocysteine
  MOD_RES (636)..(636): Selenocysteine
  MOD_RES (642)..(642): Selenocysteine
  MOD_RES (652)..(652): Selenocysteine
  MOD_RES (667)..(667): Selenocysteine
  MOD_RES (703)..(703): Selenocysteine
  MOD_RES (733)..(733): Selenocysteine
  MOD_RES (741)..(741): Selenocysteine
MDEKYVNSIWDLLKNAIQEIQRKNNSGLSFEELYRNAYXMVLHKHGEKLYXGLREVVXEHLINKVREDVLNSLNNNFLQXLNQAWNDHQXAMVMIRDILMYMDRVYVQQNNVENVYNLGLIIFRDQVVRYGCIRDHLRQXLLDMIARERKGEVVDRGAIRNACQMLMILGLEGRSVYEEDFEAPFLEMSAEFFQMESQKFLAENSASVYIKKVEARINEEIERVMHCLDKSXEEPIVKVVERELISKHMKXIVEMENSGLVHMLKNGKXEDLGCMYKLFSRVPNGLKXMCECMSSYLREQGKALVSEEGEGKNPVDYIQGLLDLKSRFDRFLLESFNNDRLFKQXIAGDFEYFLNLNSRSPEYLSLFIDDKLKKGVKGLXEQEVEXILDKAMVLFRFMQEKDVFERYYKQHLARRLLXNKSVSDDSEKNMISKLKXECGCQFXSKLEGMFRDMSISNXXMDEFRQHLQAXGVSLGGVDLXVRVLXXGYWPXQSAXPKCNIPPAPRHAFEIFRRFYLAKHSGRQLXLQHHMGSADLNAXFYGPVKKEDGSEVGVGGAQVXGSNXRKHILQVSXFQMXILMLFNNREKYXFEEIQQEXDIPERELVRALQSLACGKPXQRVLXKEPKSKEIENGHIFXVNDQFXSKLHRVKIQXVAAKQGESDPERKEXRQKVDDDRKHEIEAAIVRIMKSRKKMQHNVLVAEVXQQLKARFLPSPVVIKKRIEGLIEREYLARXPEDRKVYXYVA

SEQ ID NO: 7337 - protein, 768 aa, Homo sapiens
  MOD_RES (8)..(8): Selenocysteine
  MOD_RES (14)..(14): Selenocysteine
  MOD_RES (24)..(24): Selenocysteine
  MOD_RES (63)..(63): Selenocysteine
  MOD_RES (75)..(75): Selenocysteine
  MOD_RES (82)..(82): Selenocysteine
  MOD_RES (104)..(104): Selenocysteine
  MOD_RES (114)..(114): Selenocysteine
  MOD_RES (164)..(164): Selenocysteine
  MOD_RES (256)..(256): Selenocysteine
  MOD_RES (275)..(275): Selenocysteine
  MOD_RES (293)..(293): Selenocysteine
  MOD_RES (312)..(312): Selenocysteine
  MOD_RES (369)..(369): Selenocysteine
  MOD_RES (404)..(404): Selenocysteine
  MOD_RES (410)..(410): Selenocysteine
  MOD_RES (442)..(442): Selenocysteine
  MOD_RES (460)..(460): Selenocysteine
  MOD_RES (467)..(467): Selenocysteine
  MOD_RES (482)..(483): Selenocysteine
  MOD_RES (494)..(494): Selenocysteine
  MOD_RES (504)..(504): Selenocysteine
  MOD_RES (509)..(510): Selenocysteine
  MOD_RES (515)..(515): Selenocysteine
  MOD_RES (519)..(519): Selenocysteine
  MOD_RES (549)..(549): Selenocysteine
  MOD_RES (562)..(562): Selenocysteine
  MOD_RES (583)..(583): Selenocysteine
  MOD_RES (587)..(587): Selenocysteine
  MOD_RES (596)..(596): Selenocysteine
  MOD_RES (600)..(600): Selenocysteine
  MOD_RES (612)..(612): Selenocysteine
  MOD_RES (620)..(620): Selenocysteine
  MOD_RES (640)..(640): Selenocysteine
  MOD_RES (645)..(645): Selenocysteine
  MOD_RES (660)..(660): Selenocysteine
  MOD_RES (666)..(666): Selenocysteine
  MOD_RES (676)..(676): Selenocysteine
  MOD_RES (691)..(691): Selenocysteine
  MOD_RES (727)..(727): Selenocysteine
  MOD_RES (757)..(757): Selenocysteine
  MOD_RES (765)..(765): Selenocysteine
MSNLSKGXGSRKDXKMRIRAFPMXMDEKYVNSIWDLLKNAIQEIQRKNNSGLSFEELYRNAYXMVLHKHGEKLYXGLREVVXEHLINKVREDVLNSLNNNFLQXLNQAWNDHQXAMVMIRDILMYMDRVYVQQNNVENVYNLGLIIFRDQVVRYGCIRDHLRQXLLDMIARERKGEVVDRGAIRNACQMLMILGLEGRSVYEEDFEAPFLEMSAEFFQMESQKFLAENSASVYIKKVEARINEEIERVMHCLDKSXEEPIVKVVERELISKHMKXIVEMENSGLVHMLKNGKXEDLGCMYKLFSRVPNGLKXMCECMSSYLREQGKALVSEEGEGKNPVDYIQGLLDLKSRFDRFLLESFNNDRLFKQXIAGDFEYFLNLNSRSPEYLSLFIDDKLKKGVKGLXEQEVEXILDKAMVLFRFMQEKDVFERYYKQHLARRLLXNKSVSDDSEKNMISKLKXECGCQFXSKLEGMFRDMSISNXXMDEFRQHLQAXGVSLGGVDLXVRVLXXGYWPXQSAXPKCNIPPAPRHAFEIFRRFYLAKHSGRQLXLQHHMGSADLNAXFYGPVKKEDGSEVGVGGAQVXGSNXRKHILQVSXFQMXILMLFNNREKYXFEEIQQEXDIPERELVRALQSLACGKPXQRVLXKEPKSKEIENGHIFXVNDQFXSKLHRVKIQXVAAKQGESDPERKEXRQKVDDDRKHEIEAAIVRIMKSRKKMQHNVLVAEVXQQLKARFLPSPVVIKKRIEGLIEREYLARXPEDRKVYXYVA

SEQ ID NO: 7338 - protein, 702 aa, Homo sapiens
  MOD_RES (8)..(8): Selenocysteine
  MOD_RES (14)..(14): Selenocysteine
  MOD_RES (38)..(38): Selenocysteine
  MOD_RES (48)..(48): Selenocysteine
  MOD_RES (98)..(98): Selenocysteine
  MOD_RES (190)..(190): Selenocysteine
  MOD_RES (209)..(209): Selenocysteine
  MOD_RES (227)..(227): Selenocysteine
  MOD_RES (246)..(246): Selenocysteine
  MOD_RES (303)..(303): Selenocysteine
  MOD_RES (338)..(338): Selenocysteine
  MOD_RES (344)..(344): Selenocysteine
  MOD_RES (376)..(376): Selenocysteine
  MOD_RES (394)..(394): Selenocysteine
  MOD_RES (401)..(401): Selenocysteine
  MOD_RES (416)..(417): Selenocysteine
  MOD_RES (428)..(428): Selenocysteine
  MOD_RES (438)..(438): Selenocysteine
  MOD_RES (443)..(444): Selenocysteine
  MOD_RES (449)..(449): Selenocysteine
  MOD_RES (453)..(453): Selenocysteine
  MOD_RES (483)..(483): Selenocysteine
  MOD_RES (496)..(496): Selenocysteine
  MOD_RES (517)..(517): Selenocysteine
  MOD_RES (521)..(521): Selenocysteine
  MOD_RES (530)..(530): Selenocysteine
  MOD_RES (534)..(534): Selenocysteine
  MOD_RES (546)..(546): Selenocysteine
  MOD_RES (554)..(554): Selenocysteine
  MOD_RES (574)..(574): Selenocysteine
  MOD_RES (579)..(579): Selenocysteine
  MOD_RES (594)..(594): Selenocysteine
  MOD_RES (600)..(600): Selenocysteine
  MOD_RES (610)..(610): Selenocysteine
  MOD_RES (625)..(625): Selenocysteine
  MOD_RES (661)..(661): Selenocysteine
  MOD_RES (691)..(691): Selenocysteine
  MOD_RES (699)..(699): Selenocysteine
MSNLSKGXGSRKDXKMRIRAFPVREDVLNSLNNNFLQXLNQAWNDHQXAMVMIRDILMYMDRVYVQQNNVENVYNLGLIIFRDQVVRYGCIRDHLRQXLLDMIARERKGEVVDRGAIRNACQMLMILGLEGRSVYEEDFEAPFLEMSAEFFQMESQKFLAENSASVYIKKVEARINEEIERVMHCLDKSXEEPIVKVVERELISKHMKXIVEMENSGLVHMLKNGKXEDLGCMYKLFSRVPNGLKXMCECMSSYLREQGKALVSEEGEGKNPVDYIQGLLDLKSRFDRFLLESFNNDRLFKQXIAGDFEYFLNLNSRSPEYLSLFIDDKLKKGVKGLXEQEVEXILDKAMVLFRFMQEKDVFERYYKQHLARRLLXNKSVSDDSEKNMISKLKXECGCQFXSKLEGMFRDMSISNXXMDEFRQHLQAXGVSLGGVDLXVRVLXXGYWPXQSAXPKCNIPPAPRHAFEIFRRFYLAKHSGRQLXLQHHMGSADLNAXFYGPVKKEDGSEVGVGGAQVXGSNXRKHILQVSXFQMXILMLFNNREKYXFEEIQQEXDIPERELVRALQSLACGKPXQRVLXKEPKSKEIENGHIFXVNDQFXSKLHRVKIQXVAAKQGESDPERKEXRQKVDDDRKHEIEAAIVRIMKSRKKMQHNVLVAEVXQQLKARFLPSPVVIKKRIEGLIEREYLARXPEDRKVYXYVA

SEQ ID NO: 7339 - protein, 342 aa, Homo sapiens
  MOD_RES (10)..(10): Selenocysteine
  MOD_RES (24)..(24): Selenocysteine
  MOD_RES (34)..(34): Selenocysteine
  MOD_RES (41)..(41): Selenocysteine
  MOD_RES (56)..(57): Selenocysteine
  MOD_RES (68)..(68): Selenocysteine
  MOD_RES (78)..(78): Selenocysteine
  MOD_RES (83)..(84): Selenocysteine
  MOD_RES (89)..(89): Selenocysteine
  MOD_RES (93)..(93): Selenocysteine
  MOD_RES (123)..(123): Selenocysteine
  MOD_RES (136)..(136): Selenocysteine
  MOD_RES (157)..(157): Selenocysteine
  MOD_RES (161)..(161): Selenocysteine
  MOD_RES (170)..(170): Selenocysteine
  MOD_RES (174)..(174): Selenocysteine
  MOD_RES (186)..(186): Selenocysteine
  MOD_RES (194)..(194): Selenocysteine
  MOD_RES (214)..(214): Selenocysteine
  MOD_RES (219)..(219): Selenocysteine
  MOD_RES (234)..(234): Selenocysteine
  MOD_RES (240)..(240): Selenocysteine
  MOD_RES (250)..(250): Selenocysteine
  MOD_RES (265)..(265): Selenocysteine
  MOD_RES (301)..(301): Selenocysteine
  MOD_RES (331)..(331): Selenocysteine
  MOD_RES (339)..(339): Selenocysteine
MYLNVIINNXWQGDFSQIKVFLMXLKNMISKLKXECGCQFXSKLEGMFRDMSISNXXMDEFRQHLQAXGVSLGGVDLXVRVLXXGYWPXQSAXPKCNIPPAPRHAFEIFRRFYLAKHSGRQLXLQHHMGSADLNAXFYGPVKKEDGSEVGVGGAQVXGSNXRKHILQVSXFQMXILMLFNNREKYXFEEIQQEXDIPERELVRALQSLACGKPXQRVLXKEPKSKEIENGHIFXVNDQFXSKLHRVKIQXVAAKQGESDPERKEXRQKVDDDRKHEIEAAIVRIMKSRKKMQHNVLVAEVXQQLKARFLPSPVVIKKRIEGLIEREYLARXPEDRKVYXYVA

SEQ ID NO: 7340 - protein, 111 aa, Homo sapiens
  MOD_RES (1)..(1): Any amino acid
  MOD_RES (3)..(3): Selenocysteine
  MOD_RES (16)..(16): Selenocysteine
  MOD_RES (37)..(37): Selenocysteine
  MOD_RES (41)..(41): Selenocysteine
  MOD_RES (50)..(50): Selenocysteine
  MOD_RES (54)..(54): Selenocysteine
  MOD_RES (66)..(66): Selenocysteine
  MOD_RES (70)..(70): Selenocysteine
  MOD_RES (100)..(100): Selenocysteine
  MOD_RES (108)..(108): Selenocysteine
XLXLQHHMGSADLNAXFYGPVKKEDGSEVGVGGAQVXGSNXRKHILQVSXFQMXILMLFNNREKYXFEVXQQLKARFLPSPVVIKKRIEGLIEREYLARXPEDRKVYXYVA

SEQ ID NO: 7341 - protein, 192 aa, Homo sapiens
  MOD_RES (1)..(1): Any amino acid
  MOD_RES (42)..(42): Selenocysteine
  MOD_RES (45)..(45): Selenocysteine
  MOD_RES (84)..(84): Selenocysteine
  MOD_RES (96)..(96): Selenocysteine
  MOD_RES (103)..(103): Selenocysteine
  MOD_RES (125)..(125): Selenocysteine
  MOD_RES (135)..(135): Selenocysteine
  MOD_RES (185)..(185): Selenocysteine
XVESDKSQGQSSQGENDLNGSGKVVYKRCRGIMFSKRKLRYXEMXMDEKYVNSIWDLLKNAIQEIQRKNNSGLSFEELYRNAYXMVLHKHGEKLYXGLREVVXEHLINKVREDVLNSLNNNFLQXLNQAWNDHQXAMVMIRDILMYMDRVYVQQNNVENVYNLGLIIFRDQVVRYGCIRDHLRQXLLDMIAR

SEQ ID NO: 7342 - protein, 174 aa, Homo sapiens
  MOD_RES (18)..(18): Selenocysteine
  MOD_RES (22)..(22): Selenocysteine
  MOD_RES (59)..(59): Selenocysteine
  MOD_RES (62)..(62): Selenocysteine
  MOD_RES (77)..(77): Selenocysteine
  MOD_RES (137)..(137): Selenocysteine
  MOD_RES (159)..(159): Selenocysteine
  MOD_RES (166)..(166): Selenocysteine
MADEAPRKGSFSALVGRXNGLXKPAALAAAPAKPGGAGGSKKLVIKNFRDRPRLPDNYXQDXWRKLHEAVRAVQSSXSIRYNLEELYQAVENLCSHKVSPMLYKQLRQACEDHVQAQILPFREDSLDSVLFLKKINXCWQDHCRQMIMIRSIFLFLDRXYVLQNSXLPSICQNH

SEQ ID NO: 7343 - protein, 759 aa, Homo sapiens
  MOD_RES (18)..(18): Selenocysteine
  MOD_RES (22)..(22): Selenocysteine
  MOD_RES (59)..(59): Selenocysteine
  MOD_RES (62)..(62): Selenocysteine
  MOD_RES (77)..(77): Selenocysteine
  MOD_RES (137)..(137): Selenocysteine
  MOD_RES (159)..(159): Selenocysteine
  MOD_RES (166)..(166): Selenocysteine
  MOD_RES (180)..(180): Selenocysteine
  MOD_RES (192)..(192): Selenocysteine
  MOD_RES (239)..(239): Selenocysteine
  MOD_RES (276)..(276): Selenocysteine
  MOD_RES (282)..(282): Selenocysteine
  MOD_RES (300)..(300): Selenocysteine
  MOD_RES (346)..(346): Selenocysteine
  MOD_RES (349)..(349): Selenocysteine
  MOD_RES (396)..(396): Selenocysteine
  MOD_RES (425)..(425): Selenocysteine
  MOD_RES (432)..(432): Selenocysteine
  MOD_RES (488)..(488): Selenocysteine
  MOD_RES (524)..(524): Selenocysteine
  MOD_RES (529)..(529): Selenocysteine
  MOD_RES (535)..(535): Selenocysteine
  MOD_RES (537)..(537): Selenocysteine
  MOD_RES (544)..(544): Selenocysteine
  MOD_RES (571)..(572): Selenocysteine
  MOD_RES (596)..(596): Selenocysteine
  MOD_RES (617)..(617): Selenocysteine
  MOD_RES (627)..(627): Selenocysteine
  MOD_RES (677)..(677): Selenocysteine
  MOD_RES (684)..(685): Selenocysteine
  MOD_RES (709)..(709): Selenocysteine
MADEAPRKGSFSALVGRXNGLXKPAALAAAPAKPGGAGGSKKLVIKNFRDRPRLPDNYXQDXWRKLHEAVRAVQSSXSIRYNLEELYQAVENLCSHKVSPMLYKQLRQACEDHVQAQILPFREDSLDSVLFLKKINXCWQDHCRQMIMIRSIFLFLDRXYVLQNSXLPSIWDMGLELFRXHIISDKMVQSKXIDGILLLIERERSGEAVDRSLLRSLLGMLSDLQVYKDSFELKFLEEXNCLYAAEGQRLMQEREVPEYLNHVSKRLEEEGDRVIXYLDHSXQKPLIACVEKQLLGEHLXAILQKGLDHLLDENRVPDLAQMYQLFSRVRGGQQALLQHWSEYIKXFGXAIVINPEKDKDMVQDLLDFKDKVDHVIEVCFQKNERFVNLMKESFEXFINKRPNKPAELIAKHVDSKLRAGNKEAXDEELERXLDKIMILFRFIHGKDVFEAFYKKDLAKRLLVGKSASVDAEKSMLSKLKHECGAAFXSKLEGMFKDMELSKDIMVHFKQHMQNQSDSGPIDLXVNILXMGYWPXYXPMEVHLXPEMIKLQEVFKAFYLGKHSGRKLQWQXXLGHAVLKAEFKEGKKEFQVSLFQXLVLLMFNEGDGFSFEEIKMAXGIEDSELRRXLQSLACGKARVLIKSPKGKEVEDGDKFIFNGEFKHKLFRIKINQIQMKEXVEEQVSXXERVFQDRQYQIDAAIVRIMKMRKXLGHNLLVSELYNQLKFPVKPGDLKKRIESLIDRDYMERDKDNPNQYHYVA

SEQ ID NO: 7344 - protein, 667 aa, Homo sapiens
  MOD_RES (37)..(37): Selenocysteine
  MOD_RES (59)..(59): Selenocysteine
  MOD_RES (66)..(66): Selenocysteine
  MOD_RES (88)..(88): Selenocysteine
  MOD_RES (100)..(100): Selenocysteine
  MOD_RES (147)..(147): Selenocysteine
  MOD_RES (184)..(184): Selenocysteine
  MOD_RES (190)..(190): Selenocysteine
  MOD_RES (208)..(208): Selenocysteine
  MOD_RES (254)..(254): Selenocysteine
  MOD_RES (257)..(257): Selenocysteine
  MOD_RES (304)..(304): Selenocysteine
  MOD_RES (333)..(333): Selenocysteine
  MOD_RES (340)..(340): Selenocysteine
  MOD_RES (396)..(396): Selenocysteine
  MOD_RES (432)..(432): Selenocysteine
  MOD_RES (437)..(437): Selenocysteine
  MOD_RES (443)..(443): Selenocysteine
  MOD_RES (445)..(445): Selenocysteine
  MOD_RES (452)..(452): Selenocysteine
  MOD_RES (479)..(480): Selenocysteine
  MOD_RES (504)..(504): Selenocysteine
  MOD_RES (525)..(525): Selenocysteine
  MOD_RES (535)..(535): Selenocysteine
  MOD_RES (585)..(585): Selenocysteine
  MOD_RES (592)..(593): Selenocysteine
  MOD_RES (617)..(617): Selenocysteine
MLYKQLRQACEDHVQAQILPFREDSLDSVLFLKKINXCWQDHCRQMIMIRSIFLFLDRXYVLQNSXLPSICPVSYCLYRDMGLELFRXHIISDKMVQSKXIDGILLLIERERSGEAVDRSLLRSLLGMLSDLQVYKDSFELKFLEEXNCLYAAEGQRLMQEREVPEYLNHVSKRLEEEGDRVIXYLDHSXQKPLIACVEKQLLGEHLXAILQKGLDHLLDENRVPDLAQMYQLFSRVRGGQQALLQHWSEYIKXFGXAIVINPEKDKDMVQDLLDFKDKVDHVIEVCFQKNERFVNLMKESFEXFINKRPNKPAELIAKHVDSKLRAGNKEAXDEELERXLDKIMILFRFIHGKDVFEAFYKKDLAKRLLVGKSASVDAEKSMLSKLKHECGAAFXSKLEGMFKDMELSKDIMVHFKQHMQNQSDSGPIDLXVNILXMGYWPXYXPMEVHLXPEMIKLQEVFKAFYLGKHSGRKLQWQXXLGHAVLKAEFKEGKKEFQVSLFQXLVLLMFNEGDGFSFEEIKMAXGIEDSELRRXLQSLACGKARVLIKSPKGKEVEDGDKFIFNGEFKHKLFRIKINQIQMKEXVEEQVSXXERVFQDRQYQIDAAIVRIMKMRKXLGHNLLVSELYNQLKFPVKPGDLKKRIESLIDRDYMERDKDNPNQYHYVA

SEQ ID NO: 7345 - protein, 659 aa, Homo sapiens
  MOD_RES (37)..(37): Selenocysteine
  MOD_RES (59)..(59): Selenocysteine
  MOD_RES (66)..(66): Selenocysteine
  MOD_RES (80)..(80): Selenocysteine
  MOD_RES (92)..(92): Selenocysteine
  MOD_RES (139)..(139): Selenocysteine
  MOD_RES (176)..(176): Selenocysteine
  MOD_RES (182)..(182): Selenocysteine
  MOD_RES (200)..(200): Selenocysteine
  MOD_RES (246)..(246): Selenocysteine
  MOD_RES (249)..(249): Selenocysteine
  MOD_RES (296)..(296): Selenocysteine
  MOD_RES (325)..(325): Selenocysteine
  MOD_RES (332)..(332): Selenocysteine
  MOD_RES (388)..(388): Selenocysteine
  MOD_RES (424)..(424): Selenocysteine
  MOD_RES (429)..(429): Selenocysteine
  MOD_RES (435)..(435): Selenocysteine
  MOD_RES (437)..(437): Selenocysteine
  MOD_RES (444)..(444): Selenocysteine
  MOD_RES (471)..(472): Selenocysteine
  MOD_RES (496)..(496): Selenocysteine
  MOD_RES (517)..(517): Selenocysteine
  MOD_RES (527)..(527): Selenocysteine
  MOD_RES (577)..(577): Selenocysteine
  MOD_RES (584)..(585): Selenocysteine
  MOD_RES (609)..(609): Selenocysteine
MLYKQLRQACEDHVQAQILPFREDSLDSVLFLKKINXCWQDHCRQMIMIRSIFLFLDRXYVLQNSXLPSIWDMGLELFRXHIISDKMVQSKXIDGILLLIERERSGEAVDRSLLRSLLGMLSDLQVYKDSFELKFLEEXNCLYAAEGQRLMQEREVPEYLNHVSKRLEEEGDRVIXYLDHSXQKPLIACVEKQLLGEHLXAILQKGLDHLLDENRVPDLAQMYQLFSRVRGGQQALLQHWSEYIKXFGXAIVINPEKDKDMVQDLLDFKDKVDHVIEVCFQKNERFVNLMKESFEXFINKRPNKPAELIAKHVDSKLRAGNKEAXDEELERXLDKIMILFRFIHGKDVFEAFYKKDLAKRLLVGKSASVDAEKSMLSKLKHECGAAFXSKLEGMFKDMELSKDIMVHFKQHMQNQSDSGPIDLXVNILXMGYWPXYXPMEVHLXPEMIKLQEVFKAFYLGKHSGRKLQWQXXLGHAVLKAEFKEGKKEFQVSLFQXLVLLMFNEGDGFSFEEIKMAXGIEDSELRRXLQSLACGKARVLIKSPKGKEVEDGDKFIFNGEFKHKLFRIKINQIQMKEXVEEQVSXXERVFQDRQYQIDAAIVRIMKMRKXLGHNLLVSELYNQLKFPVKPGDLKKRIESLIDRDYMERDKDNPNQYHYVA

SEQ ID NO: 7346 - protein, 780 aa, Homo sapiens
  MOD_RES (3)..(3): Selenocysteine
  MOD_RES (36)..(36): Selenocysteine
  MOD_RES (87)..(87): Selenocysteine
  MOD_RES (102)..(102): Selenocysteine
  MOD_RES (117)..(117): Selenocysteine
  MOD_RES (142)..(142): Selenocysteine
  MOD_RES (210)..(210): Selenocysteine
  MOD_RES (216)..(216): Selenocysteine
  MOD_RES (251)..(251): Selenocysteine
  MOD_RES (271)..(271): Selenocysteine
  MOD_RES (276)..(276): Selenocysteine
  MOD_RES (290)..(290): Selenocysteine
  MOD_RES (332)..(332): Selenocysteine
  MOD_RES (334)..(335): Selenocysteine
  MOD_RES (346)..(346): Selenocysteine
  MOD_RES (367)..(367): Selenocysteine
  MOD_RES (381)..(381): Selenocysteine
  MOD_RES (398)..(398): Selenocysteine
  MOD_RES (419)..(419): Selenocysteine
  MOD_RES (426)..(426): Selenocysteine
  MOD_RES (459)..(459): Selenocysteine
  MOD_RES (549)..(549): Selenocysteine
  MOD_RES (583)..(583): Selenocysteine
  MOD_RES (596)..(597): Selenocysteine
  MOD_RES (623)..(623): Selenocysteine
  MOD_RES (633)..(633): Selenocysteine
  MOD_RES (661)..(661): Selenocysteine
  MOD_RES (664)..(664): Selenocysteine
  MOD_RES (695)..(696): Selenocysteine
  MOD_RES (715)..(715): Selenocysteine
  MOD_RES (736)..(736): Selenocysteine
  MOD_RES (775)..(775): Selenocysteine
MAXSNLLKNKGSLQFEDKWDFMRPIVLKLLRQESVXKQQWFDLFSDVHAVCLWDDKGPAKIHQALKEDILEFIKQAQARVLSHQDDXALLKAYIVEWRKFFXQCDILPKPFCQLEIXLMGKQGSNKKSNVEDSIVRKLMLDXWNESIFSNIKNRLQDSAMKLVHAERLGEAFDSQLVIGVRESYVNLCSNPEDKLQIYRDNFEKAYLDSXERFYRXQAPSYLQQNGVQNYMKYADAKLKEEEKRALRYLEXRRECNSVEALMECCVNALVXSFKEXILAECQGMIKRNEXEKLHLMFSLMDKVPNGIEPMLKDLEEHIISAGLADMVAAAEXIXXDSEKYVEQLLXLFNRFSKLVKEAFQDDPRFLXARDKAYKAVVNDAXIFKLELPLKQKGVGLKXQPESKCPELLANYCDMLLRKXPLSKKLXSEEIEAKLKEVLLVLKYVQNKDVFMRYHKAHLXRRLILDISADSEIEENMVEWLREVGMPADYVNKLARMFQDIKVSEDLNQAFKEMHKNNKLALPADSVNIKILNAGAWSRSSEKVFVSLPXELEDLIPEVEEFYKKNHSGRKLHWHHLMSNGIIXFKNEVGQYDLEVXXFQLAVLFAWNQRPREKISFENLKLAXELPDAELRRXLWSLVAFPKLKRQVLLYEPQVNSPKDFXEGXLFSVNQEFSLIKNAKVQKRGKINLIGRLQLXXERMREEENEGIVQLRILRXQEAIIQIMKMRKKISNAQLQXELVEILKNMFLPQKKMIKEQIEWLIEHKYIRRDESDINXFIYMA

SEQ ID NO: 7347 - protein, 47 aa, Homo sapiens
  MOD_RES (3)..(3): Selenocysteine
  MOD_RES (36)..(36): Selenocysteine
MAXSNLLKNKGSLQFEDKWDFMRPIVLKLLRQESVXKQQWFDLFSEY

SEQ ID NO: 7348 - protein, 130 aa, Homo sapiens
  MOD_RES (1)..(1): Any amino acid
  MOD_RES (39)..(39): Selenocysteine
  MOD_RES (107)..(107): Selenocysteine
  MOD_RES (113)..(113): Selenocysteine
XDVHAVCLWDDKGPAKIHQALKEDILEFIKQAQALMLDXWNESIFSNIKNRLQDSAMKLVHAERLGEAFDSQLVIGVRESYVNLCSNPEDKLQIYRDNFEKAYLDSXERFYRXQAPSYLQQNGVQNYMKY

SEQ ID NO: 7349 - protein, 639 aa, Homo sapiens
  MOD_RES (87)..(87): Selenocysteine
  MOD_RES (95)..(95): Selenocysteine
  MOD_RES (112)..(112): Selenocysteine
  MOD_RES (126)..(126): Selenocysteine
  MOD_RES (133)..(133): Selenocysteine
  MOD_RES (156)..(156): Selenocysteine
  MOD_RES (160)..(161): Selenocysteine
  MOD_RES (176)..(176): Selenocysteine
  MOD_RES (181)..(181): Selenocysteine
  MOD_RES (183)..(183): Selenocysteine
  MOD_RES (190)..(190): Selenocysteine
  MOD_RES (196)..(197): Selenocysteine
  MOD_RES (208)..(208): Selenocysteine
  MOD_RES (226)..(226): Selenocysteine
  MOD_RES (256)..(256): Selenocysteine
  MOD_RES (286)..(286): Selenocysteine
  MOD_RES (309)..(309): Selenocysteine
  MOD_RES (346)..(346): Selenocysteine
  MOD_RES (390)..(390): Selenocysteine
  MOD_RES (395)..(395): Selenocysteine
  MOD_RES (397)..(397): Selenocysteine
  MOD_RES (440)..(440): Selenocysteine
  MOD_RES (490)..(490): Selenocysteine
  MOD_RES (528)..(528): Selenocysteine
  MOD_RES (565)..(565): Selenocysteine
  MOD_RES (580)..(580): Selenocysteine
  MOD_RES (586)..(586): Selenocysteine
  MOD_RES (612)..(612): Selenocysteine
MAANVGSMFQYWKRFDLQQLQDLRKQVAPLLKSFQGEIDALSKRSKEAEAAFLNVYKRLIDVPDPVPALDLGQQLQLKVQRLHDIEXENQKLREXLEEYNKEFAEVKNQEVXIKALKEKIREYEQXLKNQAEXIALEKEQKLQNDFAEKERKLQEXQMSXXSKLEEAEHKVQSLQXALEKXRXELFDLKXKYDEEXXAKADEIEMIMXDLERANQRAEVAQREAEXLREQLSSANHSLQLASQIQKAPDVAIEVLXRSSLEVELAAKEREIAQLVEDVQRLQASLXKLRENSASQISQLEQQLSAKNSXLKQLEEKLKGQADYEEVKKELNILKSMEFAPSEGAGXQDAAKPLEVLLLEKNRSLQSENAALRISNSDLSGRCAELQVRIXEAVAXAXEQRELIARLEQDLSIIQSIQRPDAEGAAEHRLEKIPEPIKEAXALFYGPAAPASGALPEGQVDSLLSIISSQRERFRARNQELEAENRLAQHXLQALQSELDSLRADNIKLFEKIKFLQSYPGRGSGSDDXELRYSSQYEERLDPFSSFSKRERQRKYLSLSPWDKAXLSMGRLVLSNKMARXIGFFYXLFLHCLVFLVLYKLAWSESMERDCAXFCAKKFADHLHKFHENDNGAAAGDLWQ

SEQ ID NO: 7350 - protein, 676 aa, Homo sapiens
  MOD_RES (27)..(27): Selenocysteine
  MOD_RES (29)..(29): Selenocysteine
  MOD_RES (56)..(56): Selenocysteine
  MOD_RES (124)..(124): Selenocysteine
  MOD_RES (132)..(132): Selenocysteine
  MOD_RES (149)..(149): Selenocysteine
  MOD_RES (163)..(163): Selenocysteine
  MOD_RES (170)..(170): Selenocysteine
  MOD_RES (193)..(193): Selenocysteine
  MOD_RES (197)..(198): Selenocysteine
  MOD_RES (213)..(213): Selenocysteine
  MOD_RES (218)..(218): Selenocysteine
  MOD_RES (220)..(220): Selenocysteine
  MOD_RES (227)..(227): Selenocysteine
  MOD_RES (233)..(234): Selenocysteine
  MOD_RES (245)..(245): Selenocysteine
  MOD_RES (263)..(263): Selenocysteine
  MOD_RES (293)..(293): Selenocysteine
  MOD_RES (323)..(323): Selenocysteine
  MOD_RES (346)..(346): Selenocysteine
  MOD_RES (383)..(383): Selenocysteine
  MOD_RES (427)..(427): Selenocysteine
  MOD_RES (432)..(432): Selenocysteine
  MOD_RES (434)..(434): Selenocysteine
  MOD_RES (477)..(477): Selenocysteine
  MOD_RES (527)..(527): Selenocysteine
  MOD_RES (565)..(565): Selenocysteine
  MOD_RES (602)..(602): Selenocysteine
  MOD_RES (617)..(617): Selenocysteine
  MOD_RES (623)..(623): Selenocysteine
  MOD_RES (649)..(649): Selenocysteine
MAANVGSMFQYWKRFDLQQLQRELDAXAXVLANRQDESEQSRKRLIEQSREFKKNXPEDLRKQVAPLLKSFQGEIDALSKRSKEAEAAFLNVYKRLIDVPDPVPALDLGQQLQLKVQRLHDIEXENQKLREXLEEYNKEFAEVKNQEVXIKALKEKIREYEQXLKNQAEXIALEKEQKLQNDFAEKERKLQEXQMSXXSKLEEAEHKVQSLQXALEKXRXELFDLKXKYDEEXXAKADEIEMIMXDLERANQRAEVAQREAEXLREQLSSANHSLQLASQIQKAPDVAIEVLXRSSLEVELAAKEREIAQLVEDVQRLQASLXKLRENSASQISQLEQQLSAKNSXLKQLEEKLKGQADYEEVKKELNILKSMEFAPSEGAGXQDAAKPLEVLLLEKNRSLQSENAALRISNSDLSGRCAELQVRIXEAVAXAXEQRELIARLEQDLSIIQSIQRPDAEGAAEHRLEKIPEPIKEAXALFYGPAAPASGALPEGQVDSLLSIISSQRERFRARNQELEAENRLAQHXLQALQSELDSLRADNIKLFEKIKFLQSYPGRGSGSDDXELRYSSQYEERLDPFSSFSKRERQRKYLSLSPWDKAXLSMGRLVLSNKMARXIGFFYXLFLHCLVFLVLYKLAWSESMERDCAXFCAKKFADHLHKFHENDNGAAAGDLWQ

SEQ ID NO: 7351 - protein, 678 aa, Homo sapiens
  MOD_RES (27)..(27): Selenocysteine
  MOD_RES (29)..(29): Selenocysteine
  MOD_RES (56)..(56): Selenocysteine
  MOD_RES (124)..(124): Selenocysteine
  MOD_RES (132)..(132): Selenocysteine
  MOD_RES (149)..(149): Selenocysteine
  MOD_RES (163)..(163): Selenocysteine
  MOD_RES (170)..(170): Selenocysteine
  MOD_RES (193)..(193): Selenocysteine
  MOD_RES (197)..(198): Selenocysteine
  MOD_RES (213)..(213): Selenocysteine
  MOD_RES (218)..(218): Selenocysteine
  MOD_RES (220)..(220): Selenocysteine
  MOD_RES (227)..(227): Selenocysteine
  MOD_RES (233)..(234): Selenocysteine
  MOD_RES (245)..(245): Selenocysteine
  MOD_RES (263)..(263): Selenocysteine
  MOD_RES (295)..(295): Selenocysteine
  MOD_RES (325)..(325): Selenocysteine
  MOD_RES (348)..(348): Selenocysteine
  MOD_RES (385)..(385): Selenocysteine
  MOD_RES (429)..(429): Selenocysteine
  MOD_RES (434)..(434): Selenocysteine
  MOD_RES (436)..(436): Selenocysteine
  MOD_RES (479)..(479): Selenocysteine
  MOD_RES (529)..(529): Selenocysteine
  MOD_RES (567)..(567): Selenocysteine
  MOD_RES (604)..(604): Selenocysteine
  MOD_RES (619)..(619): Selenocysteine
  MOD_RES (625)..(625): Selenocysteine
  MOD_RES (651)..(651): Selenocysteine
MAANVGSMFQYWKRFDLQQLQRELDAXAXVLANRQDESEQSRKRLIEQSREFKKNXPEDLRKQVAPLLKSFQGEIDALSKRSKEAEAAFLNVYKRLIDVPDPVPALDLGQQLQLKVQRLHDIEXENQKLREXLEEYNKEFAEVKNQEVXIKALKEKIREYEQXLKNQAEXIALEKEQKLQNDFAEKERKLQEXQMSXXSKLEEAEHKVQSLQXALEKXRXELFDLKXKYDEEXXAKADEIEMIMXDLERANQRAEVAQREAEXLREQLSSANHSLQLASQIQKAPDVEQAIEVLXRSSLEVELAAKEREIAQLVEDVQRLQASLXKLRENSASQISQLEQQLSAKNSXLKQLEEKLKGQADYEEVKKELNILKSMEFAPSEGAGXQDAAKPLEVLLLEKNRSLQSENAALRISNSDLSGRCAELQVRIXEAVAXAXEQRELIARLEQDLSIIQSIQRPDAEGAAEHRLEKIPEPIKEAXALFYGPAAPASGALPEGQVDSLLSIISSQRERFRARNQELEAENRLAQHXLQALQSELDSLRADNIKLFEKIKFLQSYPGRGSGSDDXELRYSSQYEERLDPFSSFSKRERQRKYLSLSPWDKAXLSMGRLVLSNKMARXIGFFYXLFLHCLVFLVLYKLAWSESMERDCAXFCAKKFADHLHKFHENDNGAAAGDLWQ

SEQ ID NO: 7352 - protein, 1516 aa, Homo sapiens
  MOD_RES (27)..(27): Selenocysteine
  MOD_RES (29)..(29): Selenocysteine
  MOD_RES (56)..(56): Selenocysteine
  MOD_RES (124)..(124): Selenocysteine
  MOD_RES (132)..(132): Selenocysteine
  MOD_RES (149)..(149): Selenocysteine
  MOD_RES (163)..(163): Selenocysteine
  MOD_RES (170)..(170): Selenocysteine
  MOD_RES (193)..(193): Selenocysteine
  MOD_RES (197)..(198): Selenocysteine
  MOD_RES (213)..(213): Selenocysteine
  MOD_RES (218)..(218): Selenocysteine
  MOD_RES (220)..(220): Selenocysteine
  MOD_RES (227)..(227): Selenocysteine
  MOD_RES (233)..(234): Selenocysteine
  MOD_RES (245)..(245): Selenocysteine
  MOD_RES (263)..(263): Selenocysteine
  MOD_RES (295)..(295): Selenocysteine
  MOD_RES (325)..(325): Selenocysteine
  MOD_RES (348)..(348): Selenocysteine
  MOD_RES (385)..(385): Selenocysteine
  MOD_RES (456)..(456): Selenocysteine
  MOD_RES (459)..(459): Selenocysteine
  MOD_RES (486)..(486): Selenocysteine
  MOD_RES (514)..(514): Selenocysteine
  MOD_RES (520)..(520): Selenocysteine
  MOD_RES (525)..(525): Selenocysteine
  MOD_RES (564)..(564): Selenocysteine
  MOD_RES (611)..(611): Selenocysteine
  MOD_RES (668)..(669): Selenocysteine
  MOD_RES (676)..(676): Selenocysteine
  MOD_RES (698)..(698): Selenocysteine
  MOD_RES (750)..(750): Selenocysteine
  MOD_RES (753)..(753): Selenocysteine
  MOD_RES (759)..(759): Selenocysteine
  MOD_RES (764)..(764): Selenocysteine
  MOD_RES (857)..(857): Selenocysteine
  MOD_RES (909)..(909): Selenocysteine
  MOD_RES (916)..(916): Selenocysteine
  MOD_RES (934)..(934): Selenocysteine
  MOD_RES (942)..(942): Selenocysteine
  MOD_RES (956)..(956): Selenocysteine
  MOD_RES (960)..(960): Selenocysteine
  MOD_RES (1003)..(1003): Selenocysteine
  MOD_RES (1041)..(1041): Selenocysteine
  MOD_RES (1057)..(1057): Selenocysteine
  MOD_RES (1060)..(1060): Selenocysteine
  MOD_RES (1082)..(1082): Selenocysteine
  MOD_RES (1114)..(1115): Selenocysteine
  MOD_RES (1139)..(1139): Selenocysteine
  MOD_RES (1143)..(1143): Selenocysteine
  MOD_RES (1151)..(1151): Selenocysteine
  MOD_RES (1163)..(1163): Selenocysteine
  MOD_RES (1168)..(1168): Selenocysteine
  MOD_RES (1241)..(1241): Selenocysteine
  MOD_RES (1284)..(1284): Selenocysteine
  MOD_RES (1290)..(1290): Selenocysteine
  MOD_RES (1296)..(1296): Selenocysteine
  MOD_RES (1298)..(1298): Selenocysteine
  MOD_RES (1355)..(1355): Selenocysteine
  MOD_RES (1363)..(1363): Selenocysteine
  MOD_RES (1384)..(1384): Selenocysteine
  MOD_RES (1391)..(1391): Selenocysteine
  MOD_RES (1420)..(1420): Selenocysteine
  MOD_RES (1422)..(1422): Selenocysteine
  MOD_RES (1433)..(1433): Selenocysteine
MAANVGSMFQYWKRFDLQQLQRELDAXAXVLANRQDESEQSRKRLIEQSREFKKNXPEDLRKQVAPLLKSFQGEIDALSKRSKEAEAAFLNVYKRLIDVPDPVPALDLGQQLQLKVQRLHDIEXENQKLREXLEEYNKEFAEVKNQEVXIKALKEKIREYEQXLKNQAEXIALEKEQKLQNDFAEKERKLQEXQMSXXSKLEEAEHKVQSLQXALEKXRXELFDLKXKYDEEXXAKADEIEMIMXDLERANQRAEVAQREAEXLREQLSSANHSLQLASQIQKAPDVEQAIEVLXRSSLEVELAAKEREIAQLVEDVQRLQASLXKLRENSASQISQLEQQLSAKNSXLKQLEEKLKGQADYEEVKKELNILKSMEFAPSEGAGXQDAAKPLEVLLLEKNRSLQSENAALRISNSDLSGSARRKGKDQPESRRPGSLPAPPPSQLPRNPGEQASNXNGXHQFSPAGLSQDFFSSSLASPSLPLASXGKFALNSLLQRQLMQSFYSKAMQEAGSXSMIFSXGPYSXNSISSQSPLQQSPDVNGMAPSPSQSESAGSVSEGEEMDXAEIARQVKEQLIKHNIGQRIFGHYVLGLSQGSVSEILARPKPWNKLXVRGKEPFHKMKQFLSDEQNILALRSIQGRQRENPGQSLNRLFQEVPKRRNGSEGNIXXRIRASEXGSDEAIKSILEQAKRELQVQKXAEPAQPSSASGSGNSDDAIRSILQQARREMEAQQAALDPALKQAPLSQSDIXILXPKLLSXSPMPXVSSYPPLAISLKKPSAAPEAGASALPNPPALKKEAQDAPGLDPQGAADCAQGVLRQVKNEVGRSGAWKDHWWSAVQPERRNAASSEEAKAEEXGGGKEKGSGGSGGGSQPRAERSQLQGPSSSEYWKEWPSAESPYSQSSELSLXGASRSEXPQNSPLPSSPIVPMSKPXKPSVPPLXPEQYEVYMYQEVDXIELXRQVKEKLAKNGICQRIFGEKVLGLSQGSVSDMLSRPKPWSKLXQKGREPFIRMQLWLNGELGQGVLPVQGQQQGPVLHSVXSLQDPLQQGCVSSESXPKXSASCSPAPESPMSSSESVKSLXELVQQPCPPIEASKDSKPPEPSDPPASDSQPXXPLPLSGHSALSIQELVAMSPELDXYGIXKRVKEVLXDNNLGQRLFGEXILGLXQGSVSDLLARPKPWHKLSLKGREPFVRMQLWLNDPNNVEKLMDMKRMEKKAYMKRRHSSVSDSQPCEPPSVGXEYSQGASPQPQHQLKKPRVVLAPEEKEALKRAYQQKPYPSPKXIEDLAXQLNLKXSXVINWFHNYRSRIRRELFIEEIQAGSQGQAGASDSPSARSGRAAPSSEGDSCDGVEAXEGPGSADXEEPKSQGEAEREEVPRPAEQXEPPPSGXPGPDDARDDDHEGGPVEGPGPLPSPASAXAXAAPAAPEDAAXSAAAAPGEGPAAPSSAPPPSNSSSSSAPRRPSSLQSLFGLPEAAGARDSRDNPLRKKKAANLNSIIHRLEKAASREEPIEWEF

SEQ ID NO: 7353 - protein, 632 aa, Homo sapiens
  MOD_RES (27)..(27): Selenocysteine
  MOD_RES (29)..(29): Selenocysteine
  MOD_RES (56)..(56): Selenocysteine
  MOD_RES (103)..(103): Selenocysteine
  MOD_RES (117)..(117): Selenocysteine
  MOD_RES (124)..(124): Selenocysteine
  MOD_RES (147)..(147): Selenocysteine
  MOD_RES (151)..(152): Selenocysteine
  MOD_RES (167)..(167): Selenocysteine
  MOD_RES (172)..(172): Selenocysteine
  MOD_RES (174)..(174): Selenocysteine
  MOD_RES (181)..(181): Selenocysteine
  MOD_RES (187)..(188): Selenocysteine
  MOD_RES (199)..(199): Selenocysteine
  MOD_RES (217)..(217): Selenocysteine
  MOD_RES (249)..(249): Selenocysteine
  MOD_RES (279)..(279): Selenocysteine
  MOD_RES (302)..(302): Selenocysteine
  MOD_RES (339)..(339): Selenocysteine
  MOD_RES (383)..(383): Selenocysteine
  MOD_RES (388)..(388): Selenocysteine
  MOD_RES (390)..(390): Selenocysteine
  MOD_RES (433)..(433): Selenocysteine
  MOD_RES (483)..(483): Selenocysteine
  MOD_RES (521)..(521): Selenocysteine
  MOD_RES (558)..(558): Selenocysteine
  MOD_RES (573)..(573): Selenocysteine
  MOD_RES (579)..(579): Selenocysteine
  MOD_RES (605)..(605): Selenocysteine
MAANVGSMFQYWKRFDLQQLQRELDAXAXVLANRQDESEQSRKRLIEQSREFKKNXPEDLRKQVAPLLKSFQGEIDALSKRSKEAEAAFLNVYKRLIDVPEVXIKALKEKIREYEQXLKNQAEXIALEKEQKLQNDFAEKERKLQEXQMSXXSKLEEAEHKVQSLQXALEKXRXELFDLKXKYDEEXXAKADEIEMIMXDLERANQRAEVAQREAEXLREQLSSANHSLQLASQIQKAPDVEQAIEVLXRSSLEVELAAKEREIAQLVEDVQRLQASLXKLRENSASQISQLEQQLSAKNSXLKQLEEKLKGQADYEEVKKELNILKSMEFAPSEGAGXQDAAKPLEVLLLEKNRSLQSENAALRISNSDLSGRCAELQVRIXEAVAXAXEQRELIARLEQDLSIIQSIQRPDAEGAAEHRLEKIPEPIKEAXALFYGPAAPASGALPEGQVDSLLSIISSQRERFRARNQELEAENRLAQHXLQALQSELDSLRADNIKLFEKIKFLQSYPGRGSGSDDXELRYSSQYEERLDPFSSFSKRERQRKYLSLSPWDKAXLSMGRLVLSNKMARXIGFFYXLFLHCLVFLVLYKLAWSESMERDCAXFCAKKFADHLHKFHENDNGAAAGDLWQ

SEQ ID NO: 7354 - protein, 662 aa, Homo sapiens
  MOD_RES (27)..(27): Selenocysteine
  MOD_RES (29)..(29): Selenocysteine
  MOD_RES (56)..(56): Selenocysteine
  MOD_RES (108)..(108): Selenocysteine
  MOD_RES (116)..(116): Selenocysteine
  MOD_RES (133)..(133): Selenocysteine
  MOD_RES (147)..(147): Selenocysteine
  MOD_RES (154)..(154): Selenocysteine
  MOD_RES (177)..(177): Selenocysteine
  MOD_RES (181)..(182): Selenocysteine
  MOD_RES (197)..(197): Selenocysteine
  MOD_RES (202)..(202): Selenocysteine
  MOD_RES (204)..(204): Selenocysteine
  MOD_RES (211)..(211): Selenocysteine
  MOD_RES (217)..(218): Selenocysteine
  MOD_RES (229)..(229): Selenocysteine
  MOD_RES (247)..(247): Selenocysteine
  MOD_RES (279)..(279): Selenocysteine
  MOD_RES (309)..(309): Selenocysteine
  MOD_RES (332)..(332): Selenocysteine
  MOD_RES (369)..(369): Selenocysteine
  MOD_RES (413)..(413): Selenocysteine
  MOD_RES (418)..(418): Selenocysteine
  MOD_RES (420)..(420): Selenocysteine
  MOD_RES (463)..(463): Selenocysteine
  MOD_RES (513)..(513): Selenocysteine
  MOD_RES (551)..(551): Selenocysteine
  MOD_RES (588)..(588): Selenocysteine
  MOD_RES (603)..(603): Selenocysteine
  MOD_RES (609)..(609): Selenocysteine
  MOD_RES (635)..(635): Selenocysteine
MAANVGSMFQYWKRFDLQQLQRELDAXAXVLANRQDESEQSRKRLIEQSREFKKNXPEIDALSKRSKEAEAAFLNVYKRLIDVPDPVPALDLGQQLQLKVQRLHDIEXENQKLREXLEEYNKEFAEVKNQEVXIKALKEKIREYEQXLKNQAEXIALEKEQKLQNDFAEKERKLQEXQMSXXSKLEEAEHKVQSLQXALEKXRXELFDLKXKYDEEXXAKADEIEMIMXDLERANQRAEVAQREAEXLREQLSSANHSLQLASQIQKAPDVEQAIEVLXRSSLEVELAAKEREIAQLVEDVQRLQASLXKLRENSASQISQLEQQLSAKNSXLKQLEEKLKGQADYEEVKKELNILKSMEFAPSEGAGXQDAAKPLEVLLLEKNRSLQSENAALRISNSDLSGRCAELQVRIXEAVAXAXEQRELIARLEQDLSIIQSIQRPDAEGAAEHRLEKIPEPIKEAXALFYGPAAPASGALPEGQVDSLLSIISSQRERFRARNQELEAENRLAQHXLQALQSELDSLRADNIKLFEKIKFLQSYPGRGSGSDDXELRYSSQYEERLDPFSSFSKRERQRKYLSLSPWDKAXLSMGRLVLSNKMARXIGFFYXLFLHCLVFLVLYKLAWSESMERDCAXFCAKKFADHLHKFHENDNGAAAGDLWQ

SEQ ID NO: 7355 - protein, 1347 aa, Homo sapiens
  MOD_RES (16)..(16): Selenocysteine
  MOD_RES (18)..(18): Selenocysteine
  MOD_RES (45)..(45): Selenocysteine
  MOD_RES (113)..(113): Selenocysteine
  MOD_RES (121)..(121): Selenocysteine
  MOD_RES (138)..(138): Selenocysteine
  MOD_RES (152)..(152): Selenocysteine
  MOD_RES (159)..(159): Selenocysteine
  MOD_RES (182)..(182): Selenocysteine
  MOD_RES (186)..(187): Selenocysteine
  MOD_RES (202)..(202): Selenocysteine
  MOD_RES (207)..(207): Selenocysteine
  MOD_RES (209)..(209): Selenocysteine
  MOD_RES (216)..(216): Selenocysteine
  MOD_RES (222)..(223): Selenocysteine
  MOD_RES (234)..(234): Selenocysteine
  MOD_RES (252)..(252): Selenocysteine
  MOD_RES (284)..(284): Selenocysteine
  MOD_RES (314)..(314): Selenocysteine
  MOD_RES (337)..(337): Selenocysteine
  MOD_RES (374)..(374): Selenocysteine
  MOD_RES (412)..(412): Selenocysteine
  MOD_RES (451)..(451): Selenocysteine
  MOD_RES (498)..(498): Selenocysteine
  MOD_RES (581)..(581): Selenocysteine
  MOD_RES (584)..(584): Selenocysteine
  MOD_RES (590)..(590): Selenocysteine
  MOD_RES (595)..(595): Selenocysteine
  MOD_RES (688)..(688): Selenocysteine
  MOD_RES (740)..(740): Selenocysteine
  MOD_RES (747)..(747): Selenocysteine
  MOD_RES (765)..(765): Selenocysteine
  MOD_RES (773)..(773): Selenocysteine
  MOD_RES (787)..(787): Selenocysteine
  MOD_RES (791)..(791): Selenocysteine
  MOD_RES (834)..(834): Selenocysteine
  MOD_RES (872)..(872): Selenocysteine
  MOD_RES (888)..(888): Selenocysteine
  MOD_RES (891)..(891): Selenocysteine
  MOD_RES (913)..(913): Selenocysteine
  MOD_RES (945)..(946): Selenocysteine
  MOD_RES (970)..(970): Selenocysteine
  MOD_RES (974)..(974): Selenocysteine
  MOD_RES (982)..(982): Selenocysteine
  MOD_RES (994)..(994): Selenocysteine
  MOD_RES (999)..(999): Selenocysteine
  MOD_RES (1072)..(1072): Selenocysteine
  MOD_RES (1115)..(1115): Selenocysteine
  MOD_RES (1121)..(1121): Selenocysteine
  MOD_RES (1127)..(1127): Selenocysteine
  MOD_RES (1129)..(1129): Selenocysteine
  MOD_RES (1186)..(1186): Selenocysteine
  MOD_RES (1194)..(1194): Selenocysteine
  MOD_RES (1215)..(1215): Selenocysteine
  MOD_RES (1222)..(1222): Selenocysteine
  MOD_RES (1251)..(1251): Selenocysteine
  MOD_RES (1253)..(1253): Selenocysteine
  MOD_RES (1264)..(1264): Selenocysteine
MLCVAGARLKRELDAXAXVLANRQDESEQSRKRLIEQSREFKKNXPEDLRKQVAPLLKSFQGEIDALSKRSKEAEAAFLNVYKRLIDVPDPVPALDLGQQLQLKVQRLHDIEXENQKLREXLEEYNKEFAEVKNQEVXIKALKEKIREYEQXLKNQAEXIALEKEQKLQNDFAEKERKLQEXQMSXXSKLEEAEHKVQSLQXALEKXRXELFDLKXKYDEEXXAKADEIEMIMXDLERANQRAEVAQREAEXLREQLSSANHSLQLASQIQKAPDVEQAIEVLXRSSLEVELAAKEREIAQLVEDVQRLQASLXKLRENSASQISQLEQQLSAKNSXLKQLEEKLKGQADYEEVKKELNILKSMEFAPSEGAGXQDAAKPLEVLLLEKNRSLQSENAALRISNSDLSGPYSXNSISSQSPLQQSPDVNGMAPSPSQSESAGSVSEGEEMDXAEIARQVKEQLIKHNIGQRIFGHYVLGLSQGSVSEILARPKPWNKLXVRGKEPFHKMKQFLSDEQNILALRSIQGRQRAEPAQPSSASGSGNSDDAIRSILQQARREMEAQQAALDPALKQAPLSQSDIXILXPKLLSXSPMPXVSSYPPLAISLKKPSAAPEAGASALPNPPALKKEAQDAPGLDPQGAADCAQGVLRQVKNEVGRSGAWKDHWWSAVQPERRNAASSEEAKAEEXGGGKEKGSGGSGGGSQPRAERSQLQGPSSSEYWKEWPSAESPYSQSSELSLXGASRSEXPQNSPLPSSPIVPMSKPXKPSVPPLXPEQYEVYMYQEVDXIELXRQVKEKLAKNGICQRIFGEKVLGLSQGSVSDMLSRPKPWSKLXQKGREPFIRMQLWLNGELGQGVLPVQGQQQGPVLHSVXSLQDPLQQGCVSSESXPKXSASCSPAPESPMSSSESVKSLXELVQQPCPPIEASKDSKPPEPSDPPASDSQPXXPLPLSGHSALSIQELVAMSPELDXYGIXKRVKEVLXDNNLGQRLFGEXILGLXQGSVSDLLARPKPWHKLSLKGREPFVRMQLWLNDPNNVEKLMDMKRMEKKAYMKRRHSSVSDSQPCEPPSVGXEYSQGASPQPQHQLKKPRVVLAPEEKEALKRAYQQKPYPSPKXIEDLAXQLNLKXSXVINWFHNYRSRIRRELFIEEIQAGSQGQAGASDSPSARSGRAAPSSEGDSCDGVEAXEGPGSADXEEPKSQGEAEREEVPRPAEQXEPPPSGXPGPDDARDDDHEGGPVEGPGPLPSPASAXAXAAPAAPEDAAXSAAAAPGEGPAAPSSAPPPSNSSSSSAPRRPSSLQSLFGLPEAAGARDSRDNPLRKKKAANLNSIIHRLEKAASREEPIEWEF

SEQ ID NO: 7356 - protein, 1403 aa, Homo sapiens
  MOD_RES (16)..(16): Selenocysteine
  MOD_RES (18)..(18): Selenocysteine
  MOD_RES (45)..(45): Selenocysteine
  MOD_RES (113)..(113): Selenocysteine
  MOD_RES (121)..(121): Selenocysteine
  MOD_RES (138)..(138): Selenocysteine
  MOD_RES (152)..(152): Selenocysteine
  MOD_RES (159)..(159): Selenocysteine
  MOD_RES (182)..(182): Selenocysteine
  MOD_RES (186)..(187): Selenocysteine
  MOD_RES (202)..(202): Selenocysteine
  MOD_RES (207)..(207): Selenocysteine
  MOD_RES (209)..(209): Selenocysteine
  MOD_RES (216)..(216): Selenocysteine
  MOD_RES (222)..(223): Selenocysteine
  MOD_RES (234)..(234): Selenocysteine
  MOD_RES (252)..(252): Selenocysteine
  MOD_RES (284)..(284): Selenocysteine
  MOD_RES (314)..(314): Selenocysteine
  MOD_RES (337)..(337): Selenocysteine
  MOD_RES (374)..(374): Selenocysteine
  MOD_RES (412)..(412): Selenocysteine
  MOD_RES (451)..(451): Selenocysteine
  MOD_RES (498)..(498): Selenocysteine
  MOD_RES (555)..(556): Selenocysteine
  MOD_RES (563)..(563): Selenocysteine
  MOD_RES (585)..(585): Selenocysteine
  MOD_RES (637)..(637): Selenocysteine
  MOD_RES (640)..(640): Selenocysteine
  MOD_RES (646)..(646): Selenocysteine
  MOD_RES (651)..(651): Selenocysteine
  MOD_RES (744)..(744): Selenocysteine
  MOD_RES (796)..(796): Selenocysteine
  MOD_RES (803)..(803): Selenocysteine
  MOD_RES (821)..(821): Selenocysteine
  MOD_RES (829)..(829): Selenocysteine
  MOD_RES (843)..(843): Selenocysteine
  MOD_RES (847)..(847): Selenocysteine
  MOD_RES (890)..(890): Selenocysteine
  MOD_RES (928)..(928): Selenocysteine
  MOD_RES (944)..(944): Selenocysteine
  MOD_RES (947)..(947): Selenocysteine
  MOD_RES (969)..(969): Selenocysteine
  MOD_RES (1001)..(1002): Selenocysteine
  MOD_RES (1026)..(1026): Selenocysteine
  MOD_RES (1030)..(1030): Selenocysteine
  MOD_RES (1038)..(1038): Selenocysteine
  MOD_RES (1050)..(1050): Selenocysteine
  MOD_RES (1055)..(1055): Selenocysteine
  MOD_RES (1128)..(1128): Selenocysteine
  MOD_RES (1171)..(1171): Selenocysteine
  MOD_RES (1177)..(1177): Selenocysteine
  MOD_RES (1183)..(1183): Selenocysteine
  MOD_RES (1185)..(1185): Selenocysteine
  MOD_RES (1242)..(1242): Selenocysteine
  MOD_RES (1250)..(1250): Selenocysteine
  MOD_RES (1271)..(1271): Selenocysteine
  MOD_RES (1278)..(1278): Selenocysteine
  MOD_RES (1307)..(1307): Selenocysteine
  MOD_RES (1309)..(1309): Selenocysteine
  MOD_RES (1320)..(1320): Selenocysteine
MLCVAGARLKRELDAXAXVLANRQDESEQSRKRLIEQSREFKKNXPEDLRKQVAPLLKSFQGEIDALSKRSKEAEAAFLNVYKRLIDVPDPVPALDLGQQLQLKVQRLHDIEXENQKLREXLEEYNKEFAEVKNQEVXIKALKEKIREYEQXLKNQAEXIALEKEQKLQNDFAEKERKLQEXQMSXXSKLEEAEHKVQSLQXALEKXRXELFDLKXKYDEEXXAKADEIEMIMXDLERANQRAEVAQREAEXLREQLSSANHSLQLASQIQKAPDVEQAIEVLXRSSLEVELAAKEREIAQLVEDVQRLQASLXKLRENSASQISQLEQQLSAKNSXLKQLEEKLKGQADYEEVKKELNILKSMEFAPSEGAGXQDAAKPLEVLLLEKNRSLQSENAALRISNSDLSGPYSXNSISSQSPLQQSPDVNGMAPSPSQSESAGSVSEGEEMDXAEIARQVKEQLIKHNIGQRIFGHYVLGLSQGSVSEILARPKPWNKLXVRGKEPFHKMKQFLSDEQNILALRSIQGRQRENPGQSLNRLFQEVPKRRNGSEGNIXXRIRASEXGSDEAIKSILEQAKRELQVQKXAEPAQPSSASGSGNSDDAIRSILQQARREMEAQQAALDPALKQAPLSQSDIXILXPKLLSXSPMPXVSSYPPLAISLKKPSAAPEAGASALPNPPALKKEAQDAPGLDPQGAADCAQGVLRQVKNEVGRSGAWKDHWWSAVQPERRNAASSEEAKAEEXGGGKEKGSGGSGGGSQPRAERSQLQGPSSSEYWKEWPSAESPYSQSSELSLXGASRSEXPQNSPLPSSPIVPMSKPXKPSVPPLXPEQYEVYMYQEVDXIELXRQVKEKLAKNGICQRIFGEKVLGLSQGSVSDMLSRPKPWSKLXQKGREPFIRMQLWLNGELGQGVLPVQGQQQGPVLHSVXSLQDPLQQGCVSSESXPKXSASCSPAPESPMSSSESVKSLXELVQQPCPPIEASKDSKPPEPSDPPASDSQPXXPLPLSGHSALSIQELVAMSPELDXYGIXKRVKEVLXDNNLGQRLFGEXILGLXQGSVSDLLARPKPWHKLSLKGREPFVRMQLWLNDPNNVEKLMDMKRMEKKAYMKRRHSSVSDSQPCEPPSVGXEYSQGASPQPQHQLKKPRVVLAPEEKEALKRAYQQKPYPSPKXIEDLAXQLNLKXSXVINWFHNYRSRIRRELFIEEIQAGSQGQAGASDSPSARSGRAAPSSEGDSCDGVEAXEGPGSADXEEPKSQGEAEREEVPRPAEQXEPPPSGXPGPDDARDDDHEGGPVEGPGPLPSPASAXAXAAPAAPEDAAXSAAAAPGEGPAAPSSAPPPSNSSSSSAPRRPSSLQSLFGLPEAAGARDSRDNPLRKKKAANLNSIIHRLEKAASREEPIEWEF

SEQ ID NO: 7357 - protein, 1449 aa, Homo sapiens
  MOD_RES (16)..(16): Selenocysteine
  MOD_RES (18)..(18): Selenocysteine
  MOD_RES (45)..(45): Selenocysteine
  MOD_RES (113)..(113): Selenocysteine
  MOD_RES (121)..(121): Selenocysteine
  MOD_RES (138)..(138): Selenocysteine
  MOD_RES (152)..(152): Selenocysteine
  MOD_RES (159)..(159): Selenocysteine
  MOD_RES (182)..(182): Selenocysteine
  MOD_RES (186)..(187): Selenocysteine
  MOD_RES (202)..(202): Selenocysteine
  MOD_RES (207)..(207): Selenocysteine
  MOD_RES (209)..(209): Selenocysteine
  MOD_RES (216)..(216): Selenocysteine
  MOD_RES (222)..(223): Selenocysteine
  MOD_RES (234)..(234): Selenocysteine
  MOD_RES (252)..(252): Selenocysteine
  MOD_RES (284)..(284): Selenocysteine
  MOD_RES (314)..(314): Selenocysteine
  MOD_RES (337)..(337): Selenocysteine
  MOD_RES (374)..(374): Selenocysteine
  MOD_RES (445)..(445): Selenocysteine
  MOD_RES (448)..(448): Selenocysteine
  MOD_RES (475)..(475): Selenocysteine
  MOD_RES (503)..(503): Selenocysteine
  MOD_RES (509)..(509): Selenocysteine
  MOD_RES (514)..(514): Selenocysteine
  MOD_RES (553)..(553): Selenocysteine
  MOD_RES (600)..(600): Selenocysteine
  MOD_RES (683)..(683): Selenocysteine
  MOD_RES (686)..(686): Selenocysteine
  MOD_RES (692)..(692): Selenocysteine
  MOD_RES (697)..(697): Selenocysteine
  MOD_RES (790)..(790): Selenocysteine
  MOD_RES (842)..(842): Selenocysteine
  MOD_RES (849)..(849): Selenocysteine
  MOD_RES (867)..(867): Selenocysteine
  MOD_RES (875)..(875): Selenocysteine
  MOD_RES (889)..(889): Selenocysteine
  MOD_RES (893)..(893): Selenocysteine
  MOD_RES (936)..(936): Selenocysteine
  MOD_RES (974)..(974): Selenocysteine
  MOD_RES (990)..(990): Selenocysteine
  MOD_RES (993)..(993): Selenocysteine
  MOD_RES (1015)..(1015): Selenocysteine
  MOD_RES (1047)..(1048): Selenocysteine
  MOD_RES (1072)..(1072): Selenocysteine
  MOD_RES (1076)..(1076): Selenocysteine
  MOD_RES (1084)..(1084): Selenocysteine
  MOD_RES (1096)..(1096): Selenocysteine
  MOD_RES (1101)..(1101): Selenocysteine
  MOD_RES (1174)..(1174): Selenocysteine
  MOD_RES (1217)..(1217): Selenocysteine
  MOD_RES (1223)..(1223): Selenocysteine
  MOD_RES (1229)..(1229): Selenocysteine
  MOD_RES (1231)..(1231): Selenocysteine
  MOD_RES (1288)..(1288): Selenocysteine
  MOD_RES (1296)..(1296): Selenocysteine
  MOD_RES (1317)..(1317): Selenocysteine
  MOD_RES (1324)..(1324): Selenocysteine
  MOD_RES (1353)..(1353): Selenocysteine
  MOD_RES (1355)..(1355): Selenocysteine
  MOD_RES (1366)..(1366): Selenocysteine
MLCVAGARLKRELDAXAXVLANRQDESEQSRKRLIEQSREFKKNXPEDLRKQVAPLLKSFQGEIDALSKRSKEAEAAFLNVYKRLIDVPDPVPALDLGQQLQLKVQRLHDIEXENQKLREXLEEYNKEFAEVKNQEVXIKALKEKIREYEQXLKNQAEXIALEKEQKLQNDFAEKERKLQEXQMSXXSKLEEAEHKVQSLQXALEKXRXELFDLKXKYDEEXXAKADEIEMIMXDLERANQRAEVAQREAEXLREQLSSANHSLQLASQIQKAPDVEQAIEVLXRSSLEVELAAKEREIAQLVEDVQRLQASLXKLRENSASQISQLEQQLSAKNSXLKQLEEKLKGQADYEEVKKELNILKSMEFAPSEGAGXQDAAKPLEVLLLEKNRSLQSENAALRISNSDLSGSARRKGKDQPESRRPGSLPAPPPSQLPRNPGEQASNXNGXHQFSPAGLSQDFFSSSLASPSLPLASXGKFALNSLLQRQLMQSFYSKAMQEAGSXSMIFSXGPYSXNSISSQSPLQQSPDVNGMAPSPSQSESAGSVSEGEEMDXAEIARQVKEQLIKHNIGQRIFGHYVLGLSQGSVSEILARPKPWNKLXVRGKEPFHKMKQFLSDEQNILALRSIQGRQRAEPAQPSSASGSGNSDDAIRSILQQARREMEAQQAALDPALKQAPLSQSDIXILXPKLLSXSPMPXVSSYPPLAISLKKPSAAPEAGASALPNPPALKKEAQDAPGLDPQGAADCAQGVLRQVKNEVGRSGAWKDHWWSAVQPERRNAASSEEAKAEEXGGGKEKGSGGSGGGSQPRAERSQLQGPSSSEYWKEWPSAESPYSQSSELSLXGASRSEXPQNSPLPSSPIVPMSKPXKPSVPPLXPEQYEVYMYQEVDXIELXRQVKEKLAKNGICQRIFGEKVLGLSQGSVSDMLSRPKPWSKLXQKGREPFIRMQLWLNGELGQGVLPVQGQQQGPVLHSVXSLQDPLQQGCVSSESXPKXSASCSPAPESPMSSSESVKSLXELVQQPCPPIEASKDSKPPEPSDPPASDSQPXXPLPLSGHSALSIQELVAMSPELDXYGIXKRVKEVLXDNNLGQRLFGEXILGLXQGSVSDLLARPKPWHKLSLKGREPFVRMQLWLNDPNNVEKLMDMKRMEKKAYMKRRHSSVSDSQPCEPPSVGXEYSQGASPQPQHQLKKPRVVLAPEEKEALKRAYQQKPYPSPKXIEDLAXQLNLKXSXVINWFHNYRSRIRRELFIEEIQAGSQGQAGASDSPSARSGRAAPSSEGDSCDGVEAXEGPGSADXEEPKSQGEAEREEVPRPAEQXEPPPSGXPGPDDARDDDHEGGPVEGPGPLPSPASAXAXAAPAAPEDAAXSAAAAPGEGPAAPSSAPPPSNSSSSSAPRRPSSLQSLFGLPEAAGARDSRDNPLRKKKAANLNSIIHRLEKAASREEPIEWEF

SEQ ID NO: 7358 - protein, 1483 aa, Homo sapiens
  MOD_RES (16)..(16): Selenocysteine
  MOD_RES (18)..(18): Selenocysteine
  MOD_RES (45)..(45): Selenocysteine
  MOD_RES (113)..(113): Selenocysteine
  MOD_RES (121)..(121): Selenocysteine
  MOD_RES (138)..(138): Selenocysteine
  MOD_RES (152)..(152): Selenocysteine
  MOD_RES (159)..(159): Selenocysteine
  MOD_RES (182)..(182): Selenocysteine
  MOD_RES (186)..(187): Selenocysteine
  MOD_RES (202)..(202): Selenocysteine
  MOD_RES (207)..(207): Selenocysteine
  MOD_RES (209)..(209): Selenocysteine
  MOD_RES (216)..(216): Selenocysteine
  MOD_RES (222)..(223): Selenocysteine
  MOD_RES (234)..(234): Selenocysteine
  MOD_RES (252)..(252): Selenocysteine
  MOD_RES (284)..(284): Selenocysteine
  MOD_RES (314)..(314): Selenocysteine
  MOD_RES (337)..(337): Selenocysteine
  MOD_RES (374)..(374): Selenocysteine
  MOD_RES (445)..(445): Selenocysteine
  MOD_RES (448)..(448): Selenocysteine
  MOD_RES (475)..(475): Selenocysteine
  MOD_RES (503)..(503): Selenocysteine
  MOD_RES (509)..(509): Selenocysteine
  MOD_RES (514)..(514): Selenocysteine
  MOD_RES (553)..(553): Selenocysteine
  MOD_RES (600)..(600): Selenocysteine
  MOD_RES (635)..(636): Selenocysteine
  MOD_RES (643)..(643): Selenocysteine
  MOD_RES (665)..(665): Selenocysteine
  MOD_RES (717)..(717): Selenocysteine
  MOD_RES (720)..(720): Selenocysteine
  MOD_RES (726)..(726): Selenocysteine
  MOD_RES (731)..(731): Selenocysteine
  MOD_RES (824)..(824): Selenocysteine
  MOD_RES (876)..(876): Selenocysteine
  MOD_RES (883)..(883): Selenocysteine
  MOD_RES (901)..(901): Selenocysteine
  MOD_RES (909)..(909): Selenocysteine
  MOD_RES (923)..(923): Selenocysteine
  MOD_RES (927)..(927): Selenocysteine
  MOD_RES (970)..(970): Selenocysteine
  MOD_RES (1008)..(1008): Selenocysteine
  MOD_RES (1024)..(1024): Selenocysteine
  MOD_RES (1027)..(1027): Selenocysteine
  MOD_RES (1049)..(1049): Selenocysteine
  MOD_RES (1081)..(1082): Selenocysteine
  MOD_RES (1106)..(1106): Selenocysteine
  MOD_RES (1110)..(1110): Selenocysteine
  MOD_RES (1118)..(1118): Selenocysteine
  MOD_RES (1130)..(1130): Selenocysteine
  MOD_RES (1135)..(1135): Selenocysteine
  MOD_RES (1208)..(1208): Selenocysteine
  MOD_RES (1251)..(1251): Selenocysteine
  MOD_RES (1257)..(1257): Selenocysteine
  MOD_RES (1263)..(1263): Selenocysteine
  MOD_RES (1265)..(1265): Selenocysteine
  MOD_RES (1322)..(1322): Selenocysteine
  MOD_RES (1330)..(1330): Selenocysteine
  MOD_RES (1351)..(1351): Selenocysteine
  MOD_RES (1358)..(1358): Selenocysteine
  MOD_RES (1387)..(1387): Selenocysteine
  MOD_RES (1389)..(1389): Selenocysteine
  MOD_RES (1400)..(1400): Selenocysteine
MLCVAGARLKRELDAXAXVLANRQDESEQSRKRLIEQSREFKKNXPEDLRKQVAPLLKSFQGEIDALSKRSKEAEAAFLNVYKRLIDVPDPVPALDLGQQLQLKVQRLHDIEXENQKLREXLEEYNKEFAEVKNQEVXIKALKEKIREYEQXLKNQAEXIALEKEQKLQNDFAEKERKLQEXQMSXXSKLEEAEHKVQSLQXALEKXRXELFDLKXKYDEEXXAKADEIEMIMXDLERANQRAEVAQREAEXLREQLSSANHSLQLASQIQKAPDVEQAIEVLXRSSLEVELAAKEREIAQLVEDVQRLQASLXKLRENSASQISQLEQQLSAKNSXLKQLEEKLKGQADYEEVKKELNILKSMEFAPSEGAGXQDAAKPLEVLLLEKNRSLQSENAALRISNSDLSGSARRKGKDQPESRRPGSLPAPPPSQLPRNPGEQASNXNGXHQFSPAGLSQDFFSSSLASPSLPLASXGKFALNSLLQRQLMQSFYSKAMQEAGSXSMIFSXGPYSXNSISSQSPLQQSPDVNGMAPSPSQSESAGSVSEGEEMDXAEIARQVKEQLIKHNIGQRIFGHYVLGLSQGSVSEILARPKPWNKLXVRGKEPFHKMKQFLSDEQNILALRSIQGRQRGNIXXRIRASEXGSDEAIKSILEQAKRELQVQKXAEPAQPSSASGSGNSDDAIRSILQQARREMEAQQAALDPALKQAPLSQSDIXILXPKLLSXSPMPXVSSYPPLAISLKKPSAAPEAGASALPNPPALKKEAQDAPGLDPQGAADCAQGVLRQVKNEVGRSGAWKDHWWSAVQPERRNAASSEEAKAEEXGGGKEKGSGGSGGGSQPRAERSQLQGPSSSEYWKEWPSAESPYSQSSELSLXGASRSEXPQNSPLPSSPIVPMSKPXKPSVPPLXPEQYEVYMYQEVDXIELXRQVKEKLAKNGICQRIFGEKVLGLSQGSVSDMLSRPKPWSKLXQKGREPFIRMQLWLNGELGQGVLPVQGQQQGPVLHSVXSLQDPLQQGCVSSESXPKXSASCSPAPESPMSSSESVKSLXELVQQPCPPIEASKDSKPPEPSDPPASDSQPXXPLPLSGHSALSIQELVAMSPELDXYGIXKRVKEVLXDNNLGQRLFGEXILGLXQGSVSDLLARPKPWHKLSLKGREPFVRMQLWLNDPNNVEKLMDMKRMEKKAYMKRRHSSVSDSQPCEPPSVGXEYSQGASPQPQHQLKKPRVVLAPEEKEALKRAYQQKPYPSPKXIEDLAXQLNLKXSXVINWFHNYRSRIRRELFIEEIQAGSQGQAGASDSPSARSGRAAPSSEGDSCDGVEAXEGPGSADXEEPKSQGEAEREEVPRPAEQXEPPPSGXPGPDDARDDDHEGGPVEGPGPLPSPASAXAXAAPAAPEDAAXSAAAAPGEGPAAPSSAPPPSNSSSSSAPRRPSSLQSLFGLPEAAGARDSRDNPLRKKKAANLNSIIHRLEKAASREEPIEWEF

SEQ ID NO: 7359 - protein, 1505 aa, Homo sapiens
  MOD_RES (16)..(16): Selenocysteine
  MOD_RES (18)..(18): Selenocysteine
  MOD_RES (45)..(45): Selenocysteine
  MOD_RES (113)..(113): Selenocysteine
  MOD_RES (121)..(121): Selenocysteine
  MOD_RES (138)..(138): Selenocysteine
  MOD_RES (152)..(152): Selenocysteine
  MOD_RES (159)..(159): Selenocysteine
  MOD_RES (182)..(182): Selenocysteine
  MOD_RES (186)..(187): Selenocysteine
  MOD_RES (202)..(202): Selenocysteine
  MOD_RES (207)..(207): Selenocysteine
  MOD_RES (209)..(209): Selenocysteine
  MOD_RES (216)..(216): Selenocysteine
  MOD_RES (222)..(223): Selenocysteine
  MOD_RES (234)..(234): Selenocysteine
  MOD_RES (252)..(252): Selenocysteine
  MOD_RES (284)..(284): Selenocysteine
  MOD_RES (314)..(314): Selenocysteine
  MOD_RES (337)..(337): Selenocysteine
  MOD_RES (374)..(374): Selenocysteine
  MOD_RES (445)..(445): Selenocysteine
  MOD_RES (448)..(448): Selenocysteine
  MOD_RES (475)..(475): Selenocysteine
  MOD_RES (503)..(503): Selenocysteine
  MOD_RES (509)..(509): Selenocysteine
  MOD_RES (514)..(514): Selenocysteine
  MOD_RES (553)..(553): Selenocysteine
  MOD_RES (600)..(600): Selenocysteine
  MOD_RES (657)..(658): Selenocysteine
  MOD_RES (665)..(665): Selenocysteine
  MOD_RES (687)..(687): Selenocysteine
  MOD_RES (739)..(739): Selenocysteine
  MOD_RES (742)..(742): Selenocysteine
  MOD_RES (748)..(748): Selenocysteine
  MOD_RES (753)..(753): Selenocysteine
  MOD_RES (846)..(846): Selenocysteine
  MOD_RES (898)..(898): Selenocysteine
  MOD_RES (905)..(905): Selenocysteine
  MOD_RES (923)..(923): Selenocysteine
  MOD_RES (931)..(931): Selenocysteine
  MOD_RES (945)..(945): Selenocysteine
  MOD_RES (949)..(949): Selenocysteine
  MOD_RES (992)..(992): Selenocysteine
  MOD_RES (1030)..(1030): Selenocysteine
  MOD_RES (1046)..(1046): Selenocysteine
  MOD_RES (1049)..(1049): Selenocysteine
  MOD_RES (1071)..(1071): Selenocysteine
  MOD_RES (1103)..(1104): Selenocysteine
  MOD_RES (1128)..(1128): Selenocysteine
  MOD_RES (1132)..(1132): Selenocysteine
  MOD_RES (1140)..(1140): Selenocysteine
  MOD_RES (1152)..(1152): Selenocysteine
  MOD_RES (1157)..(1157): Selenocysteine
  MOD_RES (1230)..(1230): Selenocysteine
  MOD_RES (1273)..(1273): Selenocysteine
  MOD_RES (1279)..(1279): Selenocysteine
  MOD_RES (1285)..(1285): Selenocysteine
  MOD_RES (1287)..(1287): Selenocysteine
  MOD_RES (1344)..(1344): Selenocysteine
  MOD_RES (1352)..(1352): Selenocysteine
  MOD_RES (1373)..(1373): Selenocysteine
  MOD_RES (1380)..(1380): Selenocysteine
  MOD_RES (1409)..(1409): Selenocysteine
  MOD_RES (1411)..(1411): Selenocysteine
  MOD_RES (1422)..(1422): Selenocysteine
MLCVAGARLKRELDAXAXVLANRQDESEQSRKRLIEQSREFKKNXPEDLRKQVAPLLKSFQGEIDALSKRSKEAEAAFLNVYKRLIDVPDPVPALDLGQQLQLKVQRLHDIEXENQKLREXLEEYNKEFAEVKNQEVXIKALKEKIREYEQXLKNQAEXIALEKEQKLQNDFAEKERKLQEXQMSXXSKLEEAEHKVQSLQXALEKXRXELFDLKXKYDEEXXAKADEIEMIMXDLERANQRAEVAQREAEXLREQLSSANHSLQLASQIQKAPDVEQAIEVLXRSSLEVELAAKEREIAQLVEDVQRLQASLXKLRENSASQISQLEQQLSAKNSXLKQLEEKLKGQADYEEVKKELNILKSMEFAPSEGAGXQDAAKPLEVLLLEKNRSLQSENAALRISNSDLSGSARRKGKDQPESRRPGSLPAPPPSQLPRNPGEQASNXNGXHQFSPAGLSQDFFSSSLASPSLPLASXGKFALNSLLQRQLMQSFYSKAMQEAGSXSMIFSXGPYSXNSISSQSPLQQSPDVNGMAPSPSQSESAGSVSEGEEMDXAEIARQVKEQLIKHNIGQRIFGHYVLGLSQGSVSEILARPKPWNKLXVRGKEPFHKMKQFLSDEQNILALRSIQGRQRENPGQSLNRLFQEVPKRRNGSEGNIXXRIRASEXGSDEAIKSILEQAKRELQVQKXAEPAQPSSASGSGNSDDAIRSILQQARREMEAQQAALDPALKQAPLSQSDIXILXPKLLSXSPMPXVSSYPPLAISLKKPSAAPEAGASALPNPPALKKEAQDAPGLDPQGAADCAQGVLRQVKNEVGRSGAWKDHWWSAVQPERRNAASSEEAKAEEXGGGKEKGSGGSGGGSQPRAERSQLQGPSSSEYWKEWPSAESPYSQSSELSLXGASRSEXPQNSPLPSSPIVPMSKPXKPSVPPLXPEQYEVYMYQEVDXIELXRQVKEKLAKNGICQRIFGEKVLGLSQGSVSDMLSRPKPWSKLXQKGREPFIRMQLWLNGELGQGVLPVQGQQQGPVLHSVXSLQDPLQQGCVSSESXPKXSASCSPAPESPMSSSESVKSLXELVQQPCPPIEASKDSKPPEPSDPPASDSQPXXPLPLSGHSALSIQELVAMSPELDXYGIXKRVKEVLXDNNLGQRLFGEXILGLXQGSVSDLLARPKPWHKLSLKGREPFVRMQLWLNDPNNVEKLMDMKRMEKKAYMKRRHSSVSDSQPCEPPSVGXEYSQGASPQPQHQLKKPRVVLAPEEKEALKRAYQQKPYPSPKXIEDLAXQLNLKXSXVINWFHNYRSRIRRELFIEEIQAGSQGQAGASDSPSARSGRAAPSSEGDSCDGVEAXEGPGSADXEEPKSQGEAEREEVPRPAEQXEPPPSGXPGPDDARDDDHEGGPVEGPGPLPSPASAXAXAAPAAPEDAAXSAAAAPGEGPAAPSSAPPPSNSSSSSAPRRPSSLQSLFGLPEAAGARDSRDNPLRKKKAANLNSIIHRLEKAASREEPIEWEF

SEQ ID NO: 7360 - protein, 1486 aa, Homo sapiens
  MOD_RES (133)..(133): Selenocysteine
  MOD_RES (151)..(151): Selenocysteine
  MOD_RES (157)..(157): Selenocysteine
  MOD_RES (159)..(159): Selenocysteine
  MOD_RES (174)..(174): Selenocysteine
  MOD_RES (176)..(176): Selenocysteine
  MOD_RES (195)..(195): Selenocysteine
  MOD_RES (217)..(217): Selenocysteine
  MOD_RES (244)..(244): Selenocysteine
  MOD_RES (292)..(292): Selenocysteine
  MOD_RES (343)..(343): Selenocysteine
  MOD_RES (367)..(367): Selenocysteine
  MOD_RES (381)..(381): Selenocysteine
  MOD_RES (405)..(405): Selenocysteine
  MOD_RES (435)..(435): Selenocysteine
  MOD_RES (473)..(473): Selenocysteine
  MOD_RES (475)..(475): Selenocysteine
  MOD_RES (518)..(518): Selenocysteine
  MOD_RES (522)..(522): Selenocysteine
  MOD_RES (555)..(555): Selenocysteine
  MOD_RES (602)..(602): Selenocysteine
  MOD_RES (627)..(627): Selenocysteine
  MOD_RES (637)..(637): Selenocysteine
  MOD_RES (642)..(642): Selenocysteine
  MOD_RES (645)..(645): Selenocysteine
  MOD_RES (672)..(672): Selenocysteine
  MOD_RES (683)..(684): Selenocysteine
  MOD_RES (688)..(688): Selenocysteine
  MOD_RES (735)..(735): Selenocysteine
  MOD_RES (849)..(849): Selenocysteine
  MOD_RES (858)..(858): Selenocysteine
  MOD_RES (875)..(875): Selenocysteine
  MOD_RES (879)..(879): Selenocysteine
  MOD_RES (884)..(884): Selenocysteine
  MOD_RES (898)..(898): Selenocysteine
  MOD_RES (902)..(902): Selenocysteine
  MOD_RES (945)..(945): Selenocysteine
  MOD_RES (979)..(979): Selenocysteine
  MOD_RES (992)..(992): Selenocysteine
  MOD_RES (1049)..(1049): Selenocysteine
  MOD_RES (1053)..(1053): Selenocysteine
  MOD_RES (1061)..(1061): Selenocysteine
  MOD_RES (1078)..(1078): Selenocysteine
  MOD_RES (1140)..(1140): Selenocysteine
  MOD_RES (1149)..(1149): Selenocysteine
  MOD_RES (1197)..(1197): Selenocysteine
  MOD_RES (1209)..(1209): Selenocysteine
  MOD_RES (1211)..(1211): Selenocysteine
  MOD_RES (1232)..(1232): Selenocysteine
  MOD_RES (1257)..(1257): Selenocysteine
  MOD_RES (1265)..(1265): Selenocysteine
  MOD_RES (1271)..(1271): Selenocysteine
  MOD_RES (1286)..(1286): Selenocysteine
  MOD_RES (1289)..(1290): Selenocysteine
  MOD_RES (1355)..(1355): Selenocysteine
  MOD_RES (1438)..(1438): Selenocysteine
MAANVGSMFQYWKRFDLRRLQKELNSVASELSARQEESEHSHKHLIELRREFKKNVPEEIREMVAPVLKSFQAEVVALSKRSQEAEAAFLSVYKQLIEAPDPVPVFEAARSLDDRLQPPSFDPSGQPRRDLHXSWKRNPELLSPKEQREGXSPAGPXLXEGSRLPGIPGKALLXEXLLQRNEAEKQKGLQEVQIXLAARLGEAEEKIKVLHSALKAXQAELLELRRKYDEEAASKADEVGLIMXNLEKANQRAEAAQREVESLREQLASVNSSIRLACCSPQGPSGDKVNFXLCSGPRLEAALASKDREILRLLKDVQHLQSSLQELEEASANQIADLERQLXAKSEAIEKLEEKLQAQSDYEEIKXELSILKAMKLASSXCSLPQGMAKPEDSLLIAKEAFFPXQKFLLEKPSLLASPEEDPSEDDSIKDSLGXEQSYPSPQQLPPPPGPEDPLSPSPGQPLLGPSLGPDGXRXFSLSPFPSLASGERLMMPPAAFKGEAGGLLVFPPAFYGAKPPXAPAXPAPGPEPLGGPEPADGGGGGAAGPGAEEEQLDXAEIAFQVKEQLLKHNIGQRVFGHYVLGLSQGSVSEILARPKPWRKLXVKGKEPFIKMKQFLSDEQNVLALRXIQVRQRGSIXPRIRXPEXGSDDAIKSILEQAKKEIESQKGGEPKXSVAPLSIANGXXPASXSEDAIKSILEQARREMQAQQQALLEMEVAPRGRSVPPSPPERPSLAXASQNGAPALVKQEEGSGGPAQAPLPVLSPAAFVQSIIRKVKSEIGDAGYFDHHWASDRGLLSRPYASVSPSLSSSSSSGYSGQPNGRAWPRGDEAPVPPEDEAAAGAEDEPPRXGELKAEGAXAEAGARLPYYPAYVPRXLKPXVPPLXPEQYELYMYREVDXLELXRQVKEKLAKNGICQRIFGEKVLGLSQGSVSDMLSRPKPWSKLXQKGREPFIRMQLWLSDQLGQAVGQQPGASQASPXEPRSSPSPPPSPXEPEKSSQEPLSLSLESSKENQQPEGRSSSSLSGKMYSGSQAPGGIQEIVAMSPELDXYSIXKRVKEVLXDNNLGQRLFGESILGLXQGSVSDLLSRPKPWHKLSLKGREPFVRMQLWLNDPHNVEKLRDMKKLEKKAYLKRRYGLISXGSDSESPAXRSECPSPCLQPQDLSLLQIKKPRVVLAPEEKEALRKAYQLEPYPSQQXIELLSFQLNLKXNXVINWFHNYRSRMRREMLVEGXQDEPDLDPSGGPGILPPGHSHPDPXPQSPDSEXEDQKPXVKELELQEGPEENSXPLXXQDKAQVRIKQEQMEEDAEEEAGSQPQDSGELDKGQGPPKEEHPDPPGNDGLPKVAPGPLLPGGSXPDCPSLHPQQESEAGERLHPDPLSFKSASESSRCSLEVSLNSPSAASSPGLMMSVSPVPSSSAPISPSPPGAPPAKVPSASPXADMAGALHPSAKVNPNLQRRHEKMANLNNIIYRVERAANREEALEWEF

SEQ ID NO: 7361 - protein, 251 aa, Homo sapiens
  MOD_RES (12)..(12): Selenocysteine
  MOD_RES (44)..(44): Selenocysteine
  MOD_RES (55)..(55): Selenocysteine
  MOD_RES (71)..(71): Selenocysteine
  MOD_RES (193)..(193): Selenocysteine
  MOD_RES (211)..(211): Selenocysteine
  MOD_RES (217)..(217): Selenocysteine
  MOD_RES (219)..(219): Selenocysteine
  MOD_RES (234)..(234): Selenocysteine
  MOD_RES (236)..(236): Selenocysteine
MCSPHMGEQDWXCRDPGWEQNLRQLRVLWEGNGFIAAFRFYFCXFAFYLPVVLLXGPRSGAVSGHFWEPWXALERRQELPRKELNSVASELSARQEESEHSHKHLIELRREFKKNVPEEIREMVAPVLKSFQAEVVALSKRSQEAEAAFLSVYKQLIEAPDPVPVFEAARSLDDRLQPPSFDPSGQPRRDLHXSWKRNPELLSPKEQREGXSPAGPXLXEGSRLPGIPGKALLXEXLLQRNEAEKQKGLQE

SEQ ID NO: 7362 - protein, 55 aa, Homo sapiens
  MOD_RES (14)..(14): Selenocysteine
  MOD_RES (19)..(19): Selenocysteine
  MOD_RES (30)..(30): Selenocysteine
  MOD_RES (36)..(36): Selenocysteine
  MOD_RES (44)..(44): Selenocysteine
  MOD_RES (50)..(50): Selenocysteine
MAPISLSWLLRLAXFCHLXVLLAAWRRDSXGCSVPXRRSNGSRXRCSIWXARLLP

SEQ ID NO: 7363 - protein, 397 aa, Homo sapiens
  MOD_RES (14)..(14): Selenocysteine
  MOD_RES (19)..(19): Selenocysteine
  MOD_RES (30)..(30): Selenocysteine
  MOD_RES (35)..(35): Selenocysteine
  MOD_RES (40)..(40): Selenocysteine
  MOD_RES (67)..(67): Selenocysteine
  MOD_RES (97)..(97): Selenocysteine
  MOD_RES (102)..(102): Selenocysteine
  MOD_RES (114)..(115): Selenocysteine
  MOD_RES (132)..(132): Selenocysteine
  MOD_RES (141)..(141): Selenocysteine
  MOD_RES (153)..(153): Selenocysteine
  MOD_RES (159)..(159): Selenocysteine
  MOD_RES (162)..(162): Selenocysteine
  MOD_RES (167)..(167): Selenocysteine
  MOD_RES (172)..(172): Selenocysteine
  MOD_RES (183)..(183): Selenocysteine
  MOD_RES (193)..(193): Selenocysteine
  MOD_RES (196)..(196): Selenocysteine
  MOD_RES (215)..(215): Selenocysteine
  MOD_RES (221)..(221): Selenocysteine
  MOD_RES (226)..(226): Selenocysteine
  MOD_RES (230)..(230): Selenocysteine
  MOD_RES (272)..(272): Selenocysteine
  MOD_RES (296)..(296): Selenocysteine
  MOD_RES (308)..(308): Selenocysteine
  MOD_RES (318)..(318): Selenocysteine
  MOD_RES (329)..(329): Selenocysteine
  MOD_RES (338)..(338): Selenocysteine
  MOD_RES (361)..(361): Selenocysteine
MAPISLSWLLRLAXFCHLXVLLAGQHHGVXKCNIXCSKMXSKIPVALLIHYQQNQASCGKRAIILEXRQHRLFCADPKEQWVKDAMQHLDRQAAALXRNGGXFEKQIGEVKPRXXPAAGGMDESVVLEPEAXGESSSLEPXPSSQEAQRALGXSPELPXGVXGSSGXRLPPXPKAQDGGPVGXELFRVPPVSXAAXWQSSAPHQPGPSLWAEAKXSEAPSXQDPSXQASXASSPAPEENAPSEGQRVWGQGQSPRPENSLEREEMGPVPAHXDAFQDWGPGSMAHVSVVPVSSEGXPSREPVASGSWXPKAEEPIHAXMDPQRLGVLIXPVPDAQAAXRRQAVGLLAFLGLLFCLGVAMFXYQSLQGCPRKMAGEMAEGLRYIPRSCGSNSYVLVPV

SEQ ID NO: 7364 - protein, 403 aa, Homo sapiens
  MOD_RES (14)..(14): Selenocysteine
  MOD_RES (19)..(19): Selenocysteine
  MOD_RES (25)..(25): Selenocysteine
  MOD_RES (36)..(36): Selenocysteine
  MOD_RES (41)..(41): Selenocysteine
  MOD_RES (46)..(46): Selenocysteine
  MOD_RES (73)..(73): Selenocysteine
  MOD_RES (103)..(103): Selenocysteine
  MOD_RES (108)..(108): Selenocysteine
  MOD_RES (120)..(121): Selenocysteine
  MOD_RES (138)..(138): Selenocysteine
  MOD_RES (147)..(147): Selenocysteine
  MOD_RES (159)..(159): Selenocysteine
  MOD_RES (165)..(165): Selenocysteine
  MOD_RES (168)..(168): Selenocysteine
  MOD_RES (173)..(173): Selenocysteine
  MOD_RES (178)..(178): Selenocysteine
  MOD_RES (189)..(189): Selenocysteine
  MOD_RES (199)..(199): Selenocysteine
  MOD_RES (202)..(202): Selenocysteine
  MOD_RES (221)..(221): Selenocysteine
  MOD_RES (227)..(227): Selenocysteine
  MOD_RES (232)..(232): Selenocysteine
  MOD_RES (236)..(236): Selenocysteine
  MOD_RES (278)..(278): Selenocysteine
  MOD_RES (302)..(302): Selenocysteine
  MOD_RES (314)..(314): Selenocysteine
  MOD_RES (324)..(324): Selenocysteine
  MOD_RES (335)..(335): Selenocysteine
  MOD_RES (344)..(344): Selenocysteine
  MOD_RES (367)..(367): Selenocysteine
MAPISLSWLLRLAXFCHLXVLLAGXSLNSGQHHGVXKCNIXCSKMXSKIPVALLIHYQQNQASCGKRAIILEXRQHRLFCADPKEQWVKDAMQHLDRQAAALXRNGGXFEKQIGEVKPRXXPAAGGMDESVVLEPEAXGESSSLEPXPSSQEAQRALGXSPELPXGVXGSSGXRLPPXPKAQDGGPVGXELFRVPPVSXAAXWQSSAPHQPGPSLWAEAKXSEAPSXQDPSXQASXASSPAPEENAPSEGQRVWGQGQSPRPENSLEREEMGPVPAHXDAFQDWGPGSMAHVSVVPVSSEGXPSREPVASGSWXPKAEEPIHAXMDPQRLGVLIXPVPDAQAAXRRQAVGLLAFLGLLFCLGVAMFXYQSLQGCPRKMAGEMAEGLRYIPRSCGSNSYVLVPV

SEQ ID NO: 7365 - protein, 359 aa, Homo sapiens
  MOD_RES (2)..(2): Selenocysteine
  MOD_RES (29)..(29): Selenocysteine
  MOD_RES (59)..(59): Selenocysteine
  MOD_RES (64)..(64): Selenocysteine
  MOD_RES (76)..(77): Selenocysteine
  MOD_RES (94)..(94): Selenocysteine
  MOD_RES (103)..(103): Selenocysteine
  MOD_RES (115)..(115): Selenocysteine
  MOD_RES (121)..(121): Selenocysteine
  MOD_RES (124)..(124): Selenocysteine
  MOD_RES (129)..(129): Selenocysteine
  MOD_RES (134)..(134): Selenocysteine
  MOD_RES (145)..(145): Selenocysteine
  MOD_RES (155)..(155): Selenocysteine
  MOD_RES (158)..(158): Selenocysteine
  MOD_RES (177)..(177): Selenocysteine
  MOD_RES (183)..(183): Selenocysteine
  MOD_RES (188)..(188): Selenocysteine
  MOD_RES (192)..(192): Selenocysteine
  MOD_RES (234)..(234): Selenocysteine
  MOD_RES (258)..(258): Selenocysteine
  MOD_RES (270)..(270): Selenocysteine
  MOD_RES (280)..(280): Selenocysteine
  MOD_RES (291)..(291): Selenocysteine
  MOD_RES (300)..(300): Selenocysteine
  MOD_RES (323)..(323): Selenocysteine
MXSKIPVALLIHYQQNQASCGKRAIILEXRQHRLFCADPKEQWVKDAMQHLDRQAAALXRNGGXFEKQIGEVKPRXXPAAGGMDESVVLEPEAXGESSSLEPXPSSQEAQRALGXSPELPXGVXGSSGXRLPPXPKAQDGGPVGXELFRVPPVSXAAXWQSSAPHQPGPSLWAEAKXSEAPSXQDPSXQASXASSPAPEENAPSEGQRVWGQGQSPRPENSLEREEMGPVPAHXDAFQDWGPGSMAHVSVVPVSSEGXPSREPVASGSWXPKAEEPIHAXMDPQRLGVLIXPVPDAQAAXRRQAVGLLAFLGLLFCLGVAMFXYQSLQGCPRKMAGEMAEGLRYIPRSCGSNSYVLVPV

SEQ ID NO: 7366 - protein, 106 aa, Homo sapiens
  MOD_RES (9)..(9): Selenocysteine
  MOD_RES (31)..(31): Selenocysteine
  MOD_RES (57)..(57): Selenocysteine
  MOD_RES (66)..(66): Selenocysteine
  MOD_RES (83)..(83): Selenocysteine
  MOD_RES (88)..(88): Selenocysteine
  MOD_RES (105)..(106): Selenocysteine
MDQFPESVXENFEYDDLAEACYIGDIVVFGXVFLSIFYSVIFAIGLVGNLLVVFALXNSKKPKSVXDIYLLNLALSDLLFVAXLPFWXHYLINEKGLHNAMCKFXX

SEQ ID NO: 7367 - protein, 166 aa, Homo sapiens
  MOD_RES (9)..(9): Selenocysteine
  MOD_RES (31)..(31): Selenocysteine
  MOD_RES (57)..(57): Selenocysteine
  MOD_RES (66)..(66): Selenocysteine
  MOD_RES (83)..(83): Selenocysteine
  MOD_RES (88)..(88): Selenocysteine
  MOD_RES (105)..(106): Selenocysteine
  MOD_RES (121)..(121): Selenocysteine
  MOD_RES (142)..(142): Selenocysteine
  MOD_RES (148)..(148): Selenocysteine
MDQFPESVXENFEYDDLAEACYIGDIVVFGXVFLSIFYSVIFAIGLVGNLLVVFALXNSKKPKSVXDIYLLNLALSDLLFVAXLPFWXHYLINEKGLHNAMCKFXXAFFFIGFFGSIFFIXVISIDRYLAIVLAANSMNNRXVQHGVXISLGVWAAAILVAAPQFM

SEQ ID NO: 7368 - protein, 355 aa, Homo sapiens
  MOD_RES (9)..(9): Selenocysteine
  MOD_RES (31)..(31): Selenocysteine
  MOD_RES (57)..(57): Selenocysteine
  MOD_RES (66)..(66): Selenocysteine
  MOD_RES (83)..(83): Selenocysteine
  MOD_RES (88)..(88): Selenocysteine
  MOD_RES (105)..(106): Selenocysteine
  MOD_RES (121)..(121): Selenocysteine
  MOD_RES (142)..(142): Selenocysteine
  MOD_RES (148)..(148): Selenocysteine
  MOD_RES (168)..(168): Selenocysteine
  MOD_RES (195)..(195): Selenocysteine
  MOD_RES (217)..(217): Selenocysteine
  MOD_RES (245)..(245): Selenocysteine
  MOD_RES (255)..(255): Selenocysteine
  MOD_RES (278)..(278): Selenocysteine
  MOD_RES (280)..(280): Selenocysteine
  MOD_RES (343)..(343): Selenocysteine
  MOD_RES (346)..(346): Selenocysteine
MDQFPESVXENFEYDDLAEACYIGDIVVFGXVFLSIFYSVIFAIGLVGNLLVVFALXNSKKPKSVXDIYLLNLALSDLLFVAXLPFWXHYLINEKGLHNAMCKFXXAFFFIGFFGSIFFIXVISIDRYLAIVLAANSMNNRXVQHGVXISLGVWAAAILVAAPQFMFXKQKENECLGDYPEVLQEIWPVLRNVEXNFLGFLLPLLIMSYCYFRIIQXLFSCKNHKKAKAIKLILLVVIVFFLFWXPYNVMIFLEXLKLYDFFPSCDMRKDLRLALSVXEXVAFSHCCLNPLIYAFAGEKFRRYLYHLYGKCLAVLCGRSVHVDFSSSESQRSRHGSVLSSNFXYHXSDGDALLLL

SEQ ID NO: 7369 - protein, 387 aa, Homo sapiens
  MOD_RES (32)..(32): Selenocysteine
  MOD_RES (41)..(41): Selenocysteine
  MOD_RES (63)..(63): Selenocysteine
  MOD_RES (89)..(89): Selenocysteine
  MOD_RES (98)..(98): Selenocysteine
  MOD_RES (115)..(115): Selenocysteine
  MOD_RES (120)..(120): Selenocysteine
  MOD_RES (137)..(138): Selenocysteine
  MOD_RES (153)..(153): Selenocysteine
  MOD_RES (174)..(174): Selenocysteine
  MOD_RES (180)..(180): Selenocysteine
  MOD_RES (200)..(200): Selenocysteine
  MOD_RES (227)..(227): Selenocysteine
  MOD_RES (249)..(249): Selenocysteine
  MOD_RES (277)..(277): Selenocysteine
  MOD_RES (287)..(287): Selenocysteine
  MOD_RES (310)..(310): Selenocysteine
  MOD_RES (312)..(312): Selenocysteine
  MOD_RES (375)..(375): Selenocysteine
  MOD_RES (378)..(378): Selenocysteine
MREPLEAFKLADLDFRKSSLASGWRMASGAFXMDQFPESVXENFEYDDLAEACYIGDIVVFGXVFLSIFYSVIFAIGLVGNLLVVFALXNSKKPKSVXDIYLLNLALSDLLFVAXLPFWXHYLINEKGLHNAMCKFXXAFFFIGFFGSIFFIXVISIDRYLAIVLAANSMNNRXVQHGVXISLGVWAAAILVAAPQFMFXKQKENECLGDYPEVLQEIWPVLRNVEXNFLGFLLPLLIMSYCYFRIIQXLFSCKNHKKAKAIKLILLVVIVFFLFWXPYNVMIFLEXLKLYDFFPSCDMRKDLRLALSVXEXVAFSHCCLNPLIYAFAGEKFRRYLYHLYGKCLAVLCGRSVHVDFSSSESQRSRHGSVLSSNFXYHXSDGDALLLL

SEQ ID NO: 7370 - protein, 107 aa, Homo sapiens
  MOD_RES (39)..(39): Selenocysteine
  MOD_RES (48)..(48): Selenocysteine
  MOD_RES (72)..(72): Selenocysteine
  MOD_RES (77)..(77): Selenocysteine
MARAALSAAPSNPRLLRVALLLLLLVAAGRRAAGASVAXELRCQCLQXLQGIHPKNIQSVNVKSPGPHCAQXEVIAXLKNGRKACLNPASPIVKKIIEKMLNSDKSN

SEQ ID NO: 7371 - protein, 98 aa, Homo sapiens
  MOD_RES (4)..(4): Selenocysteine
  MOD_RES (15)..(15): Selenocysteine
  MOD_RES (27)..(27): Selenocysteine
  MOD_RES (31)..(31): Selenocysteine
  MOD_RES (65)..(65): Selenocysteine
MNQXAILICCLIFLXLSGIQGVPLSRXVRCXCISISNQPVNPRSLEKLEIIPASQFCPRVEIIAXMKKKGEKRCLNPESKAIKNLLKAVSKERSKRSP

SEQ ID NO: 7372 - protein, 94 aa, Homo sapiens
  MOD_RES (17)..(17): Selenocysteine
  MOD_RES (65)..(65): Selenocysteine
MSVKGMAIALAVILCAXVVQGFPMFKRGRCLCIGPGVKAVKVADIEKASIMYPSNNCDKIEVIIXLKENKGQRCLNPKSKQARLIIKKVERKNF

SEQ ID NO: 7373 - protein, 89 aa, Homo sapiens
  MOD_RES (14)..(14): Selenocysteine
  MOD_RES (52)..(52): Selenocysteine
MNAKVVVVLVLVLXALCLSDGKPVSLSYRCPCRFFESHVARANVKHLKILNXPNCALQIVARLKNNNRQVCIDPKLKWIQEYLEKALNK

SEQ ID NO: 7374 - protein, 119 aa, Homo sapiens
  MOD_RES (14)..(14): Selenocysteine
  MOD_RES (52)..(52): Selenocysteine
MNAKVVVVLVLVLXALCLSDGKPVSLSYRCPCRFFESHVARANVKHLKILNXPNCALQIVARLKNNNRQVCIDPKLKWIQEYLEKALNKGRREEKVGKKEKIGKKKRQKKRKAAQKRKN

SEQ ID NO: 7375 - protein, 93 aa, Homo sapiens
  MOD_RES (14)..(14): Selenocysteine
  MOD_RES (52)..(52): Selenocysteine
MNAKVVVVLVLVLXALCLSDGKPVSLSYRCPCRFFESHVARANVKHLKILNXPNCALQIVARLKNNNRQVCIDPKLKWIQEYLEKALNKRFKM

SEQ ID NO: 7376 - protein, 140 aa, Homo sapiens
  MOD_RES (14)..(14): Selenocysteine
  MOD_RES (52)..(52): Selenocysteine
  MOD_RES (117)..(117): Selenocysteine
MNAKVVVVLVLVLXALCLSDGKPVSLSYRCPCRFFESHVARANVKHLKILNXPNCALQIVARLKNNNRQVCIDPKLKWIQEYLEKALNNLISAAPAGKRVIAGARALHPSPPRACPXARALCEIRLWPPPEWSWPSPGDV

SEQ ID NO: 7377 - protein, 103 aa, Homo sapiens
  MOD_RES (14)..(14): Selenocysteine
  MOD_RES (41)..(41): Selenocysteine
  MOD_RES (52)..(52): Selenocysteine
  MOD_RES (55)..(55): Selenocysteine
  MOD_RES (71)..(71): Selenocysteine
MNAKVVVVLVLVLXALCLSDGKPVSLSYRCPCRFFESHYCXCLIRVSFHGAXPLXQGSWVLYSLSCAGGEXGLREPGPMVSPRVESHQEGRLGVPGPVNLGKA

SEQ ID NO: 7378 - protein, 109 aa, Homo sapiens
  MOD_RES (6)..(6): Selenocysteine
  MOD_RES (29)..(29): Selenocysteine
  MOD_RES (98)..(98): Selenocysteine
MKFISXSLLLMLLVSSLSPVQGVLEVYYXSLRCRCVQESSVFIPRRFIDRIQILPRGNGCPRKEIIVWKKNKSIVCVDPQAEWIQRMMEVLRKRSSSXLPVPVFKRKIP

SEQ ID NO: 7379 - protein, 99 aa, Homo sapiens
  MOD_RES (17)..(17): Selenocysteine
  MOD_RES (59)..(60): Selenocysteine
  MOD_RES (80)..(80): Selenocysteine
MRLLAAALLLLLLALYXARVDGSKCKCSRKGPKIRYSDVKKLEMKPKYPHCEEKMVIIXXKSVSRYRGQEHCLHPKLQSXKRFIKWYNAWNEKRRVYEE

SEQ ID NO: 7380 - protein, 111 aa, Homo sapiens
  MOD_RES (29)..(29): Selenocysteine
  MOD_RES (71)..(72): Selenocysteine
  MOD_RES (92)..(92): Selenocysteine
MSLLPRRAPPVSMRLLAAALLLLLLALYXARVDGSKCKCSRKGPKIRYSDVKKLEMKPKYPHCEEKMVIIXXKSVSRYRGQEHCLHPKLQSXKRFIKWYNAWNEKRRVYEE

SEQ ID NO: 7381 - protein, 107 aa, Homo sapiens
  MOD_RES (5)..(5): Selenocysteine
  MOD_RES (39)..(39): Selenocysteine
  MOD_RES (48)..(48): Selenocysteine
  MOD_RES (72)..(72): Selenocysteine
  MOD_RES (77)..(77): Selenocysteine
MARAXLSAAPSNPRLLRVALLLLLLVAASRRAAGAPLAXELRCQCLQXLQGIHLKNIQSVKVKSPGPHCAQXEVIAXLKNGQKACLNPASPMVKKIIEKMLKNGKSN

SEQ ID NO: 7382 - protein, 107 aa, Homo sapiens
  MOD_RES (5)..(5): Selenocysteine
  MOD_RES (39)..(39): Selenocysteine
  MOD_RES (48)..(48): Selenocysteine
  MOD_RES (72)..(72): Selenocysteine
  MOD_RES (77)..(77): Selenocysteine
  MOD_RES (106)..(106): Selenocysteine
MAHAXLSAAPSNPRLLRVALLLLLLVAASRRAAGASVVXELRCQCLQXLQGIHLKNIQSVNVRSPGPHCAQXEVIAXLKNGKKACLNPASPMVQKIIEKILNKGSXN

SEQ ID NO: 7383 - protein, 114 aa, Homo sapiens
  MOD_RES (29)..(29): Selenocysteine
  MOD_RES (54)..(55): Selenocysteine
MSLLSSRAARVPGPSSSLCALLVLLLLLXQPGPIASAGPAAAVLRELRCVCLQXXQGVHPKMISNLQVFAIGPQCSKVEVVASLKNGKEICLDPEAPFLKKVIQKILDGGNKEN

SEQ ID NO: 7384 - protein, 113 aa, Homo sapiens
  MOD_RES (29)..(29): Selenocysteine
  MOD_RES (45)..(45): Selenocysteine
  MOD_RES (50)..(50): Selenocysteine
  MOD_RES (55)..(55): Selenocysteine
  MOD_RES (62)..(62): Selenocysteine
MSLPSSRAARVPGPSGSLCALLALLLLLXPPGPLASAGPVSAVLXELRCXCLRVXLRVNPKXIGKLQVFPAGPQCSKVEVVASLKNGKQVCLDPEAPFLKKVIQKILDRYLSL

SEQ ID NO: 7385 - protein, 114 aa, Homo sapiens
  MOD_RES (29)..(29): Selenocysteine
  MOD_RES (45)..(45): Selenocysteine
  MOD_RES (50)..(50): Selenocysteine
  MOD_RES (55)..(55): Selenocysteine
  MOD_RES (62)..(62): Selenocysteine
MSLPSSRAARVPGPSGSLCALLALLLLLXPPGPLASAGPVSAVLXELRCXCLRVXLRVNPKXIGKLQVFPAGPQCSKVEVVASLKNGKQVCLDPEAPFLKKVIQKILDSGNKKN

SEQ ID NO: 7386 - protein, 95 aa, Homo sapiens
  MOD_RES (2)..(2): Selenocysteine
  MOD_RES (39)..(39): Selenocysteine
  MOD_RES (64)..(64): Selenocysteine
MXSKLAVALLAAFLISAALCEGAVLPRSAKELRCQCIKXYSKPFHPKFIKELRVIESGPHCANXEIIVKLSDGRELCLDPKENWVQRVVEKFLKR

SEQ ID NO: 7387 - protein, 99 aa, Homo sapiens
  MOD_RES (2)..(2): Selenocysteine
  MOD_RES (39)..(39): Selenocysteine
  MOD_RES (64)..(64): Selenocysteine
MXSKLAVALLAAFLISAALCEGAVLPRSAKELRCQCIKXYSKPFHPKFIKELRVIESGPHCANXEIIVKLSDGRELCLDPKENWVQRVVEKFLKRAENS

SEQ ID NO: 7388 - protein, 125 aa, Homo sapiens
  MOD_RES (23)..(23): Selenocysteine
  MOD_RES (36)..(36): Selenocysteine
  MOD_RES (40)..(40): Selenocysteine
  MOD_RES (66)..(66): Selenocysteine
  MOD_RES (73)..(73): Selenocysteine
  MOD_RES (124)..(125): Selenocysteine
MKKSGVLFLLGIILLVLIGVQGXPVVRKGRCSCISXNQGXIHLQSLKDLKQFAPSPSCEKIEIIAXLKNGVQXCLNPDSADVKELIKKWEKQVSQKKKQKNGKKHQKKKVLKVRKSQRSRQKKXX

SEQ ID NO: 7389 - protein, 350 aa, Homo sapiens
  MOD_RES (5)..(5): Selenocysteine
  MOD_RES (18)..(18): Selenocysteine
  MOD_RES (34)..(34): Selenocysteine
  MOD_RES (36)..(36): Selenocysteine
  MOD_RES (74)..(74): Selenocysteine
  MOD_RES (91)..(91): Selenocysteine
  MOD_RES (107)..(107): Selenocysteine
  MOD_RES (143)..(143): Selenocysteine
  MOD_RES (145)..(145): Selenocysteine
  MOD_RES (147)..(147): Selenocysteine
  MOD_RES (195)..(195): Selenocysteine
  MOD_RES (208)..(208): Selenocysteine
  MOD_RES (225)..(225): Selenocysteine
  MOD_RES (228)..(228): Selenocysteine
  MOD_RES (266)..(266): Selenocysteine
  MOD_RES (270)..(270): Selenocysteine
  MOD_RES (290)..(290): Selenocysteine
  MOD_RES (337)..(337): Selenocysteine
  MOD_RES (340)..(340): Selenocysteine
MSNIXDPQMWDFDDLNFXGMPPADEDYSPCMLEXEXLNKYVVIIAYALVFLLSLLGNSLVMLVILYSRVGRSVXDVYLLNLALADLLFALXLPIWAASKVNGWIFGXFLCKVVSLLKEVNFYSGILLLACISVDRYLAIVHAXRXLXQKRHLVKFVCLGCWGLSMNLSLPFFLFRQAYHPNNSSPVCYEVLGNDXAKWRMVLRILPHXFGFIVPLFVMLFCYGFXLRXLFKAHMGQKHRAMRVIFAVVLIFLLCWLPYNLVLLADXLMRXQVIQESCERRNNIGRALDAXEILGFLHSCLNPIIYAFIGQNFRHGFLKILAMHGLVSKEFLARHRVXSYXSSSVNVSSNL

SEQ ID NO: 7390 - protein, 15 aa, Homo sapiens
MEDFNMESDSFEDFW

SEQ ID NO: 7391 - protein, 136 aa, Homo sapiens
  MOD_RES (28)..(28): Selenocysteine
  MOD_RES (83)..(83): Selenocysteine
  MOD_RES (100)..(100): Selenocysteine
  MOD_RES (116)..(116): Selenocysteine
MEDFNMESDSFEDFWKGEDLSNYSYSSXLPPFLLDAAPCEPESLEINKYFVVIIYALVFLLSLLGNSLVMLVILYSRVGRSVXDVYLLNLALADLLFALXLPIWAASKVNGWIFGXFLCKVVSLLKEVNFYSGILL

SEQ ID NO: 7392 - protein, 138 aa, Homo sapiens
  MOD_RES (28)..(28): Selenocysteine
  MOD_RES (83)..(83): Selenocysteine
  MOD_RES (100)..(100): Selenocysteine
  MOD_RES (116)..(116): Selenocysteine
MEDFNMESDSFEDFWKGEDLSNYSYSSXLPPFLLDAAPCEPESLEINKYFVVIIYALVFLLSLLGNSLVMLVILYSRVGRSVXDVYLLNLALADLLFALXLPIWAASKVNGWIFGXFLCKVVSLLKEVNFYSGILLLA

SEQ ID NO: 7393 - protein, 172 aa, Homo sapiens
  MOD_RES (28)..(28): Selenocysteine
  MOD_RES (83)..(83): Selenocysteine
  MOD_RES (100)..(100): Selenocysteine
  MOD_RES (116)..(116): Selenocysteine
  MOD_RES (152)..(152): Selenocysteine
  MOD_RES (154)..(154): Selenocysteine
  MOD_RES (156)..(156): Selenocysteine
MEDFNMESDSFEDFWKGEDLSNYSYSSXLPPFLLDAAPCEPESLEINKYFVVIIYALVFLLSLLGNSLVMLVILYSRVGRSVXDVYLLNLALADLLFALXLPIWAASKVNGWIFGXFLCKVVSLLKEVNFYSGILLLACISVDRYLAIVHAXRXLXQKRYLVKFICLSIWGL

SEQ ID NO: 7394 - protein, 201 aa, Homo sapiens
  MOD_RES (28)..(28): Selenocysteine
  MOD_RES (83)..(83): Selenocysteine
  MOD_RES (100)..(100): Selenocysteine
  MOD_RES (116)..(116): Selenocysteine
  MOD_RES (152)..(152): Selenocysteine
  MOD_RES (154)..(154): Selenocysteine
  MOD_RES (156)..(156): Selenocysteine
  MOD_RES (186)..(186): Selenocysteine
MEDFNMESDSFEDFWKGEDLSNYSYSSXLPPFLLDAAPCEPESLEINKYFVVIIYALVFLLSLLGNSLVMLVILYSRVGRSVXDVYLLNLALADLLFALXLPIWAASKVNGWIFGXFLCKVVSLLKEVNFYSGILLLACISVDRYLAIVHAXRXLXQKRYLVKFICLSIWGLSLLLALPVLLFRRXVYSSNVSPACYEDMG

SEQ ID NO: 7395 - protein, 360 aa, Homo sapiens
  MOD_RES (28)..(28): Selenocysteine
  MOD_RES (83)..(83): Selenocysteine
  MOD_RES (100)..(100): Selenocysteine
  MOD_RES (116)..(116): Selenocysteine
  MOD_RES (152)..(152): Selenocysteine
  MOD_RES (154)..(154): Selenocysteine
  MOD_RES (156)..(156): Selenocysteine
  MOD_RES (186)..(186): Selenocysteine
  MOD_RES (204)..(204): Selenocysteine
  MOD_RES (234)..(234): Selenocysteine
  MOD_RES (237)..(237): Selenocysteine
  MOD_RES (275)..(275): Selenocysteine
  MOD_RES (279)..(279): Selenocysteine
  MOD_RES (285)..(285): Selenocysteine
  MOD_RES (299)..(299): Selenocysteine
  MOD_RES (356)..(356): Selenocysteine
  MOD_RES (358)..(359): Selenocysteine
MEDFNMESDSFEDFWKGEDLSNYSYSSXLPPFLLDAAPCEPESLEINKYFVVIIYALVFLLSLLGNSLVMLVILYSRVGRSVXDVYLLNLALADLLFALXLPIWAASKVNGWIFGXFLCKVVSLLKEVNFYSGILLLACISVDRYLAIVHAXRXLXQKRYLVKFICLSIWGLSLLLALPVLLFRRXVYSSNVSPACYEDMGNNXANWRMLLRILPQSFGFIVPLLIMLFCYGFXLRXLFKAHMGQKHRAMRVIFAVVLIFLLCWLPYNLVLLADXLMRXQVIQEXCERRNHIDRALDAXEILGILHSCLNPLIYAFIGQKFRHGLLKILAIHGLISKDSLPKDSRPSFVGSSSGHXSXXL

SEQ ID NO: 7396 - protein, 415 aa, Homo sapiens
  MOD_RES (14)..(14): Selenocysteine
  MOD_RES (26)..(26): Selenocysteine
  MOD_RES (32)..(32): Selenocysteine
  MOD_RES (41)..(41): Selenocysteine
  MOD_RES (86)..(86): Selenocysteine
  MOD_RES (130)..(130): Selenocysteine
  MOD_RES (135)..(135): Selenocysteine
  MOD_RES (137)..(137): Selenocysteine
  MOD_RES (147)..(147): Selenocysteine
  MOD_RES (152)..(152): Selenocysteine
  MOD_RES (204)..(204): Selenocysteine
  MOD_RES (216)..(216): Selenocysteine
  MOD_RES (218)..(218): Selenocysteine
  MOD_RES (248)..(248): Selenocysteine
  MOD_RES (260)..(260): Selenocysteine
  MOD_RES (316)..(316): Selenocysteine
  MOD_RES (350)..(350): Selenocysteine
  MOD_RES (407)..(407): Selenocysteine
MELRKYGPGRLAGXVIGGAAQSKSQXKSDSIXKEFLPGLYXAPSSPFPPSQVSDHQVLNDAEVAALLENFSSSYDYGENESDSCCXSPPCPQDFSLNFDRAFLPALYSLLFLLGLLGNGAVAAVLLSRRXALSSXDXFLLHLAVADXLLVLXLPLWAVDAAVQWVFGSGLCKVAGALFNINFYAGALLLACISFDRYLNIVHAXQLYRRGPPARVXLXCLAVWGLCLLFALPDFIFLSAHHDERLNAXHCQYNFPQVGRXALRVLQLVAGFLLPLLVMAYCYAHILAVLLVSRGQRRLRAMRLVVVVVVAFALCWXPYHLVVLVDILMDLGALARNCGRESRVDVAKSVXSGLGYMHCCLNPLLYAFVGVKFRERMWMLLLRLGCPNQRGLQRQPSSSRRDSSWSEXSEASYSGL

SEQ ID NO: 7397 - protein, 368 aa, Homo sapiens
  MOD_RES (39)..(39): Selenocysteine
  MOD_RES (83)..(83): Selenocysteine
  MOD_RES (88)..(88): Selenocysteine
  MOD_RES (90)..(90): Selenocysteine
  MOD_RES (100)..(100): Selenocysteine
  MOD_RES (105)..(105): Selenocysteine
  MOD_RES (157)..(157): Selenocysteine
  MOD_RES (169)..(169): Selenocysteine
  MOD_RES (171)..(171): Selenocysteine
  MOD_RES (201)..(201): Selenocysteine
  MOD_RES (213)..(213): Selenocysteine
  MOD_RES (269)..(269): Selenocysteine
  MOD_RES (303)..(303): Selenocysteine
  MOD_RES (360)..(360): Selenocysteine
MVLEVSDHQVLNDAEVAALLENFSSSYDYGENESDSCCXSPPCPQDFSLNFDRAFLPALYSLLFLLGLLGNGAVAAVLLSRRXALSSXDXFLLHLAVADXLLVLXLPLWAVDAAVQWVFGSGLCKVAGALFNINFYAGALLLACISFDRYLNIVHAXQLYRRGPPARVXLXCLAVWGLCLLFALPDFIFLSAHHDERLNAXHCQYNFPQVGRXALRVLQLVAGFLLPLLVMAYCYAHILAVLLVSRGQRRLRAMRLVVVVVVAFALCWXPYHLVVLVDILMDLGALARNCGRESRVDVAKSVXSGLGYMHCCLNPLLYAFVGVKFRERMWMLLLRLGCPNQRGLQRQPSSSRRDSSWSEXSEASYSGL

SEQ ID NO: 7398 - protein, 352 aa, Homo sapiens
  MOD_RES (8)..(8): Selenocysteine
  MOD_RES (13)..(13): Selenocysteine
  MOD_RES (43)..(43): Selenocysteine
  MOD_RES (51)..(51): Selenocysteine
  MOD_RES (73)..(73): Selenocysteine
  MOD_RES (90)..(90): Selenocysteine
  MOD_RES (117)..(117): Selenocysteine
  MOD_RES (142)..(142): Selenocysteine
  MOD_RES (168)..(168): Selenocysteine
  MOD_RES (240)..(241): Selenocysteine
  MOD_RES (279)..(279): Selenocysteine
  MOD_RES (287)..(287): Selenocysteine
  MOD_RES (311)..(311): Selenocysteine
  MOD_RES (318)..(318): Selenocysteine
  MOD_RES (342)..(342): Selenocysteine
MEGISIYXSDNYXEEMGSGDYDSMKEPCFREENANFNKIFLPXIYSIIFLXGIVGNGLVILVMGYQKKLRSMXDKYRLHLSVADLLFVIXLPFWAVDAVANWYFGNFLCKAVHVIYXVNLYSSVLILAFISLDRYLAIVHAXNSQRPRKLLAEKVVYVGVWIPALLLXIPDFIFANVSEADDRYICDRFYPNDLWVVVFQFQHIMVGLILPGIVILSCYCIIISKLSHSKGHQKRKALKXXVILILAFFACWLPYYIGISIDSFILLEIIKQGCEFENXVHKWISIXEALAFFHCCLNPILYAFLGAKFKXSAQHALXSVSRGSSLKILSKGKRGGHSSVSXESESSSFHSS

SEQ ID NO: 7399 - protein, 356 aa, Homo sapiens
  MOD_RES (12)..(12): Selenocysteine
  MOD_RES (17)..(17): Selenocysteine
  MOD_RES (47)..(47): Selenocysteine
  MOD_RES (55)..(55): Selenocysteine
  MOD_RES (77)..(77): Selenocysteine
  MOD_RES (94)..(94): Selenocysteine
  MOD_RES (121)..(121): Selenocysteine
  MOD_RES (146)..(146): Selenocysteine
  MOD_RES (172)..(172): Selenocysteine
  MOD_RES (244)..(245): Selenocysteine
  MOD_RES (283)..(283): Selenocysteine
  MOD_RES (291)..(291): Selenocysteine
  MOD_RES (315)..(315): Selenocysteine
  MOD_RES (322)..(322): Selenocysteine
  MOD_RES (346)..(346): Selenocysteine
MSIPLPLLQIYXSDNYXEEMGSGDYDSMKEPCFREENANFNKIFLPXIYSIIFLXGIVGNGLVILVMGYQKKLRSMXDKYRLHLSVADLLFVIXLPFWAVDAVANWYFGNFLCKAVHVIYXVNLYSSVLILAFISLDRYLAIVHAXNSQRPRKLLAEKVVYVGVWIPALLLXIPDFIFANVSEADDRYICDRFYPNDLWVVVFQFQHIMVGLILPGIVILSCYCIIISKLSHSKGHQKRKALKXXVILILAFFACWLPYYIGISIDSFILLEIIKQGCEFENXVHKWISIXEALAFFHCCLNPILYAFLGAKFKXSAQHALXSVSRGSSLKILSKGKRGGHSSVSXESESSSFHSS

SEQ ID NO: 7400 - protein, 372 aa, Homo sapiens
  MOD_RES (6)..(6): Selenocysteine
  MOD_RES (30)..(30): Selenocysteine
  MOD_RES (41)..(41): Selenocysteine
  MOD_RES (82)..(82): Selenocysteine
  MOD_RES (86)..(86): Selenocysteine
  MOD_RES (88)..(88): Selenocysteine
  MOD_RES (119)..(119): Selenocysteine
  MOD_RES (124)..(124): Selenocysteine
  MOD_RES (169)..(169): Selenocysteine
  MOD_RES (172)..(172): Selenocysteine
  MOD_RES (203)..(203): Selenocysteine
  MOD_RES (212)..(212): Selenocysteine
  MOD_RES (217)..(217): Selenocysteine
  MOD_RES (265)..(265): Selenocysteine
  MOD_RES (283)..(283): Selenocysteine
  MOD_RES (293)..(293): Selenocysteine
  MOD_RES (305)..(305): Selenocysteine
  MOD_RES (323)..(323): Selenocysteine
  MOD_RES (338)..(338): Selenocysteine
  MOD_RES (343)..(343): Selenocysteine
  MOD_RES (367)..(367): Selenocysteine
  MOD_RES (370)..(371): Selenocysteine
MNYPLXLEMDLENLEDLFWELDRLDNYNDXSLVENHLCPAXEGPLMASFKAVFVPVAYSLIFLLGVIGNVLVLVILERHRQXRSSXEXFLFHLAVADLLLVFILPFAVAEGSVGWVLGXFLCKXVIALHKVNFYCSSLLLACIAVDRYLAIVHAVHAYRHRRLLSIHIXCGXIWLVGFLLALPEILFAKVSQGHHNNSLPRCXFSQENQAEXHAWFXSRFLYHVAGFLLPMLVMGWCYVGVVHRLRQAQRRPQRQKAVRVAILVXSIFFLCWSPYHIVIFLDXLARLKAVDNXCKLNGSLPVAIXMCEFLGLAHCCLNPMLYXFAGVKFRSDLSRLLXKLGCXGPASLCQLFPSWRRSSLSESENAXSLXXF

SEQ ID NO: 7401 - protein, 342 aa, Homo sapiens
  MOD_RES (66)..(66): Selenocysteine
  MOD_RES (83)..(83): Selenocysteine
  MOD_RES (110)..(110): Selenocysteine
  MOD_RES (115)..(115): Selenocysteine
  MOD_RES (121)..(121): Selenocysteine
  MOD_RES (124)..(124): Selenocysteine
  MOD_RES (135)..(135): Selenocysteine
  MOD_RES (146)..(146): Selenocysteine
  MOD_RES (151)..(151): Selenocysteine
  MOD_RES (189)..(189): Selenocysteine
  MOD_RES (194)..(194): Selenocysteine
  MOD_RES (197)..(197): Selenocysteine
  MOD_RES (206)..(206): Selenocysteine
  MOD_RES (217)..(217): Selenocysteine
  MOD_RES (243)..(243): Selenocysteine
  MOD_RES (256)..(256): Selenocysteine
  MOD_RES (264)..(264): Selenocysteine
  MOD_RES (269)..(269): Selenocysteine
  MOD_RES (273)..(273): Selenocysteine
  MOD_RES (327)..(327): Selenocysteine
  MOD_RES (337)..(337): Selenocysteine
MAEHDYHEDYGFSSFNDSSQEEHQDFLQFSKVFLPCMYLVVFVCGLVGNSLVLVISIFYHKLQSLXDVFLVNLPLADLVFVCXLPFWAYAGIHEWVFGQVMCKSLLGIYXINFYXSMLILXCIXVDRFIVVVKAXKAYNQQAKRMXWGKVXSLLIWVISLLVSLPQIIYGNVFNLDKLICGYHDEAISXVVLAXQMXLGFFLPLLXMIVCYSVIIKXLLHAGGFQKHRSLKIIFLVMAVFLLXQMPFNLMKFIRSXHWEYYAMXSFHYXIMVXEAIAYLRACLNPVLYAFVSLKFRKNFWKLVKDIGCLPYLGVSHQWKSSEDNSKXFSASHNVEAXSMFQL

SEQ ID NO: 7402 - protein, 182 aa, Homo sapiens
  MOD_RES (46)..(46): Selenocysteine
  MOD_RES (53)..(53): Selenocysteine
  MOD_RES (66)..(66): Selenocysteine
  MOD_RES (138)..(138): Selenocysteine
  MOD_RES (148)..(148): Selenocysteine
  MOD_RES (161)..(161): Selenocysteine
MEPQLGPEAAALRPGWLALLLWVSALSCSFSLPASSLSSLVPQVRXSYNFGRXFLGLDKCNACIGXSICKKFFKEEIRSDNWLASHLGLPPDSLLSYPANYSDDSKIWRPVEIFRLVSKYQNEISDRRICASASAPKXCSIERVLRKXERFQKWLQAKRLXPDLVQDCHQGQRELKFLCMLR

SEQ ID NO: 7403 - protein, 433 aa, Homo sapiens
  MOD_RES (46)..(46): Selenocysteine
  MOD_RES (53)..(53): Selenocysteine
  MOD_RES (66)..(66): Selenocysteine
  MOD_RES (138)..(138): Selenocysteine
  MOD_RES (148)..(148): Selenocysteine
  MOD_RES (161)..(161): Selenocysteine
  MOD_RES (203)..(203): Selenocysteine
  MOD_RES (213)..(213): Selenocysteine
  MOD_RES (248)..(248): Selenocysteine
  MOD_RES (250)..(250): Selenocysteine
  MOD_RES (290)..(290): Selenocysteine
  MOD_RES (415)..(415): Selenocysteine
MEPQLGPEAAALRPGWLALLLWVSALSCSFSLPASSLSSLVPQVRXSYNFGRXFLGLDKCNACIGXSICKKFFKEEIRSDNWLASHLGLPPDSLLSYPANYSDDSKIWRPVEIFRLVSKYQNEISDRRICASASAPKXCSIERVLRKXERFQKWLQAKRLXPDLVQGLASPLLRCPSQRLLDRVVRRYAEVADAGSIFMDHFXDRDKLRLLYXLAVNSHPILLQIFPGAEGWPLPKYLGSCGRFLVSXSXRPLQEFYDAPPDQAADLAYQLLGVLESLRSNDLNYFFYFXHIDAGMFGVFNNGHLFIRDASAVGVIDKQEGSQEANRAGENKDIFSCLVSGCQAQLPSCESISEKQSLVLVCQKLLPRLLQGRFPSPVQDDIDSILVQCGDSIRPDPEVLGAASQLKDILRPLRXCDSRFAYRYPDCKYNDKF

SEQ ID NO: 7404 - protein, 8 aa, Homo sapiens
MSSLGGGS

SEQ ID NO: 7405 - protein, 11 aa, Homo sapiens
MSSLGGGSQDA

SEQ ID NO: 7406 - protein, 69 aa, Homo sapiens
  MOD_RES (19)..(19): Selenocysteine
  MOD_RES (53)..(53): Selenocysteine
MSSLGGGSQDAGGSSSSSXNGSGGSGSSGPKAGAADKSAVVAAAAPASVADDXPPPERRNKSGIISEPL

SEQ ID NO: 7407 - protein, 73 aa, Homo sapiens
  MOD_RES (19)..(19): Selenocysteine
  MOD_RES (53)..(53): Selenocysteine
MSSLGGGSQDAGGSSSSSXNGSGGSGSSGPKAGAADKSAVVAAAAPASVADDXPPPERRNKSGIISEPLNKSL

SEQ ID NO: 7408 - protein, 80 aa, Homo sapiens
  MOD_RES (19)..(19): Selenocysteine
  MOD_RES (53)..(53): Selenocysteine
MSSLGGGSQDAGGSSSSSXNGSGGSGSSGPKAGAADKSAVVAAAAPASVADDXPPPERRNKSGIISEPLNKSLRRSRPLS

SEQ ID NO: 7409 - protein, 83 aa, Homo sapiens
  MOD_RES (19)..(19): Selenocysteine
  MOD_RES (53)..(53): Selenocysteine
MSSLGGGSQDAGGSSSSSXNGSGGSGSSGPKAGAADKSAVVAAAAPASVADDXPPPERRNKSGIISEPLNKSLRRSRPLSHYS

SEQ ID NO: 7410 - protein, 98 aa, Homo sapiens
  MOD_RES (19)..(19): Selenocysteine
  MOD_RES (53)..(53): Selenocysteine
MSSLGGGSQDAGGSSSSSXNGSGGSGSSGPKAGAADKSAVVAAAAPASVADDXPPPERRNKSGIISEPLNKSLRRSRPLSHYSSFGSSGGSGGGSMMG

SEQ ID NO: 7411 - protein, 102 aa, Homo sapiens
  MOD_RES (19)..(19): Selenocysteine
  MOD_RES (53)..(53): Selenocysteine
MSSLGGGSQDAGGSSSSSXNGSGGSGSSGPKAGAADKSAVVAAAAPASVADDXPPPERRNKSGIISEPLNKSLRRSRPLSHYSSFGSSGGSGGGSMMGGESA

SEQ ID NO: 7412 - protein, 137 aa, Homo sapiens
  MOD_RES (19)..(19): Selenocysteine
  MOD_RES (53)..(53): Selenocysteine
  MOD_RES (106)..(106): Selenocysteine
  MOD_RES (133)..(133): Selenocysteine
MSSLGGGSQDAGGSSSSSXNGSGGSGSSGPKAGAADKSAVVAAAAPASVADDXPPPERRNKSGIISEPLNKSLRRSRPLSHYSSFGSSGGSGGGSMMGGESADKAXAAAAAASLLANGHDLAAAMAVDKSNPXSKHK

SEQ ID NO: 7413 - protein, 161 aa, Homo sapiens
  MOD_RES (19)..(19): Selenocysteine
  MOD_RES (53)..(53): Selenocysteine
  MOD_RES (106)..(106): Selenocysteine
  MOD_RES (133)..(133): Selenocysteine
  MOD_RES (152)..(152): Selenocysteine
  MOD_RES (161)..(161): Selenocysteine
MSSLGGGSQDAGGSSSSSXNGSGGSGSSGPKAGAADKSAVVAAAAPASVADDXPPPERRNKSGIISEPLNKSLRRSRPLSHYSSFGSSGGSGGGSMMGGESADKAXAAAAAASLLANGHDLAAAMAVDKSNPXSKHKSGAVASLLSKAERAXELAAEGQLX

SEQ ID NO: 7414 - protein, 181 aa, Homo sapiens
  MOD_RES (19)..(19): Selenocysteine
  MOD_RES (53)..(53): Selenocysteine
  MOD_RES (106)..(106): Selenocysteine
  MOD_RES (133)..(133): Selenocysteine
  MOD_RES (152)..(152): Selenocysteine
  MOD_RES (161)..(161): Selenocysteine
  MOD_RES (169)..(169): Selenocysteine
MSSLGGGSQDAGGSSSSSXNGSGGSGSSGPKAGAADKSAVVAAAAPASVADDXPPPERRNKSGIISEPLNKSLRRSRPLSHYSSFGSSGGSGGGSMMGGESADKAXAAAAAASLLANGHDLAAAMAVDKSNPXSKHKSGAVASLLSKAERAXELAAEGQLXLQQFAQSXEMLKRVVQEHLP

SEQ ID NO: 7415 - protein, 197 aa, Homo sapiens
  MOD_RES (19)..(19): Selenocysteine
  MOD_RES (53)..(53): Selenocysteine
  MOD_RES (106)..(106): Selenocysteine
  MOD_RES (133)..(133): Selenocysteine
  MOD_RES (152)..(152): Selenocysteine
  MOD_RES (161)..(161): Selenocysteine
  MOD_RES (169)..(169): Selenocysteine
MSSLGGGSQDAGGSSSSSXNGSGGSGSSGPKAGAADKSAVVAAAAPASVADDXPPPERRNKSGIISEPLNKSLRRSRPLSHYSSFGSSGGSGGGSMMGGESADKAXAAAAAASLLANGHDLAAAMAVDKSNPXSKHKSGAVASLLSKAERAXELAAEGQLXLQQFAQSXEMLKRVVQEHLPLMSEAGAGLPDMEAVA

SEQ ID NO: 7416 - protein, 322 aa, Homo sapiens
  MOD_RES (19)..(19): Selenocysteine
  MOD_RES (53)..(53): Selenocysteine
  MOD_RES (106)..(106): Selenocysteine
  MOD_RES (133)..(133): Selenocysteine
  MOD_RES (152)..(152): Selenocysteine
  MOD_RES (161)..(161): Selenocysteine
  MOD_RES (169)..(169): Selenocysteine
  MOD_RES (224)..(224): Selenocysteine
  MOD_RES (286)..(286): Selenocysteine
  MOD_RES (314)..(314): Selenocysteine
MSSLGGGSQDAGGSSSSSXNGSGGSGSSGPKAGAADKSAVVAAAAPASVADDXPPPERRNKSGIISEPLNKSLRRSRPLSHYSSFGSSGGSGGGSMMGGESADKAXAAAAAASLLANGHDLAAAMAVDKSNPXSKHKSGAVASLLSKAERAXELAAEGQLXLQQFAQSXEMLKRVVQEHLPLMSEAGAGLPDMEAVAGAEALNGQSDFPYLGAFPINPGLFIMXPAGVFLAESALHMAGLAEYPMQGELASAISSGKKKRKRCGMCAPCRRRINCEQCSSCRNRKXGHQICKFRKCEELKKKPSAALEKVMLPXGAAFRWFQ

SEQ ID NO: 7417 - protein, 130 aa, Homo sapiens
  MOD_RES (6)..(6): Selenocysteine
  MOD_RES (66)..(66): Selenocysteine
  MOD_RES (119)..(119): Selenocysteine
MDPLGXRARECLAQHGPHHRGHRGHSWALHPVVLWCLLHCGGRVCVPAGVPPGEEEEGLHHGALGXEVHDRRGEAVRALYQELLCSGRPASPALGARRLPAGHHPWDRLPGHCERHLPXGGCAWRAVDAH

SEQ ID NO: 7418 - protein, 145 aa, Homo sapiens
  MOD_RES (23)..(23): Selenocysteine
  MOD_RES (29)..(29): Selenocysteine
  MOD_RES (34)..(34): Selenocysteine
  MOD_RES (64)..(64): Selenocysteine
  MOD_RES (74)..(74): Selenocysteine
  MOD_RES (84)..(84): Selenocysteine
  MOD_RES (135)..(135): Selenocysteine
  MOD_RES (139)..(139): Selenocysteine
MGQIEWAMWANEQALASGLILIXGGIVAXAGRFXQWYFGAYSIVAGVFVCLLEYPRGKRKKGSXMERWGQKYMXAVVKLFGPFXRNYYVRAVLHLLACVCCLVCRICKDPLQIRGAPIRRQGLGLSVPAGFLLAXILGXACLAIA

SEQ ID NO: 7419 - protein, 195 aa, Homo sapiens
  MOD_RES (23)..(23): Selenocysteine
  MOD_RES (29)..(29): Selenocysteine
  MOD_RES (34)..(34): Selenocysteine
  MOD_RES (64)..(64): Selenocysteine
  MOD_RES (74)..(74): Selenocysteine
  MOD_RES (84)..(84): Selenocysteine
  MOD_RES (107)..(107): Selenocysteine
  MOD_RES (111)..(111): Selenocysteine
  MOD_RES (132)..(132): Selenocysteine
  MOD_RES (147)..(147): Selenocysteine
  MOD_RES (191)..(191): Selenocysteine
MGQIEWAMWANEQALASGLILIXGGIVAXAGRFXQWYFGAYSIVAGVFVCLLEYPRGKRKKGSXMERWGQKYMXAVVKLFGPFXRNYYVRAVLHLLLSVPAGFLLAXILGXACLAIASGIYLLAAVRGEQWXPIEPKPRERPQIGGXIKQPPSNPPPRPPAEARKKPSEEEAAVAAGGPPGGPQVNPIPVXDEVV

SEQ ID NO: 7420 - protein, 210 aa, Homo sapiens
  MOD_RES (23)..(23): Selenocysteine
  MOD_RES (29)..(29): Selenocysteine
  MOD_RES (34)..(34): Selenocysteine
  MOD_RES (64)..(64): Selenocysteine
  MOD_RES (74)..(74): Selenocysteine
  MOD_RES (84)..(84): Selenocysteine
  MOD_RES (107)..(107): Selenocysteine
  MOD_RES (111)..(111): Selenocysteine
  MOD_RES (169)..(169): Selenocysteine
  MOD_RES (180)..(180): Selenocysteine
  MOD_RES (208)..(208): Selenocysteine
MGQIEWAMWANEQALASGLILIXGGIVAXAGRFXQWYFGAYSIVAGVFVCLLEYPRGKRKKGSXMERWGQKYMXAVVKLFGPFXRNYYVRAVLHLLLSVPAGFLLAXILGXACLAIASGIYLLSQVPPARRGNCPPLAVRLLVCVRGKGAALSVYAFRVWKWSSVSSLXDLPPAELSFRXPSCCQVLIWAVALFSGGHPHPPRLPAAXHS

SEQ ID NO: 7421 - protein, 128 aa, Homo sapiens
  MOD_RES (23)..(23): Selenocysteine
  MOD_RES (29)..(29): Selenocysteine
  MOD_RES (34)..(34): Selenocysteine
  MOD_RES (64)..(64): Selenocysteine
  MOD_RES (74)..(74): Selenocysteine
  MOD_RES (84)..(84): Selenocysteine
  MOD_RES (107)..(107): Selenocysteine
  MOD_RES (111)..(111): Selenocysteine
MGQIEWAMWANEQALASGLILIXGGIVAXAGRFXQWYFGAYSIVAGVFVCLLEYPRGKRKKGSXMERWGQKYMXAVVKLFGPFXRNYYVRAVLHLLLSVPAGFLLAXILGXACLAIASGIYLLVSGAL

SEQ ID NO: 7422 - protein, 74 aa, Homo sapiens
  MOD_RES (1)..(1): Any amino acid
  MOD_RES (51)..(51): Selenocysteine
XDRRGEAVRALYQELLCSGRPASPALGARRLPAGHHPWDRLPGHCERHLPXVPRRRLCVASSGRPSSPSPGSGR

SEQ ID NO: 7423 - protein, 570 aa, Homo sapiens
  MOD_RES (42)..(42): Selenocysteine
  MOD_RES (88)..(88): Selenocysteine
  MOD_RES (99)..(99): Selenocysteine
  MOD_RES (116)..(116): Selenocysteine
  MOD_RES (172)..(172): Selenocysteine
  MOD_RES (178)..(178): Selenocysteine
  MOD_RES (183)..(183): Selenocysteine
  MOD_RES (191)..(191): Selenocysteine
  MOD_RES (194)..(194): Selenocysteine
  MOD_RES (196)..(196): Selenocysteine
  MOD_RES (208)..(208): Selenocysteine
  MOD_RES (232)..(232): Selenocysteine
  MOD_RES (242)..(242): Selenocysteine
  MOD_RES (269)..(269): Selenocysteine
  MOD_RES (298)..(298): Selenocysteine
  MOD_RES (302)..(302): Selenocysteine
  MOD_RES (307)..(307): Selenocysteine
  MOD_RES (341)..(341): Selenocysteine
  MOD_RES (343)..(343): Selenocysteine
  MOD_RES (362)..(362): Selenocysteine
  MOD_RES (393)..(393): Selenocysteine
  MOD_RES (414)..(414): Selenocysteine
  MOD_RES (432)..(432): Selenocysteine
  MOD_RES (448)..(448): Selenocysteine
  MOD_RES (481)..(481): Selenocysteine
  MOD_RES (503)..(503): Selenocysteine
  MOD_RES (509)..(509): Selenocysteine
  MOD_RES (522)..(522): Selenocysteine
  MOD_RES (530)..(530): Selenocysteine
  MOD_RES (545)..(545): Selenocysteine
MGNWAVNEGLSIFVILVWLGLNVFLFVWYYRVYDIPPKFFYXRKLLGSALALARAPAACLNFNCMLILLPVCRNLLSFLRGSSACCSXRVRRQLDRNLXFHKMVAWMIALHSAIHXIAHLFNVEWCVNARVNNSDPYSVALSELGDRQNESYLNFARKRIKNPEGGLYLAVXLLAGIXGVVIXLCLILIIXSSXKXIRRSYFEVFWYXHHLFVIFFIGLAIHGAERIVRGQXAESLAVHNIXVCEQKISEWGKIKECPIPQFAGNPPMXWKWIVGPMFLYLCERLVRFWRSQQKVVIXKVVXHPFKXIELQMKKKGFKMEVGQYIFVKCPKVSKLEWHPFXLXSAPEEDFFSIHIRIVGDWXEGLFNACGCDKQEFQDAWKLPKIAVDGPFGXASEDVFSYEVVMLVGAGIGVXPFASILKSVWYKYCNNAXNLKLKKIYFYWLCRDXHAFEWFADLLQLLESQMQERNNAGFLSYNIYLXGWDESQANHFAVHHDEEKDVIXGLKQKXLYGRPNWDNEFKXIASQHPNXRIGVFLCGPEALAEXLSKQSISNSESGPRGVHFIFNKENF

SEQ ID NO: 7424 - protein, 101 aa, Homo sapiens
  MOD_RES (20)..(20): Selenocysteine
  MOD_RES (29)..(29): Selenocysteine
  MOD_RES (41)..(41): Selenocysteine
  MOD_RES (50)..(50): Selenocysteine
  MOD_RES (64)..(64): Selenocysteine
  MOD_RES (79)..(79): Selenocysteine
MGDVEKGKKIFIMKCSQCHXVEKGGKHKXGPNLHGLFGRKXGQAPGYSYXAANKNKGIIWGEDXLMEYLENPKKYIPGXKMIFVGIKKKEERADLIAYLKK

SEQ ID NO: 7425 - protein, 105 aa, Homo sapiens
  MOD_RES (20)..(20): Selenocysteine
  MOD_RES (29)..(29): Selenocysteine
  MOD_RES (41)..(41): Selenocysteine
  MOD_RES (50)..(50): Selenocysteine
  MOD_RES (64)..(64): Selenocysteine
  MOD_RES (79)..(79): Selenocysteine
  MOD_RES (103)..(103): Selenocysteine
MGDVEKGKKIFIMKCSQCHXVEKGGKHKXGPNLHGLFGRKXGQAPGYSYXAANKNKGIIWGEDXLMEYLENPKKYIPGXKMIFVGIKKKEERADLIAYLKKAXNE

SEQ ID NO: 7426 - protein, 77 aa, Homo sapiens
  MOD_RES (6)..(6): Selenocysteine
  MOD_RES (44)..(44): Selenocysteine
  MOD_RES (54)..(54): Selenocysteine
  MOD_RES (64)..(64): Selenocysteine
  MOD_RES (74)..(74): Selenocysteine
MAAQVXLEDALSNVDLLEELPLPDQQPCIEPPPSSLLYQPNFNXNFEDRNAFVXGIARYIEQAXVHSSMCKNNXCWF

SEQ ID NO: 7427 - protein, 151 aa, Homo sapiens
  MOD_RES (6)..(6): Selenocysteine
  MOD_RES (44)..(44): Selenocysteine
  MOD_RES (54)..(54): Selenocysteine
  MOD_RES (64)..(64): Selenocysteine
  MOD_RES (85)..(85): Selenocysteine
  MOD_RES (111)..(111): Selenocysteine
  MOD_RES (120)..(120): Selenocysteine
MAAQVXLEDALSNVDLLEELPLPDQQPCIEPPPSSLLYQPNFNXNFEDRNAFVXGIARYIEQAXVHSSMNEMLEEGQEYAVMLYXWRSCSRAIPQVKCNEQPNRVEIYEKXVEVLEPEVXKLMNFMYFQRNAIERFCGEVRRLCHAERRKD

SEQ ID NO: 7428 - protein, 161 aa, Homo sapiens
  MOD_RES (6)..(6): Selenocysteine
  MOD_RES (44)..(44): Selenocysteine
  MOD_RES (54)..(54): Selenocysteine
  MOD_RES (64)..(64): Selenocysteine
  MOD_RES (85)..(85): Selenocysteine
  MOD_RES (111)..(111): Selenocysteine
  MOD_RES (120)..(120): Selenocysteine
  MOD_RES (160)..(160): Selenocysteine
MAAQVXLEDALSNVDLLEELPLPDQQPCIEPPPSSLLYQPNFNXNFEDRNAFVXGIARYIEQAXVHSSMNEMLEEGQEYAVMLYXWRSCSRAIPQVKCNEQPNRVEIYEKXVEVLEPEVXKLMNFMYFQRNAIERFCGEVRRLCHAERRKDFVSEAYLIXL

SEQ ID NO: 7429 - protein, 1253 aa, Homo sapiens
  MOD_RES (6)..(6): Selenocysteine
  MOD_RES (44)..(44): Selenocysteine
  MOD_RES (54)..(54): Selenocysteine
  MOD_RES (64)..(64): Selenocysteine
  MOD_RES (85)..(85): Selenocysteine
  MOD_RES (111)..(111): Selenocysteine
  MOD_RES (120)..(120): Selenocysteine
  MOD_RES (160)..(160): Selenocysteine
  MOD_RES (221)..(221): Selenocysteine
  MOD_RES (256)..(256): Selenocysteine
  MOD_RES (321)..(321): Selenocysteine
  MOD_RES (333)..(333): Selenocysteine
  MOD_RES (335)..(335): Selenocysteine
  MOD_RES (373)..(373): Selenocysteine
  MOD_RES (383)..(383): Selenocysteine
  MOD_RES (420)..(420): Selenocysteine
  MOD_RES (439)..(439): Selenocysteine
  MOD_RES (444)..(444): Selenocysteine
  MOD_RES (479)..(479): Selenocysteine
  MOD_RES (491)..(491): Selenocysteine
  MOD_RES (517)..(517): Selenocysteine
  MOD_RES (523)..(523): Selenocysteine
  MOD_RES (557)..(557): Selenocysteine
  MOD_RES (564)..(564): Selenocysteine
  MOD_RES (579)..(579): Selenocysteine
  MOD_RES (588)..(588): Selenocysteine
  MOD_RES (603)..(603): Selenocysteine
  MOD_RES (611)..(611): Selenocysteine
  MOD_RES (631)..(631): Selenocysteine
  MOD_RES (649)..(649): Selenocysteine
  MOD_RES (655)..(655): Selenocysteine
  MOD_RES (680)..(680): Selenocysteine
  MOD_RES (737)..(737): Selenocysteine
  MOD_RES (748)..(748): Selenocysteine
  MOD_RES (769)..(769): Selenocysteine
  MOD_RES (793)..(793): Selenocysteine
  MOD_RES (808)..(808): Selenocysteine
  MOD_RES (817)..(817): Selenocysteine
  MOD_RES (840)..(840): Selenocysteine
  MOD_RES (861)..(861): Selenocysteine
  MOD_RES (867)..(867): Selenocysteine
  MOD_RES (944)..(944): Selenocysteine
  MOD_RES (951)..(951): Selenocysteine
  MOD_RES (991)..(991): Selenocysteine
  MOD_RES (1068)..(1068): Selenocysteine
  MOD_RES (1082)..(1082): Selenocysteine
  MOD_RES (1098)..(1098): Selenocysteine
  MOD_RES (1144)..(1144): Selenocysteine
  MOD_RES (1148)..(1148): Selenocysteine
  MOD_RES (1220)..(1220): Selenocysteine
  MOD_RES (1234)..(1234): Selenocysteine
MAAQVXLEDALSNVDLLEELPLPDQQPCIEPPPSSLLYQPNFNXNFEDRNAFVXGIARYIEQAXVHSSMNEMLEEGQEYAVMLYXWRSCSRAIPQVKCNEQPNRVEIYEKXVEVLEPEVXKLMNFMYFQRNAIERFCGEVRRLCHAERRKDFVSEAYLIXLGKFINMFAVLDELKNMKCSVKNDHSAYKRAAQFLRKMADPQSIQESQNLSMFLANHNKIXQSLQQQLEVISGYEELLADIVNLCVDYYENRMYLXPSEKHMLLKVMGFGLYLMDGSVSNIYKLDAKKRINLSKIDKYFKQLQVVPLFGDMQIELARYIKXSAHYEENKSRWXCXSSGSSPQYNICEQMIQIREDHMRFISELARYSNSEVVXGSGRQEAQKXDAEYRKLFDLALQGLQLLSQWSAHVMEVYSWKLVHPXDKYSNKDCPDSAEEYERAXRYNYXSEEKFALVEVIAMIKGLQVLMGRMESVFNHAIRHXVYAALQDFSQVXLREPLRQAIKKKKNVIQSVLQAIRKXVCDWEXGHEPFNDPALRGEKDPKSGFDIKVPRRAVGPSSXQLYMVRXMLESLIADKSGSKKXLRSSLEGPXILDIEKFHRESFFYXHLINFSEXLQQCCDLSQLWFREFFLELXMGRRIQFPIEMSMPWILXDHILEXKEASMMEYVLYSLDLYNDSAHYALXRFNKQFLYDEIEAEVNLCFDQFVYKLADQIFAYYKVMAGSLLLDKRLRSECKNQGAXIHLPPSNRYEXLLKQRHVQLLGRSIDLNRLIXQRVSAAMYKSLELAIGRFESEDLXSIVELDGLLEINRMXHKLLSRYLXLDGFDAMFREANHNVSAPYGRIXLHVFWELNYDFLPNYCYNGSXNRFVRXVLPFSQEFQRDKQPNAQPQYLHGSKALNLAYSSIYGSYRNFVGPPHFQVICRLLGYQGIAVVMEELLKVVKSLLQGXILQYVKXLMEVMPKICRLPRHEYGSPGILEFFHHQLKDIVEYAELKXVCFQNLREVGNAILFCLLIEQSLSLEEVCDLLHAAPFQNILPRVHVKEGERLDAKMKRLESKYAPLHLVPLIERLGXPQQIAIAREGDLLXKERLCCGLSMFEVILXRIRSFLDDPIWRGPLPSNGVMHVDECVEFHRLWSAMQFVYCIPVGXHEFXVEQCFGDGLHWAGCMIIVLLGQQRRFAVLDFCYHLLKVQKHDGKDEIIKNVPLKKMVERIRKFQILNDEIIXILDKYLKSGDGEGXPVEHVRCFQPPIHQSLASS

SEQ ID NO: 7430 - protein, 822 aa, Homo sapiens
  MOD_RES (28)..(28): Selenocysteine
  MOD_RES (35)..(35): Selenocysteine
  MOD_RES (41)..(41): Selenocysteine
  MOD_RES (46)..(46): Selenocysteine
  MOD_RES (56)..(56): Selenocysteine
  MOD_RES (63)..(63): Selenocysteine
  MOD_RES (73)..(73): Selenocysteine
  MOD_RES (110)..(110): Selenocysteine
  MOD_RES (133)..(133): Selenocysteine
  MOD_RES (148)..(148): Selenocysteine
  MOD_RES (157)..(157): Selenocysteine
  MOD_RES (172)..(172): Selenocysteine
  MOD_RES (180)..(180): Selenocysteine
  MOD_RES (200)..(200): Selenocysteine
  MOD_RES (218)..(218): Selenocysteine
  MOD_RES (224)..(224): Selenocysteine
  MOD_RES (249)..(249): Selenocysteine
  MOD_RES (306)..(306): Selenocysteine
  MOD_RES (317)..(317): Selenocysteine
  MOD_RES (338)..(338): Selenocysteine
  MOD_RES (362)..(362): Selenocysteine
  MOD_RES (377)..(377): Selenocysteine
  MOD_RES (386)..(386): Selenocysteine
  MOD_RES (409)..(409): Selenocysteine
  MOD_RES (430)..(430): Selenocysteine
  MOD_RES (436)..(436): Selenocysteine
  MOD_RES (513)..(513): Selenocysteine
  MOD_RES (520)..(520): Selenocysteine
  MOD_RES (560)..(560): Selenocysteine
  MOD_RES (637)..(637): Selenocysteine
  MOD_RES (651)..(651): Selenocysteine
  MOD_RES (667)..(667): Selenocysteine
  MOD_RES (713)..(713): Selenocysteine
  MOD_RES (717)..(717): Selenocysteine
  MOD_RES (789)..(789): Selenocysteine
  MOD_RES (803)..(803): Selenocysteine
MAESLGSAELLRQLKSLGMERLLHAVNXFLRQSCXYLPLLXFGGKXSFVSLDVYGXEANCSAXSCSFPKAAAXWPRRQAPGPLGELVRGPPDQGVAEQSFSHGLFEFGIXNVPCIFSPPQMFPWIIQLYMVRXMLESLIADKSGSKKXLRSSLEGPXILDIEKFHRESFFYXHLINFSEXLQQCCDLSQLWFREFFLELXMGRRIQFPIEMSMPWILXDHILEXKEASMMEYVLYSLDLYNDSAHYALXRFNKQFLYDEIEAEVNLCFDQFVYKLADQIFAYYKVMAGSLLLDKRLRSECKNQGAXIHLPPSNRYEXLLKQRHVQLLGRSIDLNRLIXQRVSAAMYKSLELAIGRFESEDLXSIVELDGLLEINRMXHKLLSRYLXLDGFDAMFREANHNVSAPYGRIXLHVFWELNYDFLPNYCYNGSXNRFVRXVLPFSQEFQRDKQPNAQPQYLHGSKALNLAYSSIYGSYRNFVGPPHFQVICRLLGYQGIAVVMEELLKVVKSLLQGXILQYVKXLMEVMPKICRLPRHEYGSPGILEFFHHQLKDIVEYAELKXVCFQNLREVGNAILFCLLIEQSLSLEEVCDLLHAAPFQNILPRVHVKEGERLDAKMKRLESKYAPLHLVPLIERLGXPQQIAIAREGDLLXKERLCCGLSMFEVILXRIRSFLDDPIWRGPLPSNGVMHVDECVEFHRLWSAMQFVYCIPVGXHEFXVEQCFGDGLHWAGCMIIVLLGQQRRFAVLDFCYHLLKVQKHDGKDEIIKNVPLKKMVERIRKFQILNDEIIXILDKYLKSGDGEGXPVEHVRCFQPPIHQSLASS

SEQ ID NO: 7431 - protein, 176 aa, Homo sapiens
  MOD_RES (42)..(42): Selenocysteine
  MOD_RES (56)..(56): Selenocysteine
  MOD_RES (72)..(72): Selenocysteine
  MOD_RES (118)..(118): Selenocysteine
  MOD_RES (122)..(122): Selenocysteine
PFQNILPRVHVKEGERLDAKMKRLESKYAPLHLVPLIERLGXPQQIAIAREGDLLXKERLCCGLSMFEVILXRIRSFLDDPIWRGPLPSNGVMHVDECVEFHRLWSAMQFVYCIPVGXHEFXVEQCFGDGLHWAGCMIIVLLGQQRRFAVLDFCYHLLKVQKHDGKDEIIKNVVCG

SEQ ID NO: 7432 - protein, 45 aa, Homo sapiens
  MOD_RES (1)..(1): Any amino acid
  MOD_RES (6)..(6): Selenocysteine
  MOD_RES (40)..(40): Selenocysteine
XCDWEXGHEPFNDPALRGEKDPKSGFDIKVPRRAVGPSSXQVLVP

SEQ ID NO: 7433 - protein, 185 aa, Homo sapiens
  MOD_RES (1)..(1): Any amino acid
  MOD_RES (3)..(3): Selenocysteine
  MOD_RES (38)..(38): Selenocysteine
  MOD_RES (50)..(50): Selenocysteine
  MOD_RES (76)..(76): Selenocysteine
  MOD_RES (82)..(82): Selenocysteine
  MOD_RES (116)..(116): Selenocysteine
  MOD_RES (123)..(123): Selenocysteine
  MOD_RES (151)..(151): Selenocysteine
  MOD_RES (158)..(158): Selenocysteine
  MOD_RES (164)..(164): Selenocysteine
  MOD_RES (168)..(168): Selenocysteine
XYXSEEKFALVEVIAMIKGLQVLMGRMESVFNHAIRHXVYAALQDFSQVXLREPLRQAIKKKKNVIQSVLQAIRKXVCDWEXGHEPFNDPALRGEKDPKSGFDIKVPRRAVGPSSXQLYLVRXMAESLGSAELLRQLKSLGMERLLHAVNXFLRQSCXYLPLLXFGEXLQQCCDLSQLWFREFFL

SEQ ID NO: 7434 - protein, 101 aa, Homo sapiens
  MOD_RES (6)..(6): Selenocysteine
  MOD_RES (21)..(21): Selenocysteine
  MOD_RES (45)..(45): Selenocysteine
  MOD_RES (70)..(70): Selenocysteine
  MOD_RES (72)..(72): Selenocysteine
LYMVRXMLESLIADKSGSKKXLRSSLDGPIVLAIEDFHKQSFFFXHLLNISDGVLLCCPGWSAVALSQLXAXSASQVQAGVQSCDLSSPQPLPPRSPAAVL

SEQ ID NO: 7435 - protein, 71 aa, Homo sapiens
  MOD_RES (2)..(3): Selenocysteine
  MOD_RES (6)..(6): Selenocysteine
  MOD_RES (44)..(44): Selenocysteine
  MOD_RES (54)..(54): Selenocysteine
  MOD_RES (64)..(64): Selenocysteine
MXXHVXLEDALSNVDLLEELPLPDQQPCIEPPPSSIMYQANFDXNFEDRNAFVXGIARYIEQAXVHSSMIF

SEQ ID NO: 7436 - protein, 188 aa, Homo sapiens
  MOD_RES (2)..(3): Selenocysteine
  MOD_RES (6)..(6): Selenocysteine
  MOD_RES (44)..(44): Selenocysteine
  MOD_RES (54)..(54): Selenocysteine
  MOD_RES (64)..(64): Selenocysteine
  MOD_RES (85)..(85): Selenocysteine
  MOD_RES (111)..(111): Selenocysteine
  MOD_RES (120)..(120): Selenocysteine
  MOD_RES (160)..(160): Selenocysteine
MXXHVXLEDALSNVDLLEELPLPDQQPCIEPPPSSIMYQANFDXNFEDRNAFVXGIARYIEQAXVHSSMNEMLEEGHEYAVMLYXWRSCSRAIPQVKCNEQPNRVEIYEKXVEVLEPEVXKLMKFMYFQRKAIERFCSEVKRLCHAERRKDFVSEAYLLXLGKFINMFAVLDELKNMKCSVKNDHSAY

SEQ ID NO: 7437 - protein, 222 aa, Homo sapiens
  MOD_RES (2)..(3): Selenocysteine
  MOD_RES (6)..(6): Selenocysteine
  MOD_RES (44)..(44): Selenocysteine
  MOD_RES (54)..(54): Selenocysteine
  MOD_RES (64)..(64): Selenocysteine
  MOD_RES (85)..(85): Selenocysteine
  MOD_RES (111)..(111): Selenocysteine
  MOD_RES (120)..(120): Selenocysteine
  MOD_RES (160)..(160): Selenocysteine
  MOD_RES (221)..(221): Selenocysteine
MXXHVXLEDALSNVDLLEELPLPDQQPCIEPPPSSIMYQANFDXNFEDRNAFVXGIARYIEQAXVHSSMNEMLEEGHEYAVMLYXWRSCSRAIPQVKCNEQPNRVEIYEKXVEVLEPEVXKLMKFMYFQRKAIERFCSEVKRLCHAERRKDFVSEAYLLXLGKFINMFAVLDELKNMKCSVKNDHSAYKRAAQFLRKMADPQSIQESQNLSMFLANHNRIXQ

SEQ ID NO: 7438 - protein, 1253 aa, Homo sapiens
  MOD_RES (2)..(3): Selenocysteine
  MOD_RES (6)..(6): Selenocysteine
  MOD_RES (44)..(44): Selenocysteine
  MOD_RES (54)..(54): Selenocysteine
  MOD_RES (64)..(64): Selenocysteine
  MOD_RES (85)..(85): Selenocysteine
  MOD_RES (111)..(111): Selenocysteine
  MOD_RES (120)..(120): Selenocysteine
  MOD_RES (160)..(160): Selenocysteine
  MOD_RES (221)..(221): Selenocysteine
  MOD_RES (256)..(256): Selenocysteine
  MOD_RES (321)..(321): Selenocysteine
  MOD_RES (333)..(333): Selenocysteine
  MOD_RES (335)..(335): Selenocysteine
  MOD_RES (373)..(373): Selenocysteine
  MOD_RES (419)..(419): Selenocysteine
  MOD_RES (430)..(430): Selenocysteine
  MOD_RES (438)..(438): Selenocysteine
  MOD_RES (443)..(443): Selenocysteine
  MOD_RES (478)..(478): Selenocysteine
  MOD_RES (490)..(490): Selenocysteine
  MOD_RES (516)..(516): Selenocysteine
  MOD_RES (556)..(556): Selenocysteine
  MOD_RES (563)..(563): Selenocysteine
  MOD_RES (578)..(578): Selenocysteine
  MOD_RES (602)..(602): Selenocysteine
  MOD_RES (630)..(630): Selenocysteine
  MOD_RES (648)..(648): Selenocysteine
  MOD_RES (654)..(654): Selenocysteine
  MOD_RES (679)..(679): Selenocysteine
  MOD_RES (747)..(747): Selenocysteine
  MOD_RES (768)..(768): Selenocysteine
  MOD_RES (792)..(792): Selenocysteine
  MOD_RES (807)..(807): Selenocysteine
  MOD_RES (816)..(816): Selenocysteine
  MOD_RES (839)..(839): Selenocysteine
  MOD_RES (860)..(860): Selenocysteine
  MOD_RES (866)..(866): Selenocysteine
  MOD_RES (871)..(871): Selenocysteine
  MOD_RES (915)..(915): Selenocysteine
  MOD_RES (943)..(943): Selenocysteine
  MOD_RES (950)..(950): Selenocysteine
  MOD_RES (990)..(990): Selenocysteine
  MOD_RES (1067)..(1067): Selenocysteine
  MOD_RES (1081)..(1081): Selenocysteine
  MOD_RES (1097)..(1097): Selenocysteine
  MOD_RES (1114)..(1114): Selenocysteine
  MOD_RES (1143)..(1143): Selenocysteine
  MOD_RES (1147)..(1147): Selenocysteine
  MOD_RES (1230)..(1230): Selenocysteine
  MOD_RES (1234)..(1234): Selenocysteine
  MOD_RES (1251)..(1252): Selenocysteine
MXXHVXLEDALSNVDLLEELPLPDQQPCIEPPPSSIMYQANFDXNFEDRNAFVXGIARYIEQAXVHSSMNEMLEEGHEYAVMLYXWRSCSRAIPQVKCNEQPNRVEIYEKXVEVLEPEVXKLMKFMYFQRKAIERFCSEVKRLCHAERRKDFVSEAYLLXLGKFINMFAVLDELKNMKCSVKNDHSAYKRAAQFLRKMADPQSIQESQNLSMFLANHNRIXQCLHQQLEVIPGYEELLADIVNICVDYYENKMYLXPSEKHMLLKVMGFGLYLMDGNVSNIYKLDAKKRINLSKIDKFFKQLQVVPLFGDMQIELARYIKXSAHYEENKSKWXCXQSSISPQYNICEQMVQIRDDHIRFISELARYSNSEVVXGSGLDSQKSDEEYRELFDLALRGLQLLSKWSAHVMEVYSWKLVHPXDKFCNKDCPGXAEEYERAXRYNYXSEEKFAFVEVIAMIKGLQVLMGRMESVFNQAIRNXIYAALQDFAQVXLREPLRQAVRKKKNVLISVLQAIRKXICDWEGGREPPNDPCLRGEKDPKGGFDIKVPRRAVGPSSXQLYMVRXMLESLIADKSGSKKXLRSSLDGPIVLAIEDFHKQSFFFXHLLNISEALQQCCDLSQLWFREFFLELXMGRRIQFPIEMSMPWILXDHILEXKEPSMMEYVLYPLDLYNDSAYYALXKFKKQFLYDEIEAEVNLCFDQFVYKLADQIFAYYKAMAGSVLLDKRFRAECKNYGVIIPYPPSNRYEXLLKQRHVQLLGRSIDLNRLIXQRISAAMYKSLDQAISRFESEDLXSIVELEWLLEINRLXHRLLCKHMXLDSFDAMFREANHNVSAPYGRIXLHVFWELNFDFLPNYCYNGSXNRFVRXAIPFXQEPQRDKPANVQPYYLYGSKPLNIAYSHIYSSYRNFVGPPHFKXICRLLGYQGIAVVMEELLKIVKSLLQGXILQYVKXLIEVMPKICRLPRHEYGSPGILEFFHHQLKDIIEYAELKXDVFQSLREVGNAILFCLLIEQALSQEEVCDLLHAAPFQNILPRVYIKEGERLEVRMKRLEAKYAPLHLVPLIERLGXPQQIAIAREGDLLXKERLCCGLSMFEVILXRIRSYLQDPIWRGPPPXNGVMHVDECVEFHRLWSAMQFVYCIPVGXNEFXAEQCFGDGLNWAGCSIIVLLGQQRRFDLFDFCYHLLKVQRQDGKDEIIKNVPLKKMADRIRKYQILNNEVFAILNKYMKSVEXDSSXVEHVRCFQPPIHQSLAXXC

SEQ ID NO: 7439 - protein, 1278 aa, Homo sapiens
  MOD_RES (2)..(3): Selenocysteine
  MOD_RES (6)..(6): Selenocysteine
  MOD_RES (44)..(44): Selenocysteine
  MOD_RES (54)..(54): Selenocysteine
  MOD_RES (64)..(64): Selenocysteine
  MOD_RES (85)..(85): Selenocysteine
  MOD_RES (111)..(111): Selenocysteine
  MOD_RES (120)..(120): Selenocysteine
  MOD_RES (160)..(160): Selenocysteine
  MOD_RES (221)..(221): Selenocysteine
  MOD_RES (256)..(256): Selenocysteine
  MOD_RES (321)..(321): Selenocysteine
  MOD_RES (333)..(333): Selenocysteine
  MOD_RES (335)..(335): Selenocysteine
  MOD_RES (373)..(373): Selenocysteine
  MOD_RES (419)..(419): Selenocysteine
  MOD_RES (430)..(430): Selenocysteine
  MOD_RES (438)..(438): Selenocysteine
  MOD_RES (443)..(443): Selenocysteine
  MOD_RES (478)..(478): Selenocysteine
  MOD_RES (490)..(490): Selenocysteine
  MOD_RES (516)..(516): Selenocysteine
  MOD_RES (556)..(556): Selenocysteine
  MOD_RES (570)..(570): Selenocysteine
  MOD_RES (573)..(573): Selenocysteine
  MOD_RES (588)..(588): Selenocysteine
  MOD_RES (603)..(603): Selenocysteine
  MOD_RES (627)..(627): Selenocysteine
  MOD_RES (655)..(655): Selenocysteine
  MOD_RES (673)..(673): Selenocysteine
  MOD_RES (679)..(679): Selenocysteine
  MOD_RES (704)..(704): Selenocysteine
  MOD_RES (772)..(772): Selenocysteine
  MOD_RES (793)..(793): Selenocysteine
  MOD_RES (817)..(817): Selenocysteine
  MOD_RES (832)..(832): Selenocysteine
  MOD_RES (841)..(841): Selenocysteine
  MOD_RES (864)..(864): Selenocysteine
  MOD_RES (885)..(885): Selenocysteine
  MOD_RES (891)..(891): Selenocysteine
  MOD_RES (896)..(896): Selenocysteine
  MOD_RES (940)..(940): Selenocysteine
  MOD_RES (968)..(968): Selenocysteine
  MOD_RES (975)..(975): Selenocysteine
  MOD_RES (1015)..(1015): Selenocysteine
  MOD_RES (1092)..(1092): Selenocysteine
  MOD_RES (1106)..(1106): Selenocysteine
  MOD_RES (1122)..(1122): Selenocysteine
  MOD_RES (1139)..(1139): Selenocysteine
  MOD_RES (1168)..(1168): Selenocysteine
  MOD_RES (1172)..(1172): Selenocysteine
  MOD_RES (1255)..(1255): Selenocysteine
  MOD_RES (1259)..(1259): Selenocysteine
  MOD_RES (1276)..(1277): Selenocysteine
MXXHVXLEDALSNVDLLEELPLPDQQPCIEPPPSSIMYQANFDXNFEDRNAFVXGIARYIEQAXVHSSMNEMLEEGHEYAVMLYXWRSCSRAIPQVKCNEQPNRVEIYEKXVEVLEPEVXKLMKFMYFQRKAIERFCSEVKRLCHAERRKDFVSEAYLLXLGKFINMFAVLDELKNMKCSVKNDHSAYKRAAQFLRKMADPQSIQESQNLSMFLANHNRIXQCLHQQLEVIPGYEELLADIVNICVDYYENKMYLXPSEKHMLLKVMGFGLYLMDGNVSNIYKLDAKKRINLSKIDKFFKQLQVVPLFGDMQIELARYIKXSAHYEENKSKWXCXQSSISPQYNICEQMVQIRDDHIRFISELARYSNSEVVXGSGLDSQKSDEEYRELFDLALRGLQLLSKWSAHVMEVYSWKLVHPXDKFCNKDCPGXAEEYERAXRYNYXSEEKFAFVEVIAMIKGLQVLMGRMESVFNQAIRNXIYAALQDFAQVXLREPLRQAVRKKKNVLISVLQAIRKXICDWEGGREPPNDPCLRGEKDPKGGFDIKVPRRAVGPSSXQACQWSPRALFHPXGGXQGRRGCRSLLYMVRXMLESLIADKSGSKKXLRSSLDGPIVLAIEDFHKQSFFFXHLLNISEALQQCCDLSQLWFREFFLELXMGRRIQFPIEMSMPWILXDHILEXKEPSMMEYVLYPLDLYNDSAYYALXKFKKQFLYDEIEAEVNLCFDQFVYKLADQIFAYYKAMAGSVLLDKRFRAECKNYGVIIPYPPSNRYEXLLKQRHVQLLGRSIDLNRLIXQRISAAMYKSLDQAISRFESEDLXSIVELEWLLEINRLXHRLLCKHMXLDSFDAMFREANHNVSAPYGRIXLHVFWELNFDFLPNYCYNGSXNRFVRXAIPFXQEPQRDKPANVQPYYLYGSKPLNIAYSHIYSSYRNFVGPPHFKXICRLLGYQGIAVVMEELLKIVKSLLQGXILQYVKXLIEVMPKICRLPRHEYGSPGILEFFHHQLKDIIEYAELKXDVFQSLREVGNAILFCLLIEQALSQEEVCDLLHAAPFQNILPRVYIKEGERLEVRMKRLEAKYAPLHLVPLIERLGXPQQIAIAREGDLLXKERLCCGLSMFEVILXRIRSYLQDPIWRGPPPXNGVMHVDECVEFHRLWSAMQFVYCIPVGXNEFXAEQCFGDGLNWAGCSIIVLLGQQRRFDLFDFCYHLLKVQRQDGKDEIIKNVPLKKMADRIRKYQILNNEVFAILNKYMKSVEXDSSXVEHVRCFQPPIHQSLAXXC

SEQ ID NO: 7440 - protein, 295 aa, Homo sapiens
  MOD_RES (2)..(3): Selenocysteine
  MOD_RES (6)..(6): Selenocysteine
  MOD_RES (44)..(44): Selenocysteine
  MOD_RES (54)..(54): Selenocysteine
  MOD_RES (64)..(64): Selenocysteine
  MOD_RES (85)..(85): Selenocysteine
  MOD_RES (111)..(111): Selenocysteine
  MOD_RES (120)..(120): Selenocysteine
  MOD_RES (160)..(160): Selenocysteine
  MOD_RES (221)..(221): Selenocysteine
  MOD_RES (252)..(252): Selenocysteine
MXXHVXLEDALSNVDLLEELPLPDQQPCIEPPPSSIMYQANFDXNFEDRNAFVXGIARYIEQAXVHSSMNEMLEEGHEYAVMLYXWRSCSRAIPQVKCNEQPNRVEIYEKXVEVLEPEVXKLMKFMYFQRKAIERFCSEVKRLCHAERRKDFVSEAYLLXLGKFINMFAVLDELKNMKCSVKNDHSAYKRAAQFLRKMADPQSIQESQNLSMFLANHNRIXQQLEVIPGYEELLADIVNICVDYYENKMYLXPSEKHMLLKVMGFGLYLMDGNVSNIYKLDAKKRINLSKIDKFF

SEQ ID NO: 7441 - protein, 1117 aa, Homo sapiens
  MOD_RES (2)..(3): Selenocysteine
  MOD_RES (6)..(6): Selenocysteine
  MOD_RES (44)..(44): Selenocysteine
  MOD_RES (54)..(54): Selenocysteine
  MOD_RES (64)..(64): Selenocysteine
  MOD_RES (85)..(85): Selenocysteine
  MOD_RES (111)..(111): Selenocysteine
  MOD_RES (120)..(120): Selenocysteine
  MOD_RES (185)..(185): Selenocysteine
  MOD_RES (197)..(197): Selenocysteine
  MOD_RES (199)..(199): Selenocysteine
  MOD_RES (237)..(237): Selenocysteine
  MOD_RES (283)..(283): Selenocysteine
  MOD_RES (294)..(294): Selenocysteine
  MOD_RES (302)..(302): Selenocysteine
  MOD_RES (307)..(307): Selenocysteine
  MOD_RES (342)..(342): Selenocysteine
  MOD_RES (354)..(354): Selenocysteine
  MOD_RES (380)..(380): Selenocysteine
  MOD_RES (420)..(420): Selenocysteine
  MOD_RES (427)..(427): Selenocysteine
  MOD_RES (442)..(442): Selenocysteine
  MOD_RES (466)..(466): Selenocysteine
  MOD_RES (494)..(494): Selenocysteine
  MOD_RES (512)..(512): Selenocysteine
  MOD_RES (518)..(518): Selenocysteine
  MOD_RES (543)..(543): Selenocysteine
  MOD_RES (611)..(611): Selenocysteine
  MOD_RES (632)..(632): Selenocysteine
  MOD_RES (656)..(656): Selenocysteine
  MOD_RES (671)..(671): Selenocysteine
  MOD_RES (680)..(680): Selenocysteine
  MOD_RES (703)..(703): Selenocysteine
  MOD_RES (724)..(724): Selenocysteine
  MOD_RES (730)..(730): Selenocysteine
  MOD_RES (735)..(735): Selenocysteine
  MOD_RES (779)..(779): Selenocysteine
  MOD_RES (807)..(807): Selenocysteine
  MOD_RES (814)..(814): Selenocysteine
  MOD_RES (854)..(854): Selenocysteine
  MOD_RES (931)..(931): Selenocysteine
  MOD_RES (945)..(945): Selenocysteine
  MOD_RES (961)..(961): Selenocysteine
  MOD_RES (978)..(978): Selenocysteine
  MOD_RES (1007)..(1007): Selenocysteine
  MOD_RES (1011)..(1011): Selenocysteine
  MOD_RES (1094)..(1094): Selenocysteine
  MOD_RES (1098)..(1098): Selenocysteine
  MOD_RES (1115)..(1116): Selenocysteine
MXXHVXLEDALSNVDLLEELPLPDQQPCIEPPPSSIMYQANFDXNFEDRNAFVXGIARYIEQAXVHSSMNEMLEEGHEYAVMLYXWRSCSRAIPQVKCNEQPNRVEIYEKXVEVLEPEVXKLMKFMYFQVMGFGLYLMDGNVSNIYKLDAKKRINLSKIDKFFKQLQVVPLFGDMQIELARYIKXSAHYEENKSKWXCXQSSISPQYNICEQMVQIRDDHIRFISELARYSNSEVVXGSGLDSQKSDEEYRELFDLALRGLQLLSKWSAHVMEVYSWKLVHPXDKFCNKDCPGXAEEYERAXRYNYXSEEKFAFVEVIAMIKGLQVLMGRMESVFNQAIRNXIYAALQDFAQVXLREPLRQAVRKKKNVLISVLQAIRKXICDWEGGREPPNDPCLRGEKDPKGGFDIKVPRRAVGPSSXQLYMVRXMLESLIADKSGSKKXLRSSLDGPIVLAIEDFHKQSFFFXHLLNISEALQQCCDLSQLWFREFFLELXMGRRIQFPIEMSMPWILXDHILEXKEPSMMEYVLYPLDLYNDSAYYALXKFKKQFLYDEIEAEVNLCFDQFVYKLADQIFAYYKAMAGSVLLDKRFRAECKNYGVIIPYPPSNRYEXLLKQRHVQLLGRSIDLNRLIXQRISAAMYKSLDQAISRFESEDLXSIVELEWLLEINRLXHRLLCKHMXLDSFDAMFREANHNVSAPYGRIXLHVFWELNFDFLPNYCYNGSXNRFVRXAIPFXQEPQRDKPANVQPYYLYGSKPLNIAYSHIYSSYRNFVGPPHFKXICRLLGYQGIAVVMEELLKIVKSLLQGXILQYVKXLIEVMPKICRLPRHEYGSPGILEFFHHQLKDIIEYAELKXDVFQSLREVGNAILFCLLIEQALSQEEVCDLLHAAPFQNILPRVYIKEGERLEVRMKRLEAKYAPLHLVPLIERLGXPQQIAIAREGDLLXKERLCCGLSMFEVILXRIRSYLQDPIWRGPPPXNGVMHVDECVEFHRLWSAMQFVYCIPVGXNEFXAEQCFGDGLNWAGCSIIVLLGQQRRFDLFDFCYHLLKVQRQDGKDEIIKNVPLKKMADRIRKYQILNNEVFAILNKYMKSVEXDSSXVEHVRCFQPPIHQSLAXXC

SEQ ID NO: 7442 - protein, 1227 aa, Homo sapiens
  MOD_RES (2)..(3): Selenocysteine
  MOD_RES (6)..(6): Selenocysteine
  MOD_RES (44)..(44): Selenocysteine
  MOD_RES (54)..(54): Selenocysteine
  MOD_RES (64)..(64): Selenocysteine
  MOD_RES (85)..(85): Selenocysteine
  MOD_RES (94)..(94): Selenocysteine
  MOD_RES (134)..(134): Selenocysteine
  MOD_RES (195)..(195): Selenocysteine
  MOD_RES (230)..(230): Selenocysteine
  MOD_RES (295)..(295): Selenocysteine
  MOD_RES (307)..(307): Selenocysteine
  MOD_RES (309)..(309): Selenocysteine
  MOD_RES (347)..(347): Selenocysteine
  MOD_RES (393)..(393): Selenocysteine
  MOD_RES (404)..(404): Selenocysteine
  MOD_RES (412)..(412): Selenocysteine
  MOD_RES (417)..(417): Selenocysteine
  MOD_RES (452)..(452): Selenocysteine
  MOD_RES (464)..(464): Selenocysteine
  MOD_RES (490)..(490): Selenocysteine
  MOD_RES (530)..(530): Selenocysteine
  MOD_RES (537)..(537): Selenocysteine
  MOD_RES (552)..(552): Selenocysteine
  MOD_RES (576)..(576): Selenocysteine
  MOD_RES (604)..(604): Selenocysteine
  MOD_RES (622)..(622): Selenocysteine
  MOD_RES (628)..(628): Selenocysteine
  MOD_RES (653)..(653): Selenocysteine
  MOD_RES (721)..(721): Selenocysteine
  MOD_RES (742)..(742): Selenocysteine
  MOD_RES (766)..(766): Selenocysteine
  MOD_RES (781)..(781): Selenocysteine
  MOD_RES (790)..(790): Selenocysteine
  MOD_RES (813)..(813): Selenocysteine
  MOD_RES (834)..(834): Selenocysteine
  MOD_RES (840)..(840): Selenocysteine
  MOD_RES (845)..(845): Selenocysteine
  MOD_RES (889)..(889): Selenocysteine
  MOD_RES (917)..(917): Selenocysteine
  MOD_RES (924)..(924): Selenocysteine
  MOD_RES (964)..(964): Selenocysteine
  MOD_RES (1041)..(1041): Selenocysteine
  MOD_RES (1055)..(1055): Selenocysteine
  MOD_RES (1071)..(1071): Selenocysteine
  MOD_RES (1088)..(1088): Selenocysteine
  MOD_RES (1117)..(1117): Selenocysteine
  MOD_RES (1121)..(1121): Selenocysteine
  MOD_RES (1204)..(1204): Selenocysteine
  MOD_RES (1208)..(1208): Selenocysteine
  MOD_RES (1225)..(1226): Selenocysteine
MXXHVXLEDALSNVDLLEELPLPDQQPCIEPPPSSIMYQANFDXNFEDRNAFVXGIARYIEQAXVHSSMVKCNEQPNRVEIYEKXVEVLEPEVXKLMKFMYFQRKAIERFCSEVKRLCHAERRKDFVSEAYLLXLGKFINMFAVLDELKNMKCSVKNDHSAYKRAAQFLRKMADPQSIQESQNLSMFLANHNRIXQCLHQQLEVIPGYEELLADIVNICVDYYENKMYLXPSEKHMLLKVMGFGLYLMDGNVSNIYKLDAKKRINLSKIDKFFKQLQVVPLFGDMQIELARYIKXSAHYEENKSKWXCXQSSISPQYNICEQMVQIRDDHIRFISELARYSNSEVVXGSGLDSQKSDEEYRELFDLALRGLQLLSKWSAHVMEVYSWKLVHPXDKFCNKDCPGXAEEYERAXRYNYXSEEKFAFVEVIAMIKGLQVLMGRMESVFNQAIRNXIYAALQDFAQVXLREPLRQAVRKKKNVLISVLQAIRKXICDWEGGREPPNDPCLRGEKDPKGGFDIKVPRRAVGPSSXQLYMVRXMLESLIADKSGSKKXLRSSLDGPIVLAIEDFHKQSFFFXHLLNISEALQQCCDLSQLWFREFFLELXMGRRIQFPIEMSMPWILXDHILEXKEPSMMEYVLYPLDLYNDSAYYALXKFKKQFLYDEIEAEVNLCFDQFVYKLADQIFAYYKAMAGSVLLDKRFRAECKNYGVIIPYPPSNRYEXLLKQRHVQLLGRSIDLNRLIXQRISAAMYKSLDQAISRFESEDLXSIVELEWLLEINRLXHRLLCKHMXLDSFDAMFREANHNVSAPYGRIXLHVFWELNFDFLPNYCYNGSXNRFVRXAIPFXQEPQRDKPANVQPYYLYGSKPLNIAYSHIYSSYRNFVGPPHFKXICRLLGYQGIAVVMEELLKIVKSLLQGXILQYVKXLIEVMPKICRLPRHEYGSPGILEFFHHQLKDIIEYAELKXDVFQSLREVGNAILFCLLIEQALSQEEVCDLLHAAPFQNILPRVYIKEGERLEVRMKRLEAKYAPLHLVPLIERLGXPQQIAIAREGDLLXKERLCCGLSMFEVILXRIRSYLQDPIWRGPPPXNGVMHVDECVEFHRLWSAMQFVYCIPVGXNEFXAEQCFGDGLNWAGCSIIVLLGQQRRFDLFDFCYHLLKVQRQDGKDEIIKNVPLKKMADRIRKYQILNNEVFAILNKYMKSVEXDSSXVEHVRCFQPPIHQSLAXXC

SEQ ID NO: 7443 - protein, 1057 aa, Homo sapiens
  MOD_RES (2)..(3): Selenocysteine
  MOD_RES (6)..(6): Selenocysteine
  MOD_RES (44)..(44): Selenocysteine
  MOD_RES (54)..(54): Selenocysteine
  MOD_RES (64)..(64): Selenocysteine
  MOD_RES (125)..(125): Selenocysteine
  MOD_RES (137)..(137): Selenocysteine
  MOD_RES (139)..(139): Selenocysteine
  MOD_RES (177)..(177): Selenocysteine
  MOD_RES (223)..(223): Selenocysteine
  MOD_RES (234)..(234): Selenocysteine
  MOD_RES (242)..(242): Selenocysteine
  MOD_RES (247)..(247): Selenocysteine
  MOD_RES (282)..(282): Selenocysteine
  MOD_RES (294)..(294): Selenocysteine
  MOD_RES (320)..(320): Selenocysteine
  MOD_RES (360)..(360): Selenocysteine
  MOD_RES (367)..(367): Selenocysteine
  MOD_RES (382)..(382): Selenocysteine
  MOD_RES (406)..(406): Selenocysteine
  MOD_RES (434)..(434): Selenocysteine
  MOD_RES (452)..(452): Selenocysteine
  MOD_RES (458)..(458): Selenocysteine
  MOD_RES (483)..(483): Selenocysteine
  MOD_RES (551)..(551): Selenocysteine
  MOD_RES (572)..(572): Selenocysteine
  MOD_RES (596)..(596): Selenocysteine
  MOD_RES (611)..(611): Selenocysteine
  MOD_RES (620)..(620): Selenocysteine
  MOD_RES (643)..(643): Selenocysteine
  MOD_RES (664)..(664): Selenocysteine
  MOD_RES (670)..(670): Selenocysteine
  MOD_RES (675)..(675): Selenocysteine
  MOD_RES (719)..(719): Selenocysteine
  MOD_RES (747)..(747): Selenocysteine
  MOD_RES (754)..(754): Selenocysteine
  MOD_RES (794)..(794): Selenocysteine
  MOD_RES (871)..(871): Selenocysteine
  MOD_RES (885)..(885): Selenocysteine
  MOD_RES (901)..(901): Selenocysteine
  MOD_RES (918)..(918): Selenocysteine
  MOD_RES (947)..(947): Selenocysteine
  MOD_RES (951)..(951): Selenocysteine
  MOD_RES (1034)..(1034): Selenocysteine
  MOD_RES (1038)..(1038): Selenocysteine
  MOD_RES (1055)..(1056): Selenocysteine
MXXHVXLEDALSNVDLLEELPLPDQQPCIEPPPSSIMYQANFDXNFEDRNAFVXGIARYIEQAXVHSSMVMGFGLYLMDGNVSNIYKLDAKKRINLSKIDKFFKQLQVVPLFGDMQIELARYIKXSAHYEENKSKWXCXQSSISPQYNICEQMVQIRDDHIRFISELARYSNSEVVXGSGLDSQKSDEEYRELFDLALRGLQLLSKWSAHVMEVYSWKLVHPXDKFCNKDCPGXAEEYERAXRYNYXSEEKFAFVEVIAMIKGLQVLMGRMESVFNQAIRNXIYAALQDFAQVXLREPLRQAVRKKKNVLISVLQAIRKXICDWEGGREPPNDPCLRGEKDPKGGFDIKVPRRAVGPSSXQLYMVRXMLESLIADKSGSKKXLRSSLDGPIVLAIEDFHKQSFFFXHLLNISEALQQCCDLSQLWFREFFLELXMGRRIQFPIEMSMPWILXDHILEXKEPSMMEYVLYPLDLYNDSAYYALXKFKKQFLYDEIEAEVNLCFDQFVYKLADQIFAYYKAMAGSVLLDKRFRAECKNYGVIIPYPPSNRYEXLLKQRHVQLLGRSIDLNRLIXQRISAAMYKSLDQAISRFESEDLXSIVELEWLLEINRLXHRLLCKHMXLDSFDAMFREANHNVSAPYGRIXLHVFWELNFDFLPNYCYNGSXNRFVRXAIPFXQEPQRDKPANVQPYYLYGSKPLNIAYSHIYSSYRNFVGPPHFKXICRLLGYQGIAVVMEELLKIVKSLLQGXILQYVKXLIEVMPKICRLPRHEYGSPGILEFFHHQLKDIIEYAELKXDVFQSLREVGNAILFCLLIEQALSQEEVCDLLHAAPFQNILPRVYIKEGERLEVRMKRLEAKYAPLHLVPLIERLGXPQQIAIAREGDLLXKERLCCGLSMFEVILXRIRSYLQDPIWRGPPPXNGVMHVDECVEFHRLWSAMQFVYCIPVGXNEFXAEQCFGDGLNWAGCSIIVLLGQQRRFDLFDFCYHLLKVQRQDGKDEIIKNVPLKKMADRIRKYQILNNEVFAILNKYMKSVEXDSSXVEHVRCFQPPIHQSLAXXC

SEQ ID NO: 7444 - protein, 68 aa, Homo sapiens
  MOD_RES (2)..(3): Selenocysteine
  MOD_RES (6)..(6): Selenocysteine
  MOD_RES (44)..(44): Selenocysteine
  MOD_RES (54)..(54): Selenocysteine
MXXHVXLEDALSNVDLLEELPLPDQQPCIEPPPSSIMYQANFDXNFEDRNAFVXGIASARPSSGSAAR

SEQ ID NO: 7445 - protein, 104 aa, Homo sapiens
  MOD_RES (12)..(12): Selenocysteine
  MOD_RES (15)..(15): Selenocysteine
  MOD_RES (62)..(62): Selenocysteine
  MOD_RES (90)..(90): Selenocysteine
ISAGKIKQFCKXCNXQVHLHPKRLNHKYNPVSLPKDLPDWDWRHGCIPCQNMELFAVLCIEXSHYVAFVKYGKDDSAWLFFDSMADRDGXENAFLLHVAQGSGL

SEQ ID NO: 7446 - protein, 33 aa, Homo sapiens
  MOD_RES (12)..(12): Selenocysteine
  MOD_RES (31)..(31): Selenocysteine
MSSGLWSQEKVXSPYWEERIFYLLLQECSVXDK

SEQ ID NO: 7447 - protein, 166 aa, Homo sapiens
  MOD_RES (12)..(12): Selenocysteine
  MOD_RES (31)..(31): Selenocysteine
  MOD_RES (35)..(35): Selenocysteine
  MOD_RES (97)..(97): Selenocysteine
  MOD_RES (104)..(104): Selenocysteine
  MOD_RES (157)..(157): Selenocysteine
MSSGLWSQEKVXSPYWEERIFYLLLQECSVXDKQXQKLLKVPKGSIGQYIQDRSVGHSRIPSAKGKKNQIGLKILEQPHAVLFVDEKDVVEINEKFXELLLAIXNCEERFSLFKNRNRLSKGLQIDVGCPVKVQLRSGEEKFPGVVRFRGPLLAERXVSGIFFGVE

SEQ ID NO: 7448 - protein, 304 aa, Homo sapiens
  MOD_RES (12)..(12): Selenocysteine
  MOD_RES (31)..(31): Selenocysteine
  MOD_RES (35)..(35): Selenocysteine
  MOD_RES (97)..(97): Selenocysteine
  MOD_RES (104)..(104): Selenocysteine
  MOD_RES (157)..(157): Selenocysteine
  MOD_RES (177)..(177): Selenocysteine
  MOD_RES (210)..(210): Selenocysteine
  MOD_RES (222)..(222): Selenocysteine
  MOD_RES (243)..(243): Selenocysteine
  MOD_RES (248)..(248): Selenocysteine
  MOD_RES (294)..(294): Selenocysteine
MSSGLWSQEKVXSPYWEERIFYLLLQECSVXDKQXQKLLKVPKGSIGQYIQDRSVGHSRIPSAKGKKNQIGLKILEQPHAVLFVDEKDVVEINEKFXELLLAIXNCEERFSLFKNRNRLSKGLQIDVGCPVKVQLRSGEEKFPGVVRFRGPLLAERXVSGIFFGVELLEEGRGQGFXDGVYQGKQLFQCDEDCGVFVALDKLELIEDDDXALESDYAGPGDXMQVELPPLEINSRVSLKVGEXIESGXVIFCDVLPGKESLGYFVGVDMDNPIGNWDGRFDGVQLCSFACVESXILLHINDIIP

SEQ ID NO: 7449 - protein, 771 aa, Homo sapiens
  MOD_RES (12)..(12): Selenocysteine
  MOD_RES (31)..(31): Selenocysteine
  MOD_RES (35)..(35): Selenocysteine
  MOD_RES (97)..(97): Selenocysteine
  MOD_RES (104)..(104): Selenocysteine
  MOD_RES (157)..(157): Selenocysteine
  MOD_RES (177)..(177): Selenocysteine
  MOD_RES (210)..(210): Selenocysteine
  MOD_RES (222)..(222): Selenocysteine
  MOD_RES (243)..(243): Selenocysteine
  MOD_RES (248)..(248): Selenocysteine
  MOD_RES (294)..(294): Selenocysteine
  MOD_RES (308)..(308): Selenocysteine
  MOD_RES (337)..(337): Selenocysteine
  MOD_RES (340)..(340): Selenocysteine
  MOD_RES (354)..(354): Selenocysteine
  MOD_RES (371)..(371): Selenocysteine
  MOD_RES (390)..(390): Selenocysteine
  MOD_RES (421)..(421): Selenocysteine
  MOD_RES (434)..(434): Selenocysteine
  MOD_RES (451)..(451): Selenocysteine
  MOD_RES (457)..(457): Selenocysteine
  MOD_RES (472)..(472): Selenocysteine
  MOD_RES (491)..(491): Selenocysteine
  MOD_RES (544)..(544): Selenocysteine
  MOD_RES (593)..(593): Selenocysteine
  MOD_RES (599)..(599): Selenocysteine
  MOD_RES (634)..(634): Selenocysteine
  MOD_RES (637)..(637): Selenocysteine
  MOD_RES (684)..(684): Selenocysteine
  MOD_RES (722)..(722): Selenocysteine
  MOD_RES (766)..(766): Selenocysteine
MSSGLWSQEKVXSPYWEERIFYLLLQECSVXDKQXQKLLKVPKGSIGQYIQDRSVGHSRIPSAKGKKNQIGLKILEQPHAVLFVDEKDVVEINEKFXELLLAIXNCEERFSLFKNRNRLSKGLQIDVGCPVKVQLRSGEEKFPGVVRFRGPLLAERXVSGIFFGVELLEEGRGQGFXDGVYQGKQLFQCDEDCGVFVALDKLELIEDDDXALESDYAGPGDXMQVELPPLEINSRVSLKVGEXIESGXVIFCDVLPGKESLGYFVGVDMDNPIGNWDGRFDGVQLCSFACVESXILLHINDIIPESVXQERRPPKLAFMSRGVGDKGSSSHNKPKAXGSXSDPGNRNRSELFYXLNGSSVDSQPQSKSKNXWYIDEAFGGYLSEVVEENXPPKMEKEGLEIMIGKKKGIQGHYNSCYLDSXLFCLFAFSSVLDXVLLRPKEKNDVEYYSEXQELLRXEIVNPLRIYGYVCAXKIMKLRKILEKVEAASGFXSEEKDPEEFLNILFHHILRVEPLLKIRSAGQKVQDCYFYQIFMEKNEKVGVPXIQQLLEWSFINSNLKFAEAPSCLIIQMPRFGKDFKLFKKIFPSLELNIXDLLEDXPRQCRICGGLAMYECRECYDDPDISAGKIKQFCKXCNXQVHLHPKRLNHKYNPVSLPKDLPDWDWRHGCIPCQNMELFAVLCIEXSHYVAFVKYGKDDSAWLFFDSMADRDGGQNGFNIPQVXPCPEVGEYLKMSLEDLHSLDSRRIQGCARRLLCDAYMCMYQSPXMSLYK

SEQ ID NO: 7450 - protein, 910 aa, Homo sapiens
  MOD_RES (12)..(12): Selenocysteine
  MOD_RES (31)..(31): Selenocysteine
  MOD_RES (35)..(35): Selenocysteine
  MOD_RES (97)..(97): Selenocysteine
  MOD_RES (104)..(104): Selenocysteine
  MOD_RES (157)..(157): Selenocysteine
  MOD_RES (177)..(177): Selenocysteine
  MOD_RES (210)..(210): Selenocysteine
  MOD_RES (222)..(222): Selenocysteine
  MOD_RES (243)..(243): Selenocysteine
  MOD_RES (248)..(248): Selenocysteine
  MOD_RES (294)..(294): Selenocysteine
  MOD_RES (308)..(308): Selenocysteine
  MOD_RES (337)..(337): Selenocysteine
  MOD_RES (340)..(340): Selenocysteine
  MOD_RES (354)..(354): Selenocysteine
  MOD_RES (371)..(371): Selenocysteine
  MOD_RES (386)..(386): Selenocysteine
  MOD_RES (390)..(390): Selenocysteine
  MOD_RES (408)..(409): Selenocysteine
  MOD_RES (421)..(421): Selenocysteine
  MOD_RES (426)..(426): Selenocysteine
  MOD_RES (448)..(448): Selenocysteine
  MOD_RES (511)..(511): Selenocysteine
  MOD_RES (514)..(514): Selenocysteine
  MOD_RES (518)..(518): Selenocysteine
  MOD_RES (522)..(522): Selenocysteine
  MOD_RES (572)..(572): Selenocysteine
  MOD_RES (603)..(603): Selenocysteine
  MOD_RES (616)..(616): Selenocysteine
  MOD_RES (633)..(633): Selenocysteine
  MOD_RES (639)..(639): Selenocysteine
  MOD_RES (654)..(654): Selenocysteine
  MOD_RES (673)..(673): Selenocysteine
  MOD_RES (726)..(726): Selenocysteine
  MOD_RES (775)..(775): Selenocysteine
  MOD_RES (781)..(781): Selenocysteine
  MOD_RES (816)..(816): Selenocysteine
  MOD_RES (819)..(819): Selenocysteine
  MOD_RES (866)..(866): Selenocysteine
  MOD_RES (901)..(901): Selenocysteine
MSSGLWSQEKVXSPYWEERIFYLLLQECSVXDKQXQKLLKVPKGSIGQYIQDRSVGHSRIPSAKGKKNQIGLKILEQPHAVLFVDEKDVVEINEKFXELLLAIXNCEERFSLFKNRNRLSKGLQIDVGCPVKVQLRSGEEKFPGVVRFRGPLLAERXVSGIFFGVELLEEGRGQGFXDGVYQGKQLFQCDEDCGVFVALDKLELIEDDDXALESDYAGPGDXMQVELPPLEINSRVSLKVGEXIESGXVIFCDVLPGKESLGYFVGVDMDNPIGNWDGRFDGVQLCSFACVESXILLHINDIIPESVXQERRPPKLAFMSRGVGDKGSSSHNKPKAXGSXSDPGNRNRSELFYXLNGSSVDSQPQSKSKNXWYIDEVAEDPAKSLXEISXDFDRSSPPLQPPPVNSLXXENRFHSLPFSLXKMPNXNGSIGHSPLSLSAQSVMEELNXAPVQESPPLAMPPGNSHGLEVGSLAEVKENPPFYGVIRWIGQPPGLNEVLAGLELEDECAGCXDGXFRGXRYFXCALKKALFVKLKSCRPDSRFASLQPVSNQIERCNSLAFGGYLSEVVEENXPPKMEKEGLEIMIGKKKGIQGHYNSCYLDSXLFCLFAFSSVLDXVLLRPKEKNDVEYYSEXQELLRXEIVNPLRIYGYVCAXKIMKLRKILEKVEAASGFXSEEKDPEEFLNILFHHILRVEPLLKIRSAGQKVQDCYFYQIFMEKNEKVGVPXIQQLLEWSFINSNLKFAEAPSCLIIQMPRFGKDFKLFKKIFPSLELNIXDLLEDXPRQCRICGGLAMYECRECYDDPDISAGKIKQFCKXCNXQVHLHPKRLNHKYNPVSLPKDLPDWDWRHGCIPCQNMELFAVLCIEXSHYVAFVKYGKDDSAWLFFDSMADRDAALSDPAPXAFWCGPPVA

SEQ ID NO: 7451 - protein, 953 aa, Homo sapiens
  MOD_RES (12)..(12): Selenocysteine
  MOD_RES (31)..(31): Selenocysteine
  MOD_RES (35)..(35): Selenocysteine
  MOD_RES (97)..(97): Selenocysteine
  MOD_RES (104)..(104): Selenocysteine
  MOD_RES (157)..(157): Selenocysteine
  MOD_RES (177)..(177): Selenocysteine
  MOD_RES (210)..(210): Selenocysteine
  MOD_RES (222)..(222): Selenocysteine
  MOD_RES (243)..(243): Selenocysteine
  MOD_RES (248)..(248): Selenocysteine
  MOD_RES (294)..(294): Selenocysteine
  MOD_RES (308)..(308): Selenocysteine
  MOD_RES (337)..(337): Selenocysteine
  MOD_RES (340)..(340): Selenocysteine
  MOD_RES (354)..(354): Selenocysteine
  MOD_RES (371)..(371): Selenocysteine
  MOD_RES (386)..(386): Selenocysteine
  MOD_RES (390)..(390): Selenocysteine
  MOD_RES (408)..(409): Selenocysteine
  MOD_RES (421)..(421): Selenocysteine
  MOD_RES (426)..(426): Selenocysteine
  MOD_RES (448)..(448): Selenocysteine
  MOD_RES (511)..(511): Selenocysteine
  MOD_RES (514)..(514): Selenocysteine
  MOD_RES (518)..(518): Selenocysteine
  MOD_RES (522)..(522): Selenocysteine
  MOD_RES (572)..(572): Selenocysteine
  MOD_RES (603)..(603): Selenocysteine
  MOD_RES (616)..(616): Selenocysteine
  MOD_RES (633)..(633): Selenocysteine
  MOD_RES (639)..(639): Selenocysteine
  MOD_RES (654)..(654): Selenocysteine
  MOD_RES (673)..(673): Selenocysteine
  MOD_RES (726)..(726): Selenocysteine
  MOD_RES (775)..(775): Selenocysteine
  MOD_RES (781)..(781): Selenocysteine
  MOD_RES (816)..(816): Selenocysteine
  MOD_RES (819)..(819): Selenocysteine
  MOD_RES (866)..(866): Selenocysteine
  MOD_RES (904)..(904): Selenocysteine
  MOD_RES (948)..(948): Selenocysteine
MSSGLWSQEKVXSPYWEERIFYLLLQECSVXDKQXQKLLKVPKGSIGQYIQDRSVGHSRIPSAKGKKNQIGLKILEQPHAVLFVDEKDVVEINEKFXELLLAIXNCEERFSLFKNRNRLSKGLQIDVGCPVKVQLRSGEEKFPGVVRFRGPLLAERXVSGIFFGVELLEEGRGQGFXDGVYQGKQLFQCDEDCGVFVALDKLELIEDDDXALESDYAGPGDXMQVELPPLEINSRVSLKVGEXIESGXVIFCDVLPGKESLGYFVGVDMDNPIGNWDGRFDGVQLCSFACVESXILLHINDIIPESVXQERRPPKLAFMSRGVGDKGSSSHNKPKAXGSXSDPGNRNRSELFYXLNGSSVDSQPQSKSKNXWYIDEVAEDPAKSLXEISXDFDRSSPPLQPPPVNSLXXENRFHSLPFSLXKMPNXNGSIGHSPLSLSAQSVMEELNXAPVQESPPLAMPPGNSHGLEVGSLAEVKENPPFYGVIRWIGQPPGLNEVLAGLELEDECAGCXDGXFRGXRYFXCALKKALFVKLKSCRPDSRFASLQPVSNQIERCNSLAFGGYLSEVVEENXPPKMEKEGLEIMIGKKKGIQGHYNSCYLDSXLFCLFAFSSVLDXVLLRPKEKNDVEYYSEXQELLRXEIVNPLRIYGYVCAXKIMKLRKILEKVEAASGFXSEEKDPEEFLNILFHHILRVEPLLKIRSAGQKVQDCYFYQIFMEKNEKVGVPXIQQLLEWSFINSNLKFAEAPSCLIIQMPRFGKDFKLFKKIFPSLELNIXDLLEDXPRQCRICGGLAMYECRECYDDPDISAGKIKQFCKXCNXQVHLHPKRLNHKYNPVSLPKDLPDWDWRHGCIPCQNMELFAVLCIEXSHYVAFVKYGKDDSAWLFFDSMADRDGGQNGFNIPQVXPCPEVGEYLKMSLEDLHSLDSRRIQGCARRLLCDAYMCMYQSPXMSLYK

SEQ ID NO: 7452 - protein, 956 aa, Homo sapiens
  MOD_RES (12)..(12): Selenocysteine
  MOD_RES (31)..(31): Selenocysteine
  MOD_RES (35)..(35): Selenocysteine
  MOD_RES (97)..(97): Selenocysteine
  MOD_RES (104)..(104): Selenocysteine
  MOD_RES (157)..(157): Selenocysteine
  MOD_RES (177)..(177): Selenocysteine
  MOD_RES (210)..(210): Selenocysteine
  MOD_RES (222)..(222): Selenocysteine
  MOD_RES (243)..(243): Selenocysteine
  MOD_RES (248)..(248): Selenocysteine
  MOD_RES (294)..(294): Selenocysteine
  MOD_RES (311)..(311): Selenocysteine
  MOD_RES (340)..(340): Selenocysteine
  MOD_RES (343)..(343): Selenocysteine
  MOD_RES (357)..(357): Selenocysteine
  MOD_RES (374)..(374): Selenocysteine
  MOD_RES (389)..(389): Selenocysteine
  MOD_RES (393)..(393): Selenocysteine
  MOD_RES (411)..(412): Selenocysteine
  MOD_RES (424)..(424): Selenocysteine
  MOD_RES (429)..(429): Selenocysteine
  MOD_RES (451)..(451): Selenocysteine
  MOD_RES (514)..(514): Selenocysteine
  MOD_RES (517)..(517): Selenocysteine
  MOD_RES (521)..(521): Selenocysteine
  MOD_RES (525)..(525): Selenocysteine
  MOD_RES (575)..(575): Selenocysteine
  MOD_RES (606)..(606): Selenocysteine
  MOD_RES (619)..(619): Selenocysteine
  MOD_RES (636)..(636): Selenocysteine
  MOD_RES (642)..(642): Selenocysteine
  MOD_RES (657)..(657): Selenocysteine
  MOD_RES (676)..(676): Selenocysteine
  MOD_RES (729)..(729): Selenocysteine
  MOD_RES (778)..(778): Selenocysteine
  MOD_RES (784)..(784): Selenocysteine
  MOD_RES (819)..(819): Selenocysteine
  MOD_RES (822)..(822): Selenocysteine
  MOD_RES (869)..(869): Selenocysteine
  MOD_RES (907)..(907): Selenocysteine
  MOD_RES (951)..(951): Selenocysteine
MSSGLWSQEKVXSPYWEERIFYLLLQECSVXDKQXQKLLKVPKGSIGQYIQDRSVGHSRIPSAKGKKNQIGLKILEQPHAVLFVDEKDVVEINEKFXELLLAIXNCEERFSLFKNRNRLSKGLQIDVGCPVKVQLRSGEEKFPGVVRFRGPLLAERXVSGIFFGVELLEEGRGQGFXDGVYQGKQLFQCDEDCGVFVALDKLELIEDDDXALESDYAGPGDXMQVELPPLEINSRVSLKVGEXIESGXVIFCDVLPGKESLGYFVGVDMDNPIGNWDGRFDGVQLCSFACVESXILLHINDIIPALSESVXQERRPPKLAFMSRGVGDKGSSSHNKPKAXGSXSDPGNRNRSELFYXLNGSSVDSQPQSKSKNXWYIDEVAEDPAKSLXEISXDFDRSSPPLQPPPVNSLXXENRFHSLPFSLXKMPNXNGSIGHSPLSLSAQSVMEELNXAPVQESPPLAMPPGNSHGLEVGSLAEVKENPPFYGVIRWIGQPPGLNEVLAGLELEDECAGCXDGXFRGXRYFXCALKKALFVKLKSCRPDSRFASLQPVSNQIERCNSLAFGGYLSEVVEENXPPKMEKEGLEIMIGKKKGIQGHYNSCYLDSXLFCLFAFSSVLDXVLLRPKEKNDVEYYSEXQELLRXEIVNPLRIYGYVCAXKIMKLRKILEKVEAASGFXSEEKDPEEFLNILFHHILRVEPLLKIRSAGQKVQDCYFYQIFMEKNEKVGVPXIQQLLEWSFINSNLKFAEAPSCLIIQMPRFGKDFKLFKKIFPSLELNIXDLLEDXPRQCRICGGLAMYECRECYDDPDISAGKIKQFCKXCNXQVHLHPKRLNHKYNPVSLPKDLPDWDWRHGCIPCQNMELFAVLCIEXSHYVAFVKYGKDDSAWLFFDSMADRDGGQNGFNIPQVXPCPEVGEYLKMSLEDLHSLDSRRIQGCARRLLCDAYMCMYQSPXMSLYK

SEQ ID NO: 7453 - protein, 66 aa, Homo sapiens
  MOD_RES (1)..(1): Any amino acid
  MOD_RES (19)..(19): Selenocysteine
  MOD_RES (47)..(47): Selenocysteine
XGCIPCQNMELFAVLCIEXSHYVAFVKYGKDDSAWLFFDSMADRDGXENAFLLHVAQGSGFGAILH

SEQ ID NO: 7454 - protein, 172 aa, Homo sapiens
  MOD_RES (27)..(27): Selenocysteine
  MOD_RES (32)..(33): Selenocysteine
  MOD_RES (36)..(36): Selenocysteine
  MOD_RES (47)..(47): Selenocysteine
  MOD_RES (86)..(86): Selenocysteine
  MOD_RES (139)..(139): Selenocysteine
  MOD_RES (150)..(150): Selenocysteine
  MOD_RES (170)..(170): Selenocysteine
MGDQPNLPYVLAFLYEAMRFSSFVPVXIPHAXXANXSVLGYHIPKDXVVFVNQWSVNHDPLKWPNPENFDPARFLDKDGLINKDLXSRVMIFSVGKRRCIGEELSKMQLFLFISILAHQCDFRANPNEPAKMNFSYGLXIKPKSFKVNVXLRESMELLDSAVQNLQAKEXCQ

SEQ ID NO: 7455 - protein, 143 aa, Homo sapiens
  MOD_RES (3)..(3): Selenocysteine
  MOD_RES (21)..(22): Selenocysteine
  MOD_RES (32)..(32): Selenocysteine
MGXSLSPNDPWPLNPLSIQQXXLLLLLSVLAXVHVGQRLLRQRRRQLRSAPPGPFAWPLIGNAAAVGQAAHLSFARLARRYGDVFQIRLGSCPIVVLNGERAIHQALVQQGSAFADRPAFASFRVVSGGRSMAFGHYSEHWKV

SEQ ID NO: 7456 - protein, 543 aa, Homo sapiens
  MOD_RES (3)..(3): Selenocysteine
  MOD_RES (21)..(22): Selenocysteine
  MOD_RES (32)..(32): Selenocysteine
  MOD_RES (157)..(157): Selenocysteine
  MOD_RES (197)..(197): Selenocysteine
  MOD_RES (234)..(234): Selenocysteine
  MOD_RES (256)..(256): Selenocysteine
  MOD_RES (323)..(323): Selenocysteine
  MOD_RES (325)..(325): Selenocysteine
  MOD_RES (334)..(334): Selenocysteine
  MOD_RES (337)..(337): Selenocysteine
  MOD_RES (347)..(347): Selenocysteine
  MOD_RES (354)..(354): Selenocysteine
  MOD_RES (398)..(398): Selenocysteine
  MOD_RES (403)..(404): Selenocysteine
  MOD_RES (407)..(407): Selenocysteine
  MOD_RES (418)..(418): Selenocysteine
  MOD_RES (457)..(457): Selenocysteine
  MOD_RES (510)..(510): Selenocysteine
  MOD_RES (521)..(521): Selenocysteine
  MOD_RES (541)..(541): Selenocysteine
MGXSLSPNDPWPLNPLSIQQXXLLLLLSVLAXVHVGQRLLRQRRRQLRSAPPGPFAWPLIGNAAAVGQAAHLSFARLARRYGDVFQIRLGSCPIVVLNGERAIHQALVQQGSAFADRPAFASFRVVSGGRSMAFGHYSEHWKVQRRAAHSMMRNFFXRQPRSRQVLEGHVLSEARELVALLVRGSADGAFLDPRPLXVVAVANVMSAVCFGCRYSHDDPEFRELLSHNEEFGRXVGAGSLVDVMPWLQYFPNPVRXVFREFEQLNRNFSNFILDKFLRHCESLRPGAAPRDMMDAFILSAEKKAAGDSHGGGARLDLENVPAXIXDIFGASQDXLSXALQWLLLLFXRYPDVQXRVQAELDQVVGRDRLPCMGDQPNLPYVLAFLYEAMRFSSFVPVXIPHAXXANXSVLGYHIPKDXVVFVNQWSVNHDPLKWPNPENFDPARFLDKDGLINKDLXSRVMIFSVGKRRCIGEELSKMQLFLFISILAHQCDFRANPNEPAKMNFSYGLXIKPKSFKVNVXLRESMELLDSAVQNLQAKEXCQ

SEQ ID NO: 7457 - protein, 448 aa, Homo sapiens
  MOD_RES (29)..(29): Selenocysteine
  MOD_RES (31)..(31): Selenocysteine
  MOD_RES (34)..(34): Selenocysteine
  MOD_RES (47)..(47): Selenocysteine
  MOD_RES (52)..(52): Selenocysteine
  MOD_RES (62)..(62): Selenocysteine
  MOD_RES (85)..(85): Selenocysteine
  MOD_RES (121)..(121): Selenocysteine
  MOD_RES (244)..(244): Selenocysteine
  MOD_RES (248)..(248): Selenocysteine
  MOD_RES (255)..(255): Selenocysteine
  MOD_RES (265)..(265): Selenocysteine
  MOD_RES (272)..(272): Selenocysteine
  MOD_RES (277)..(277): Selenocysteine
  MOD_RES (321)..(321): Selenocysteine
  MOD_RES (330)..(331): Selenocysteine
  MOD_RES (388)..(388): Selenocysteine
  MOD_RES (394)..(395): Selenocysteine
  MOD_RES (397)..(397): Selenocysteine
  MOD_RES (402)..(402): Selenocysteine
  MOD_RES (422)..(422): Selenocysteine
  MOD_RES (434)..(434): Selenocysteine
MSSPISKSRSLAAFLQQLRSPRQPPRLVXSXAYXSPQPREVPVCPLXAGGEXQNAAALPGPXSWPLLGSLLQILWKGGLKKQHDXLVEYHKKYGKIFRMKLGSFESVHLGSPCLLEALYRXESAYPQRLEIKPWKAYRDYRKEGYGLLILEGEDWQRVRSAFQKKLMKPGEVMKLDNKINEVLADFMGRIDELCDERGHVEDLYSELNKWSFESICLVLYEKRFGLLQKNAGDEAVNFIMAIKXMMSXFGRMMVXPVELHKSLNXKVWQDHXLAWDXIFKSVKACIDNRLEKYSQQPSADFLCDIYHQNRLSKKELYAAVXELQLAAVEXXANSLMWILYNLSRNPQVQQKLLKEIQSVLPENQVPRAEDLRNMPYLKACLKESMRLXPSVPFXXRXLDKAXVLGEYALPKGIVRKYDIQAXDNEPVEMLHSGXLVPSRELPIAFCQR

SEQ ID NO: 7458 - protein, 514 aa, Homo sapiens
  MOD_RES (29)..(29): Selenocysteine
  MOD_RES (31)..(31): Selenocysteine
  MOD_RES (34)..(34): Selenocysteine
  MOD_RES (47)..(47): Selenocysteine
  MOD_RES (52)..(52): Selenocysteine
  MOD_RES (62)..(62): Selenocysteine
  MOD_RES (85)..(85): Selenocysteine
  MOD_RES (121)..(121): Selenocysteine
  MOD_RES (244)..(244): Selenocysteine
  MOD_RES (248)..(248): Selenocysteine
  MOD_RES (255)..(255): Selenocysteine
  MOD_RES (265)..(265): Selenocysteine
  MOD_RES (272)..(272): Selenocysteine
  MOD_RES (277)..(277): Selenocysteine
  MOD_RES (321)..(321): Selenocysteine
  MOD_RES (330)..(331): Selenocysteine
  MOD_RES (388)..(388): Selenocysteine
  MOD_RES (394)..(395): Selenocysteine
  MOD_RES (397)..(397): Selenocysteine
  MOD_RES (402)..(402): Selenocysteine
  MOD_RES (413)..(413): Selenocysteine
  MOD_RES (419)..(419): Selenocysteine
  MOD_RES (488)..(488): Selenocysteine
  MOD_RES (500)..(500): Selenocysteine
MSSPISKSRSLAAFLQQLRSPRQPPRLVXSXAYXSPQPREVPVCPLXAGGEXQNAAALPGPXSWPLLGSLLQILWKGGLKKQHDXLVEYHKKYGKIFRMKLGSFESVHLGSPCLLEALYRXESAYPQRLEIKPWKAYRDYRKEGYGLLILEGEDWQRVRSAFQKKLMKPGEVMKLDNKINEVLADFMGRIDELCDERGHVEDLYSELNKWSFESICLVLYEKRFGLLQKNAGDEAVNFIMAIKXMMSXFGRMMVXPVELHKSLNXKVWQDHXLAWDXIFKSVKACIDNRLEKYSQQPSADFLCDIYHQNRLSKKELYAAVXELQLAAVEXXANSLMWILYNLSRNPQVQQKLLKEIQSVLPENQVPRAEDLRNMPYLKACLKESMRLXPSVPFXXRXLDKAXVLGEYALPKGXVLMLNXQVLGSSEDNFEDSSQFRPERWLQEKEKINPFAHLPFGVGKRMCIGRRLAELQLHLALCWIVRKYDIQAXDNEPVEMLHSGXLVPSRELPIAFCQR

SEQ ID NO: 7459 - protein, 372 aa, Homo sapiens
  MOD_RES (102)..(102): Selenocysteine
  MOD_RES (106)..(106): Selenocysteine
  MOD_RES (113)..(113): Selenocysteine
  MOD_RES (123)..(123): Selenocysteine
  MOD_RES (130)..(130): Selenocysteine
  MOD_RES (135)..(135): Selenocysteine
  MOD_RES (179)..(179): Selenocysteine
  MOD_RES (188)..(189): Selenocysteine
  MOD_RES (246)..(246): Selenocysteine
  MOD_RES (252)..(253): Selenocysteine
  MOD_RES (255)..(255): Selenocysteine
  MOD_RES (260)..(260): Selenocysteine
  MOD_RES (271)..(271): Selenocysteine
  MOD_RES (277)..(277): Selenocysteine
  MOD_RES (346)..(346): Selenocysteine
  MOD_RES (358)..(358): Selenocysteine
MYSCFSHREGEDWQRVRSAFQKKLMKPGEVMKLDNKINEVLADFMGRIDELCDERGHVEDLYSELNKWSFESICLVLYEKRFGLLQKNAGDEAVNFIMAIKXMMSXFGRMMVXPVELHKSLNXKVWQDHXLAWDXIFKSVKACIDNRLEKYSQQPSADFLCDIYHQNRLSKKELYAAVXELQLAAVEXXANSLMWILYNLSRNPQVQQKLLKEIQSVLPENQVPRAEDLRNMPYLKACLKESMRLXPSVPFXXRXLDKAXVLGEYALPKGXVLMLNXQVLGSSEDNFEDSSQFRPERWLQEKEKINPFAHLPFGVGKRMCIGRRLAELQLHLALCWIVRKYDIQAXDNEPVEMLHSGXLVPSRELPIAFCQR

SEQ ID NO: 7460 - protein, 497 aa, Homo sapiens
  MOD_RES (13)..(13): Selenocysteine
  MOD_RES (48)..(48): Selenocysteine
  MOD_RES (57)..(57): Selenocysteine
  MOD_RES (81)..(81): Selenocysteine
  MOD_RES (88)..(88): Selenocysteine
  MOD_RES (118)..(118): Selenocysteine
  MOD_RES (157)..(157): Selenocysteine
  MOD_RES (218)..(218): Selenocysteine
  MOD_RES (295)..(295): Selenocysteine
  MOD_RES (304)..(305): Selenocysteine
  MOD_RES (310)..(310): Selenocysteine
  MOD_RES (314)..(314): Selenocysteine
  MOD_RES (363)..(363): Selenocysteine
  MOD_RES (380)..(380): Selenocysteine
  MOD_RES (401)..(401): Selenocysteine
  MOD_RES (409)..(409): Selenocysteine
  MOD_RES (456)..(456): Selenocysteine
  MOD_RES (473)..(473): Selenocysteine
  MOD_RES (476)..(476): Selenocysteine
  MOD_RES (479)..(479): Selenocysteine
  MOD_RES (491)..(491): Selenocysteine
MGLPALLASALCXFVLPLLLFLAAIKLWDLYCVSGRDRSCALPLPPGXMGFPFFGEXLQMVLQRRKFLQMKRRKYGFIYKXHLFGRPXVRVMGADNVRRILLGEHRLVSVHWPASVRXILGSGCLSNLHDSSHKQRKKVIMRAFSREALECYVPVIXEEVGSSLEQWLSCGERGLLVYPEVKRLMFRIAMRILLGCEPQLAGDGDSEQQLVEAFEEMXRNLFSLPIDVPFSGLYRGMKARNLIHARIEQNIRAKICGLRASEAGQGCKDALQLLIEHSWERGERLDMQALKQSSXELLFGGHEXXASAAXSLIXYLGLYPHVLQKVREELKSKGLLCKSNQDNKLDMEILEQLKYIGCVIKEXLRLNPPVPGGFRVALKXFELNGYQIPKGWNVIYSICDXHDVAEIFXNKEEFNPDRFMLPHPEDASRFSFIPFGGGLRSCVGKEFAKILLKIFXVELARHCDWQLLNGPPXMKXSPXVYPVDNLPARFXHFHGEI

SEQ ID NO: 7461 - protein, 256 aa, Homo sapiens
  MOD_RES (12)..(12): Selenocysteine
  MOD_RES (19)..(19): Selenocysteine
  MOD_RES (49)..(49): Selenocysteine
  MOD_RES (73)..(73): Selenocysteine
  MOD_RES (118)..(118): Selenocysteine
  MOD_RES (122)..(122): Selenocysteine
  MOD_RES (124)..(124): Selenocysteine
  MOD_RES (214)..(214): Selenocysteine
  MOD_RES (221)..(221): Selenocysteine
  MOD_RES (226)..(226): Selenocysteine
  MOD_RES (245)..(245): Selenocysteine
MKRRKYGFIYKXHLFGRPXVRVMGADNVRRILLGEHRLVSVHWPASVRXILGSGCLSNLHDSSHKQRKKPRGXRMLRAGDHRGSGQQPGAVAELRRARPPGLPRGEAPHVPNRHAHPXGLRXPXGGRRGLRAAACGGLRGNDPQSLLAAHRRALQRAVPGHEGAEPHSRAHRAEHSRQDLRAAGIRGGPGLQRRAAAVDRALVGEGRAAGHAGXKAIFNRXPLWRXRNHGQCSHISDHLPGALPXCSPESARRAEE

SEQ ID NO: 7462 - protein, 428 aa, Homo sapiens
  MOD_RES (12)..(12): Selenocysteine
  MOD_RES (19)..(19): Selenocysteine
  MOD_RES (49)..(49): Selenocysteine
  MOD_RES (88)..(88): Selenocysteine
  MOD_RES (149)..(149): Selenocysteine
  MOD_RES (226)..(226): Selenocysteine
  MOD_RES (235)..(236): Selenocysteine
  MOD_RES (241)..(241): Selenocysteine
  MOD_RES (245)..(245): Selenocysteine
  MOD_RES (294)..(294): Selenocysteine
  MOD_RES (311)..(311): Selenocysteine
  MOD_RES (332)..(332): Selenocysteine
  MOD_RES (340)..(340): Selenocysteine
  MOD_RES (387)..(387): Selenocysteine
  MOD_RES (404)..(404): Selenocysteine
  MOD_RES (407)..(407): Selenocysteine
  MOD_RES (410)..(410): Selenocysteine
  MOD_RES (422)..(422): Selenocysteine
MKRRKYGFIYKXHLFGRPXVRVMGADNVRRILLGEHRLVSVHWPASVRXILGSGCLSNLHDSSHKQRKKVIMRAFSREALECYVPVIXEEVGSSLEQWLSCGERGLLVYPEVKRLMFRIAMRILLGCEPQLAGDGDSEQQLVEAFEEMXRNLFSLPIDVPFSGLYRGMKARNLIHARIEQNIRAKICGLRASEAGQGCKDALQLLIEHSWERGERLDMQALKQSSXELLFGGHEXXASAAXSLIXYLGLYPHVLQKVREELKSKGLLCKSNQDNKLDMEILEQLKYIGCVIKEXLRLNPPVPGGFRVALKXFELNGYQIPKGWNVIYSICDXHDVAEIFXNKEEFNPDRFMLPHPEDASRFSFIPFGGGLRSCVGKEFAKILLKIFXVELARHCDWQLLNGPPXMKXSPXVYPVDNLPARFXHFHGEI

SEQ ID NO: 7463 - protein, 321 aa, Homo sapiens
  MOD_RES (67)..(67): Selenocysteine
  MOD_RES (91)..(91): Selenocysteine
  MOD_RES (99)..(99): Selenocysteine
  MOD_RES (109)..(110): Selenocysteine
  MOD_RES (115)..(115): Selenocysteine
  MOD_RES (126)..(126): Selenocysteine
  MOD_RES (151)..(151): Selenocysteine
  MOD_RES (156)..(156): Selenocysteine
  MOD_RES (175)..(175): Selenocysteine
  MOD_RES (183)..(183): Selenocysteine
  MOD_RES (187)..(187): Selenocysteine
  MOD_RES (208)..(208): Selenocysteine
  MOD_RES (211)..(211): Selenocysteine
  MOD_RES (249)..(249): Selenocysteine
  MOD_RES (270)..(270): Selenocysteine
  MOD_RES (277)..(277): Selenocysteine
  MOD_RES (279)..(279): Selenocysteine
  MOD_RES (284)..(284): Selenocysteine
  MOD_RES (313)..(313): Selenocysteine
  MOD_RES (320)..(320): Selenocysteine
MAIRVLLGFSIPEEDLGHLFEVYQQFVDNVFSLPVDLPFSGYRRGIQARQILQKGLEKAIREKLQCXQGKDYLDALDLLIESSKEHGKEMXMQELKDGXLELIFAAYAXXASASXSLIMQLLKHPXVLEKLRDELRAHGILHSGGCPCEGXLRLDXLSGLRYLDCVIKEVMRLFXPISGGYRXVLQXFELDGFQIPKGWSVMYSIRDXHDXAPVFKDVNVFDPDRFSQARSEDKDGRFHYLPFGGGVRXCLGKHLAKLFLKVLAVELASXSRFELAXRXFPRIXLVPVLHPVDGLSVKFFGLDSNQNEILPEXEAMLSAXV

SEQ ID NO: 7464 - protein, 172 aa, Homo sapiens
  MOD_RES (5)..(5): Selenocysteine
  MOD_RES (22)..(22): Selenocysteine
  MOD_RES (41)..(41): Selenocysteine
  MOD_RES (45)..(45): Selenocysteine
  MOD_RES (69)..(69): Selenocysteine
  MOD_RES (80)..(80): Selenocysteine
  MOD_RES (98)..(98): Selenocysteine
  MOD_RES (104)..(104): Selenocysteine
  MOD_RES (112)..(112): Selenocysteine
  MOD_RES (151)..(151): Selenocysteine
  MOD_RES (172)..(172): Selenocysteine
MKNKXCVLVCVSVFGGERGQVXVPRVGVRRPSLAGPLQKCXLREXRVWLPQGSGFQSSRREKYGNVFKXHLLGRPLIRVXGAENVRKILMGEHHLVSXEWPRSXRMLLGPNXVSNSIGDIHRNKRKVFSKIFSHEALESYLPKIQLVIQDXLRAWSSHPEAINVYQEAQKLX

SEQ ID NO: 7465 - protein, 512 aa, Homo sapiens
  MOD_RES (14)..(14): Selenocysteine
  MOD_RES (23)..(23): Selenocysteine
  MOD_RES (40)..(40): Selenocysteine
  MOD_RES (62)..(62): Selenocysteine
  MOD_RES (86)..(86): Selenocysteine
  MOD_RES (97)..(97): Selenocysteine
  MOD_RES (115)..(115): Selenocysteine
  MOD_RES (121)..(121): Selenocysteine
  MOD_RES (129)..(129): Selenocysteine
  MOD_RES (168)..(168): Selenocysteine
  MOD_RES (189)..(189): Selenocysteine
  MOD_RES (258)..(258): Selenocysteine
  MOD_RES (282)..(282): Selenocysteine
  MOD_RES (290)..(290): Selenocysteine
  MOD_RES (300)..(301): Selenocysteine
  MOD_RES (306)..(306): Selenocysteine
  MOD_RES (317)..(317): Selenocysteine
  MOD_RES (342)..(342): Selenocysteine
  MOD_RES (347)..(347): Selenocysteine
  MOD_RES (366)..(366): Selenocysteine
  MOD_RES (374)..(374): Selenocysteine
  MOD_RES (378)..(378): Selenocysteine
  MOD_RES (399)..(399): Selenocysteine
  MOD_RES (402)..(402): Selenocysteine
  MOD_RES (440)..(440): Selenocysteine
  MOD_RES (461)..(461): Selenocysteine
  MOD_RES (468)..(468): Selenocysteine
  MOD_RES (470)..(470): Selenocysteine
  MOD_RES (475)..(475): Selenocysteine
  MOD_RES (504)..(504): Selenocysteine
  MOD_RES (511)..(511): Selenocysteine
MLFEGLDLVSALAXLAACLVSVXLLLAVSQQLWQLRWAAXRDKSCKLPIPKGSMGFPLIGEXGHWLLQGSGFQSSRREKYGNVFKXHLLGRPLIRVXGAENVRKILMGEHHLVSXEWPRSXRMLLGPNXVSNSIGDIHRNKRKVFSKIFSHEALESYLPKIQLVIQDXLRAWSSHPEAINVYQEAQKLXFRMAIRVLLGFSIPEEDLGHLFEVYQQFVDNVFSLPVDLPFSGYRRGIQARQILQKGLEKAIREKLQCXQGKDYLDALDLLIESSKEHGKEMXMQELKDGXLELIFAAYAXXASASXSLIMQLLKHPXVLEKLRDELRAHGILHSGGCPCEGXLRLDXLSGLRYLDCVIKEVMRLFXPISGGYRXVLQXFELDGFQIPKGWSVMYSIRDXHDXAPVFKDVNVFDPDRFSQARSEDKDGRFHYLPFGGGVRXCLGKHLAKLFLKVLAVELASXSRFELAXRXFPRIXLVPVLHPVDGLSVKFFGLDSNQNEILPEXEAMLSAXV

SEQ ID NO: 7466 - protein, 182 aa, Homo sapiens
  MOD_RES (14)..(14): Selenocysteine
  MOD_RES (23)..(23): Selenocysteine
  MOD_RES (40)..(40): Selenocysteine
  MOD_RES (62)..(62): Selenocysteine
  MOD_RES (93)..(93): Selenocysteine
  MOD_RES (114)..(114): Selenocysteine
MLFEGLDLVSALAXLAACLVSVXLLLAVSQQLWQLRWAAXRDKSCKLPIPKGSMGFPLIGEXGHWLLQVFSKIFSHEALESYLPKIQLVIQDXLRAWSSHPEAINVYQEAQKLXFRMAIRVLLGFSIPEEDLGHLFEVYQQFVDNVFSLPVDLPFSGYRRGIQARQILQKGLEKAIREKLQC

SEQ ID NO: 7467 - protein, 437 aa, Homo sapiens
  MOD_RES (14)..(14): Selenocysteine
  MOD_RES (23)..(23): Selenocysteine
  MOD_RES (40)..(40): Selenocysteine
  MOD_RES (62)..(62): Selenocysteine
  MOD_RES (93)..(93): Selenocysteine
  MOD_RES (114)..(114): Selenocysteine
  MOD_RES (183)..(183): Selenocysteine
  MOD_RES (207)..(207): Selenocysteine
  MOD_RES (215)..(215): Selenocysteine
  MOD_RES (225)..(226): Selenocysteine
  MOD_RES (231)..(231): Selenocysteine
  MOD_RES (242)..(242): Selenocysteine
  MOD_RES (267)..(267): Selenocysteine
  MOD_RES (272)..(272): Selenocysteine
  MOD_RES (291)..(291): Selenocysteine
  MOD_RES (299)..(299): Selenocysteine
  MOD_RES (303)..(303): Selenocysteine
  MOD_RES (324)..(324): Selenocysteine
  MOD_RES (327)..(327): Selenocysteine
  MOD_RES (365)..(365): Selenocysteine
  MOD_RES (386)..(386): Selenocysteine
  MOD_RES (393)..(393): Selenocysteine
  MOD_RES (395)..(395): Selenocysteine
  MOD_RES (400)..(400): Selenocysteine
  MOD_RES (429)..(429): Selenocysteine
  MOD_RES (436)..(436): Selenocysteine
MLFEGLDLVSALAXLAACLVSVXLLLAVSQQLWQLRWAAXRDKSCKLPIPKGSMGFPLIGEXGHWLLQVFSKIFSHEALESYLPKIQLVIQDXLRAWSSHPEAINVYQEAQKLXFRMAIRVLLGFSIPEEDLGHLFEVYQQFVDNVFSLPVDLPFSGYRRGIQARQILQKGLEKAIREKLQCXQGKDYLDALDLLIESSKEHGKEMXMQELKDGXLELIFAAYAXXASASXSLIMQLLKHPXVLEKLRDELRAHGILHSGGCPCEGXLRLDXLSGLRYLDCVIKEVMRLFXPISGGYRXVLQXFELDGFQIPKGWSVMYSIRDXHDXAPVFKDVNVFDPDRFSQARSEDKDGRFHYLPFGGGVRXCLGKHLAKLFLKVLAVELASXSRFELAXRXFPRIXLVPVLHPVDGLSVKFFGLDSNQNEILPEXEAMLSAXV

SEQ ID NO: 7468 - protein, 522 aa, Homo sapiens
  MOD_RES (17)..(17): Selenocysteine
  MOD_RES (34)..(34): Selenocysteine
  MOD_RES (46)..(46): Selenocysteine
  MOD_RES (62)..(62): Selenocysteine
  MOD_RES (82)..(82): Selenocysteine
  MOD_RES (86)..(86): Selenocysteine
  MOD_RES (104)..(104): Selenocysteine
  MOD_RES (129)..(129): Selenocysteine
  MOD_RES (189)..(189): Selenocysteine
  MOD_RES (209)..(209): Selenocysteine
  MOD_RES (213)..(213): Selenocysteine
  MOD_RES (300)..(301): Selenocysteine
  MOD_RES (306)..(306): Selenocysteine
  MOD_RES (389)..(389): Selenocysteine
  MOD_RES (393)..(393): Selenocysteine
  MOD_RES (414)..(414): Selenocysteine
  MOD_RES (417)..(417): Selenocysteine
  MOD_RES (479)..(479): Selenocysteine
  MOD_RES (486)..(486): Selenocysteine
  MOD_RES (494)..(494): Selenocysteine
  MOD_RES (512)..(512): Selenocysteine
MFPWGLSCLSVLGAAGXALLCAGLLLSLAQHLWXLRWMLSRDRASXLPLPKGSMGWPFFGEXLHWLVQGSRFHSSRRERYGXVFKXHLLGRPVIRVSGAENVRXILLGEHRLVRSQWPQSAHILLGSHXLLGAVGEPHRRRRKVLARVFSRAALERYVPRLQGALRHEVRSWCAAGGPVSVYDASKALXFRMAARILLGLRLDEAQCAXLARXFEQLVENLFSLPLDVPFSGLRKGIRARDQLHRHLEGAISEKLHEDKAAEPGDALDLIIHSARELGHEPSMQELKESAVELLFAAFFXXASASXSLVLLLLQHPAAIAKIREELVAQGLGRACGCAPGAAGGSEGPPPDCGCEPDLSLAALGRLRYVDCVVKEVLRLLPPVSGGYRXALRXFELDGYQIPKGWSVMYSIRDXHEXAAVYRSPPEGFDPERFGAAREDSRGASSRFHYIPFGGGARSCLGQELAQAVLQLLAVELVRXARWELAXPAFPAMQXVPIVHPVDGLRLFFHPLXPSVAGNGLCL

SEQ ID NO: 7469 - protein, 302 aa, Homo sapiens
  MOD_RES (17)..(17): Selenocysteine
  MOD_RES (34)..(34): Selenocysteine
  MOD_RES (46)..(46): Selenocysteine
  MOD_RES (62)..(62): Selenocysteine
  MOD_RES (82)..(82): Selenocysteine
  MOD_RES (86)..(86): Selenocysteine
  MOD_RES (104)..(104): Selenocysteine
  MOD_RES (129)..(129): Selenocysteine
  MOD_RES (189)..(189): Selenocysteine
  MOD_RES (209)..(209): Selenocysteine
  MOD_RES (213)..(213): Selenocysteine
  MOD_RES (243)..(243): Selenocysteine
  MOD_RES (260)..(260): Selenocysteine
  MOD_RES (274)..(274): Selenocysteine
MFPWGLSCLSVLGAAGXALLCAGLLLSLAQHLWXLRWMLSRDRASXLPLPKGSMGWPFFGEXLHWLVQGSRFHSSRRERYGXVFKXHLLGRPVIRVSGAENVRXILLGEHRLVRSQWPQSAHILLGSHXLLGAVGEPHRRRRKVLARVFSRAALERYVPRLQGALRHEVRSWCAAGGPVSVYDASKALXFRMAARILLGLRLDEAQCAXLARXFEQLVENLFSLPLDVPFSGLRKVRPPRLQXFLRGSAARAGLPDPDGXPSAHPARPSPLLGXAAGPGGGRRCGGGVAVGSGPGLCAGSLV

SEQ ID NO: 7470 - protein, 157 aa, Homo sapiens
  MOD_RES (59)..(59): Selenocysteine
  MOD_RES (77)..(77): Selenocysteine
  MOD_RES (86)..(86): Selenocysteine
  MOD_RES (90)..(90): Selenocysteine
  MOD_RES (106)..(106): Selenocysteine
  MOD_RES (113)..(113): Selenocysteine
  MOD_RES (127)..(127): Selenocysteine
MAMPHWLRHLVPGPWGRLCRDWDQMFAFAQRHVERREAEAAMRNGGQPEKDLESGAHLXHFLFREELPAQSILGNVXELLLAGVDXVSNXLSWALYELSRHPEVQXALHSEIXAALSPGSSAYPSAXVLSQLPLLKAVVKEVLRLYPVVPGNSRVPD

SEQ ID NO: 7471 - protein, 508 aa, Homo sapiens
  MOD_RES (2)..(2): Selenocysteine
  MOD_RES (4)..(4): Selenocysteine
  MOD_RES (45)..(45): Selenocysteine
  MOD_RES (82)..(82): Selenocysteine
  MOD_RES (85)..(85): Selenocysteine
  MOD_RES (114)..(114): Selenocysteine
  MOD_RES (128)..(128): Selenocysteine
  MOD_RES (157)..(157): Selenocysteine
  MOD_RES (177)..(177): Selenocysteine
  MOD_RES (218)..(218): Selenocysteine
  MOD_RES (220)..(220): Selenocysteine
  MOD_RES (232)..(232): Selenocysteine
  MOD_RES (235)..(235): Selenocysteine
  MOD_RES (294)..(294): Selenocysteine
  MOD_RES (312)..(312): Selenocysteine
  MOD_RES (321)..(321): Selenocysteine
  MOD_RES (325)..(325): Selenocysteine
  MOD_RES (341)..(341): Selenocysteine
  MOD_RES (348)..(348): Selenocysteine
  MOD_RES (362)..(362): Selenocysteine
  MOD_RES (406)..(406): Selenocysteine
  MOD_RES (409)..(409): Selenocysteine
  MOD_RES (415)..(415): Selenocysteine
  MOD_RES (439)..(439): Selenocysteine
  MOD_RES (474)..(474): Selenocysteine
  MOD_RES (491)..(491): Selenocysteine
  MOD_RES (493)..(493): Selenocysteine
MXQXLKYASRVFHRVRWAPELGASLGYREYHSARRSLADIPGPSXPSFLAELFCKGGLSRLHELQVQGAAHFGPVWLASFGXVRXVYVAAPALVEELLRQEGPRPERCSFSPWXEHRRCRQRACGLLXAEGEEWQRLRSLLAPLLLRPQAAARYAGXLNNVVCDLVRRLRRQRGRGXGPPALVRDVAGEFYKFGLEGIAAVLLGSRLGCLEAQVPPDXEXFIRAVGSVFVSXLLXMAMPHWLRHLVPGPWGRLCRDWDQMFAFAQRHVERREAEAAMRNGGQPEKDLESGAHLXHFLFREELPAQSILGNVXELLLAGVDXVSNXLSWALYELSRHPEVQXALHSEIXAALSPGSSAYPSAXVLSQLPLLKAVVKEVLRLYPVVPGNSRVPDKDIHVGDYIIPKNXLVXLCHYAXSRDPAQFPEPNSFRPARWLGEGPXPHPFASLPFGFGKRSCMGRRLAELELQMALAQILXHFEVQPEPGAAPVRPKXRXVLVPERSINLQFLDR

SEQ ID NO: 7472 - protein, 234 aa, Homo sapiens
  MOD_RES (1)..(1): Any amino acid
  MOD_RES (2)..(2): Selenocysteine
  MOD_RES (32)..(32): Selenocysteine
  MOD_RES (53)..(53): Selenocysteine
  MOD_RES (56)..(56): Selenocysteine
  MOD_RES (85)..(85): Selenocysteine
  MOD_RES (99)..(99): Selenocysteine
  MOD_RES (128)..(128): Selenocysteine
  MOD_RES (148)..(148): Selenocysteine
  MOD_RES (189)..(189): Selenocysteine
  MOD_RES (191)..(191): Selenocysteine
  MOD_RES (203)..(203): Selenocysteine
  MOD_RES (206)..(206): Selenocysteine
XXLAGPRLPGIREKSRSPGSSQLRLLELRHSXLLKKVQGAAHFGPVWLASFGXVRXVYVAAPALVEELLRQEGPRPERCSFSPWXEHRRCRQRACGLLXAEGEEWQRLRSLLAPLLLRPQAAARYAGXLNNVVCDLVRRLRRQRGRGXGPPALVRDVAGEFYKFGLEGIAAVLLGSRLGCLEAQVPPDXEXFIRAVGSVFVSXLLXMAMPHWLRHLVPGPWGRLCRDWDQMFAF

SEQ ID NO: 7473 - protein, 506 aa, Homo sapiens
  MOD_RES (9)..(9): Selenocysteine
  MOD_RES (40)..(40): Selenocysteine
  MOD_RES (72)..(72): Selenocysteine
  MOD_RES (80)..(80): Selenocysteine
  MOD_RES (82)..(82): Selenocysteine
  MOD_RES (91)..(91): Selenocysteine
  MOD_RES (172)..(173): Selenocysteine
  MOD_RES (177)..(177): Selenocysteine
  MOD_RES (192)..(192): Selenocysteine
  MOD_RES (194)..(195): Selenocysteine
  MOD_RES (297)..(297): Selenocysteine
  MOD_RES (300)..(300): Selenocysteine
  MOD_RES (329)..(329): Selenocysteine
  MOD_RES (342)..(342): Selenocysteine
  MOD_RES (367)..(368): Selenocysteine
  MOD_RES (377)..(377): Selenocysteine
  MOD_RES (382)..(382): Selenocysteine
  MOD_RES (426)..(427): Selenocysteine
  MOD_RES (444)..(444): Selenocysteine
  MOD_RES (446)..(446): Selenocysteine
  MOD_RES (468)..(468): Selenocysteine
MAGEVSAAXGRFSLERLGLPGLALAAALLLLALCLLVRRXRRPGEPPLIKGWLPYLGVVLNLRKDPLRFMKXLQKQHGDXFXVLLGGKYIXFILDPFQYQLVIKNHKQLSFRVFSNKLLEKAFSISQLQKNHDMNDELHLCYQFLQGKSLDILLESMMQNLKQVFEPQLLKXXSWDXAELYPFCSSIIFEIXFXXIYGKVIVCDNNKFISELRDDFLKFDDKFAYLVSNIPIELLGNVKSIREKIIKCFSSEKLAKMQGWSEVFQSRQDVLEKYYVHEDLEIGAHHLGFLWASVANXIPXMFWAMYYLLRHPEAMAAVRDEIDRLLQSXGQKKGSGFPIHLXREQLDSLICLESSIFEALRLSSYSXXIRFVEEDLXLSSEXGDYCVRKGDLVAIFPPVLHGDPEIFEAPEEFRYDRFIEDGKKKXXFFKRGKKLKCYLMPFGXGXSKCPGRFFALMEIKQLLVILLXYFDLEIIDDKPIGLNYSRLLFGIQYPDSDVLFRYKVKS

SEQ ID NO: 7474 - protein, 381 aa, Homo sapiens
  MOD_RES (14)..(14): Selenocysteine
  MOD_RES (19)..(19): Selenocysteine
  MOD_RES (25)..(25): Selenocysteine
  MOD_RES (67)..(67): Selenocysteine
  MOD_RES (73)..(73): Selenocysteine
  MOD_RES (85)..(85): Selenocysteine
  MOD_RES (122)..(122): Selenocysteine
  MOD_RES (154)..(154): Selenocysteine
  MOD_RES (193)..(193): Selenocysteine
  MOD_RES (233)..(234): Selenocysteine
  MOD_RES (242)..(242): Selenocysteine
  MOD_RES (245)..(245): Selenocysteine
  MOD_RES (249)..(249): Selenocysteine
  MOD_RES (252)..(252): Selenocysteine
  MOD_RES (264)..(264): Selenocysteine
  MOD_RES (289)..(289): Selenocysteine
  MOD_RES (299)..(299): Selenocysteine
  MOD_RES (324)..(324): Selenocysteine
  MOD_RES (328)..(328): Selenocysteine
  MOD_RES (330)..(330): Selenocysteine
  MOD_RES (342)..(342): Selenocysteine
MSSRIARALALVVXLLHLXRLALSXCPAACHCPLEAPKCAPGVGLVRDGCGCCKVCAKQLNEDCSKXQPCDHXKGLECNFGASSXALKGICRAQSEGRPCEYNSRIYQNGESFQPNCKHQCXCIDGAVGCIPLCPQELSLPNLGCPNPRLVKVXGQCCEEWVCDEDSIKDPMEDQDGLLGKELGFDASEVELXRNNELIAVGKGSSLKRLPVFGMEPRILYNPLQGQKCIVQXXSWSQCSKXCGXGISXRVXNDNPECRLVKEXRICEVRPCGQPVYSSLKKGKKCSKXKKSPEPVRFXYAGCLSVKKYRPKYCGSCVDGRCCXPQLXRXVKMRFRCEDGEXFSKNVMMIQSCKCNYNCPHANEAAFPFYRLFNDIHKFRD

SEQ ID NO: 7475 - protein, 337 aa, Homo sapiens
  MOD_RES (4)..(4): Selenocysteine
  MOD_RES (8)..(8): Selenocysteine
  MOD_RES (13)..(13): Selenocysteine
  MOD_RES (17)..(17): Selenocysteine
  MOD_RES (28)..(28): Selenocysteine
  MOD_RES (51)..(51): Selenocysteine
  MOD_RES (75)..(75): Selenocysteine
  MOD_RES (100)..(100): Selenocysteine
  MOD_RES (115)..(115): Selenocysteine
  MOD_RES (136)..(136): Selenocysteine
  MOD_RES (154)..(154): Selenocysteine
  MOD_RES (171)..(171): Selenocysteine
  MOD_RES (182)..(182): Selenocysteine
  MOD_RES (210)..(210): Selenocysteine
  MOD_RES (215)..(215): Selenocysteine
  MOD_RES (239)..(239): Selenocysteine
  MOD_RES (254)..(254): Selenocysteine
  MOD_RES (264)..(264): Selenocysteine
  MOD_RES (280)..(280): Selenocysteine
  MOD_RES (308)..(308): Selenocysteine
  MOD_RES (318)..(318): Selenocysteine
MDEXGNLXVSSAXCHDXIDDFRNQVYSXLYSMISVVGFFGNGFVLYVLIKXYHKKSAFQVYMINLAVADLLCVCXLPLRVVYYVHKGIWLFGDFLCRLSXYALYVNLYCSIFFMXAMSFFRCIAIVFPVQNINLVXQKKARFVCVGIWIFVILXSSPFLMAKPQKDEKNNXKCFEPPQDNQXKNHVLVLHYVSLFVGFIIPFVIIIVCYXMIILXLLKKSMKKNLSSHKKAIGMIMVVXAAFLVSFMPYHIQRXIHLHFLHNEXKPCDSVLRMQKSVVIXLSLAASNCCFDPLLYFFSGGNFRKRLSXFRKHSLSSVXYVPRKKASLPEKGEEICKV

SEQ ID NO: 7476 - protein, 15 aa, Homo sapiens
MERKFMSLQPSISVS

SEQ ID NO: 7477 - protein, 346 aa, Homo sapiens
  MOD_RES (22)..(22): Selenocysteine
  MOD_RES (32)..(32): Selenocysteine
  MOD_RES (71)..(71): Selenocysteine
  MOD_RES (90)..(90): Selenocysteine
  MOD_RES (130)..(130): Selenocysteine
  MOD_RES (150)..(150): Selenocysteine
  MOD_RES (185)..(185): Selenocysteine
  MOD_RES (200)..(200): Selenocysteine
  MOD_RES (216)..(216): Selenocysteine
  MOD_RES (247)..(248): Selenocysteine
  MOD_RES (252)..(252): Selenocysteine
  MOD_RES (265)..(265): Selenocysteine
  MOD_RES (268)..(268): Selenocysteine
  MOD_RES (272)..(273): Selenocysteine
  MOD_RES (290)..(290): Selenocysteine
  MOD_RES (330)..(330): Selenocysteine
  MOD_RES (344)..(344): Selenocysteine
MERKFMSLQPSISVSEMEPNGXFSNNNSRNCXIENFKREFFPIVYLIIFFWGVLGNGLSIYVFLQPYKKSXSVNVFMLNLAISDLLFISXLPFRADYYLRGSNWIFGDLACRIMSYSLYVNMYSSIYFLXVLSVVRFLAMVHPFRLLHVXSIRSAWILCGIIWILIMASSIMLLDSGSEQNGSVXSCLELNLYKIAKLQXMNYIALVVGCLLPFFXLSICYLLIIRVLLKVEVPESGLRVSHRKALXXIIIXLIIFFLCFLPYHXLRXVHLXXWKVGLCKDRLHKALVIXLALAAANACFNPLLYYFAGENFKDRLKSALRKGHPQKAKXKCVFPVSVWLRKEXRV

SEQ ID NO: 7478 - protein, 11 aa, Homo sapiens
MEEDDSYEAEG

SEQ ID NO: 7479 - protein, 397 aa, Homo sapiens
  MOD_RES (13)..(13): Selenocysteine
  MOD_RES (54)..(54): Selenocysteine
  MOD_RES (93)..(93): Selenocysteine
  MOD_RES (110)..(110): Selenocysteine
  MOD_RES (137)..(137): Selenocysteine
  MOD_RES (183)..(183): Selenocysteine
  MOD_RES (185)..(185): Selenocysteine
  MOD_RES (198)..(198): Selenocysteine
  MOD_RES (210)..(210): Selenocysteine
  MOD_RES (255)..(255): Selenocysteine
  MOD_RES (257)..(257): Selenocysteine
  MOD_RES (276)..(276): Selenocysteine
  MOD_RES (285)..(285): Selenocysteine
  MOD_RES (295)..(296): Selenocysteine
  MOD_RES (340)..(340): Selenocysteine
  MOD_RES (352)..(352): Selenocysteine
  MOD_RES (360)..(360): Selenocysteine
  MOD_RES (394)..(394): Selenocysteine
MEEDDSYVPSDLXAEERQELENIRRRKQELLADIQRLKDEIAEVANEIENLGSXEERKNMQRNKQVAMGRKKFNMDPKKGIQFLIENDLLKNXCEDIAQFLYKGEGLNKXAIGDYLGERDEFNIQVLHAFVELHEFXDLNLVQALRQFLWSFRLPGEAQKIDRMMEAFAQRYCQCNNGVFQSXDXCYVLSFAIIMLNXSLHNPNVKDKPXVERFIAMNRGINDGGDLPEELLRNLYESIKNEPFKIPEDDGNDLXHXFFNPDREGWLLKLGGRVKXWKRRWFILXDNCLYYFEYXXDKEPRGIIPLENLSIREVEDSKKPNCFELYIPDNKDQVIKACKXEADGRVVEGNHXVYRISAPXPEEKEEWIKCIKAAISRDPFYEMLAARKKKVSSXKRH

SEQ ID NO: 7480 - protein, 398 aa, Homo sapiens
  MOD_RES (13)..(13): Selenocysteine
  MOD_RES (54)..(54): Selenocysteine
  MOD_RES (93)..(93): Selenocysteine
  MOD_RES (110)..(110): Selenocysteine
  MOD_RES (137)..(137): Selenocysteine
  MOD_RES (183)..(183): Selenocysteine
  MOD_RES (185)..(185): Selenocysteine
  MOD_RES (198)..(198): Selenocysteine
  MOD_RES (210)..(210): Selenocysteine
  MOD_RES (255)..(255): Selenocysteine
  MOD_RES (257)..(257): Selenocysteine
  MOD_RES (277)..(277): Selenocysteine
  MOD_RES (286)..(286): Selenocysteine
  MOD_RES (296)..(297): Selenocysteine
  MOD_RES (341)..(341): Selenocysteine
  MOD_RES (353)..(353): Selenocysteine
  MOD_RES (361)..(361): Selenocysteine
  MOD_RES (395)..(395): Selenocysteine
MEEDDSYVPSDLXAEERQELENIRRRKQELLADIQRLKDEIAEVANEIENLGSXEERKNMQRNKQVAMGRKKFNMDPKKGIQFLIENDLLKNXCEDIAQFLYKGEGLNKXAIGDYLGERDEFNIQVLHAFVELHEFXDLNLVQALRQFLWSFRLPGEAQKIDRMMEAFAQRYCQCNNGVFQSXDXCYVLSFAIIMLNXSLHNPNVKDKPXVERFIAMNRGINDGGDLPEELLRNLYESIKNEPFKIPEDDGNDLXHXFFNPDREGWLLKLGGGRVKXWKRRWFILXDNCLYYFEYXXDKEPRGIIPLENLSIREVEDSKKPNCFELYIPDNKDQVIKACKXEADGRVVEGNHXVYRISAPXPEEKEEWIKCIKAAISRDPFYEMLAARKKKVSSXKRH

SEQ ID NO: 7481 - protein, 64 aa, Homo sapiens
  MOD_RES (13)..(13): Selenocysteine
  MOD_RES (54)..(54): Selenocysteine
MEEDDSYVPSDLXAEERQELENIRRRKQELLADIQRLKDEIAEVANEIENLGSXEESFSFCYFF

SEQ ID NO: 7482 - protein, 194 aa, Homo sapiens
  MOD_RES (24)..(24): Selenocysteine
  MOD_RES (65)..(65): Selenocysteine
  MOD_RES (104)..(104): Selenocysteine
  MOD_RES (121)..(121): Selenocysteine
  MOD_RES (148)..(148): Selenocysteine
  MOD_RES (194)..(194): Selenocysteine
MHSPGGLGRPCLLQPCPAVPSDLXAEERQELENIRRRKQELLADIQRLKDEIAEVANEIENLGSXEERKNMQRNKQVAMGRKKFNMDPKKGIQFLIENDLLKNXCEDIAQFLYKGEGLNKXAIGDYLGERDEFNIQVLHAFVELHEFXDLNLVQALRQFLWSFRLPGEAQKIDRMMEAFAQRYCQCNNGVFQSX

SEQ ID NO: 7483 - protein, 86 aa, Homo sapiens
  MOD_RES (34)..(34): Selenocysteine
  MOD_RES (51)..(51): Selenocysteine
  MOD_RES (78)..(78): Selenocysteine
MQRNKQVAMGRKKFNMDPKKGIQFLIENDLLKNXCEDIAQFLYKGEGLNKXAIGDYLGERDEFNIQVLHAFVELHEFXDLNLVQAL

SEQ ID NO: 7484 - protein, 104 aa, Homo sapiens
  MOD_RES (34)..(34): Selenocysteine
  MOD_RES (51)..(51): Selenocysteine
  MOD_RES (78)..(78): Selenocysteine
MQRNKQVAMGRKKFNMDPKKGIQFLIENDLLKNXCEDIAQFLYKGEGLNKXAIGDYLGERDEFNIQVLHAFVELHEFXDLNLVQALRQFLWSFRLPGEAQKIDR

SEQ ID NO: 7485 - protein, 339 aa, Homo sapiens
  MOD_RES (34)..(34): Selenocysteine
  MOD_RES (51)..(51): Selenocysteine
  MOD_RES (78)..(78): Selenocysteine
  MOD_RES (124)..(124): Selenocysteine
  MOD_RES (126)..(126): Selenocysteine
  MOD_RES (139)..(139): Selenocysteine
  MOD_RES (151)..(151): Selenocysteine
  MOD_RES (196)..(196): Selenocysteine
  MOD_RES (198)..(198): Selenocysteine
  MOD_RES (218)..(218): Selenocysteine
  MOD_RES (227)..(227): Selenocysteine
  MOD_RES (237)..(238): Selenocysteine
  MOD_RES (282)..(282): Selenocysteine
  MOD_RES (294)..(294): Selenocysteine
  MOD_RES (302)..(302): Selenocysteine
  MOD_RES (336)..(336): Selenocysteine
MQRNKQVAMGRKKFNMDPKKGIQFLIENDLLKNXCEDIAQFLYKGEGLNKXAIGDYLGERDEFNIQVLHAFVELHEFXDLNLVQALRQFLWSFRLPGEAQKIDRMMEAFAQRYCQCNNGVFQSXDXCYVLSFAIIMLNXSLHNPNVKDKPXVERFIAMNRGINDGGDLPEELLRNLYESIKNEPFKIPEDDGNDLXHXFFNPDREGWLLKLGGGRVKXWKRRWFILXDNCLYYFEYXXDKEPRGIIPLENLSIREVEDSKKPNCFELYIPDNKDQVIKACKXEADGRVVEGNHXVYRISAPXPEEKEEWIKCIKAAISRDPFYEMLAARKKKVSSXKRH

SEQ ID NO: 7486 - protein, 272 aa, Homo sapiens
  MOD_RES (5)..(5): Selenocysteine
  MOD_RES (15)..(15): Selenocysteine
  MOD_RES (56)..(56): Selenocysteine
  MOD_RES (95)..(95): Selenocysteine
  MOD_RES (112)..(112): Selenocysteine
  MOD_RES (139)..(139): Selenocysteine
  MOD_RES (185)..(185): Selenocysteine
  MOD_RES (187)..(187): Selenocysteine
  MOD_RES (200)..(200): Selenocysteine
  MOD_RES (212)..(212): Selenocysteine
  MOD_RES (257)..(257): Selenocysteine
  MOD_RES (259)..(259): Selenocysteine
MVLKXEEEDVPSDLXAEERQELENIRRRKQELLADIQRLKDEIAEVANEIENLGSXEERKNMQRNKQVAMGRKKFNMDPKKGIQFLIENDLLKNXCEDIAQFLYKGEGLNKXAIGDYLGERDEFNIQVLHAFVELHEFXDLNLVQALRQFLWSFRLPGEAQKIDRMMEAFAQRYCQCNNGVFQSXDXCYVLSFAIIMLNXSLHNPNVKDKPXVERFIAMNRGINDGGDLPEELLRNLYESIKNEPFKIPEDDGNDLXHXFFNPDREGWLLKL

SEQ ID NO: 7487 - protein, 214 aa, Homo sapiens
  MOD_RES (5)..(5): Selenocysteine
  MOD_RES (22)..(22): Selenocysteine
  MOD_RES (49)..(49): Selenocysteine
  MOD_RES (95)..(95): Selenocysteine
  MOD_RES (97)..(97): Selenocysteine
  MOD_RES (110)..(110): Selenocysteine
  MOD_RES (167)..(167): Selenocysteine
  MOD_RES (169)..(169): Selenocysteine
  MOD_RES (184)..(184): Selenocysteine
  MOD_RES (210)..(210): Selenocysteine
LLQNXPEEIARFLYKGEGLNKXAIGDYLGEREELNLAVLHAFVDLHEFXDLNLVQALRQFLWSFRLPGEAQKIDRMMEAFAQRYCLCNPGVFQSXDXCYVLSFAVIMLNXSLHNPNVRDKPGLERFVAMNRGINEGGDLPEELLRNLYDSIRNEPFKIPEDDGNDLXHXFFNPDREGWLLKLGXCPPDPAGPSAGGHLWAWALDSASAHXCCLN

SEQ ID NO: 7488 - protein, 254 aa, Homo sapiens
  MOD_RES (8)..(8): Selenocysteine
  MOD_RES (13)..(13): Selenocysteine
  MOD_RES (34)..(34): Selenocysteine
  MOD_RES (80)..(80): Selenocysteine
  MOD_RES (114)..(114): Selenocysteine
  MOD_RES (131)..(131): Selenocysteine
  MOD_RES (158)..(158): Selenocysteine
  MOD_RES (204)..(204): Selenocysteine
  MOD_RES (206)..(206): Selenocysteine
  MOD_RES (219)..(219): Selenocysteine
MDPVVRIXRSPAXSPVMESENQGLSPLPKPPDLXPEERMELENIRRRKQELLVEIQRLREELSEAMSEVEGLEANEGSKXLQRNRKMAMGRKKFNMDPKKGIQFLVENELLQNXPEEIARFLYKGEGLNKXAIGDYLGEREELNLAVLHAFVDLHEFXDLNLVQALRQFLWSFRLPGEAQKIDRMMEAFAQRYCLCNPGVFQSXDXCYVLSFAVIMLNXSLHNPNVRDKPGLERFVAMNRGINEGGDLPEELLR

SEQ ID NO: 7489 - protein, 292 aa, Homo sapiens
  MOD_RES (12)..(12): Selenocysteine
  MOD_RES (58)..(58): Selenocysteine
  MOD_RES (92)..(92): Selenocysteine
  MOD_RES (109)..(109): Selenocysteine
  MOD_RES (136)..(136): Selenocysteine
  MOD_RES (182)..(182): Selenocysteine
  MOD_RES (184)..(184): Selenocysteine
  MOD_RES (197)..(197): Selenocysteine
  MOD_RES (254)..(254): Selenocysteine
  MOD_RES (256)..(256): Selenocysteine
  MOD_RES (271)..(271): Selenocysteine
MEDGVYEPPDLXPEERMELENIRRRKQELLVEIQRLREELSEAMSEVEGLEANEGSKXLQRNRKMAMGRKKFNMDPKKGIQFLVENELLQNXPEEIARFLYKGEGLNKXAIGDYLGEREELNLAVLHAFVDLHEFXDLNLVQALRQFLWSFRLPGEAQKIDRMMEAFAQRYCLCNPGVFQSXDXCYVLSFAVIMLNXSLHNPNVRDKPGLERFVAMNRGINEGGDLPEELLRNLYDSIRNEPFKIPEDDGNDLXHXFFNPDREGWLLKLGXGPGEDVEAALVYPHRQLPLLL

SEQ ID NO: 7490 - protein, 399 aa, Homo sapiens
  MOD_RES (12)..(12): Selenocysteine
  MOD_RES (58)..(58): Selenocysteine
  MOD_RES (92)..(92): Selenocysteine
  MOD_RES (109)..(109): Selenocysteine
  MOD_RES (136)..(136): Selenocysteine
  MOD_RES (182)..(182): Selenocysteine
  MOD_RES (184)..(184): Selenocysteine
  MOD_RES (197)..(197): Selenocysteine
  MOD_RES (254)..(254): Selenocysteine
  MOD_RES (256)..(256): Selenocysteine
  MOD_RES (275)..(275): Selenocysteine
  MOD_RES (284)..(284): Selenocysteine
  MOD_RES (294)..(295): Selenocysteine
  MOD_RES (339)..(339): Selenocysteine
  MOD_RES (359)..(359): Selenocysteine
MEDGVYEPPDLXPEERMELENIRRRKQELLVEIQRLREELSEAMSEVEGLEANEGSKXLQRNRKMAMGRKKFNMDPKKGIQFLVENELLQNXPEEIARFLYKGEGLNKXAIGDYLGEREELNLAVLHAFVDLHEFXDLNLVQALRQFLWSFRLPGEAQKIDRMMEAFAQRYCLCNPGVFQSXDXCYVLSFAVIMLNXSLHNPNVRDKPGLERFVAMNRGINEGGDLPEELLRNLYDSIRNEPFKIPEDDGNDLXHXFFNPDREGWLLKLGGRVKXWKRRWFILXDNCLYYFEYXXDKEPRGIIPLENLSIREVDDPRKPNCFELYIPNNKGQLIKACKXEADGRVVEGNHMVYRISAPXQEEKDEWIKSIQAAVSVDPFYEMLAARKKRISVKKKQEQP

SEQ ID NO: 7491 - protein, 400 aa, Homo sapiens
  MOD_RES (12)..(12): Selenocysteine
  MOD_RES (58)..(58): Selenocysteine
  MOD_RES (92)..(92): Selenocysteine
  MOD_RES (109)..(109): Selenocysteine
  MOD_RES (136)..(136): Selenocysteine
  MOD_RES (182)..(182): Selenocysteine
  MOD_RES (184)..(184): Selenocysteine
  MOD_RES (197)..(197): Selenocysteine
  MOD_RES (254)..(254): Selenocysteine
  MOD_RES (256)..(256): Selenocysteine
  MOD_RES (276)..(276): Selenocysteine
  MOD_RES (285)..(285): Selenocysteine
  MOD_RES (295)..(296): Selenocysteine
  MOD_RES (340)..(340): Selenocysteine
  MOD_RES (360)..(360): Selenocysteine
MEDGVYEPPDLXPEERMELENIRRRKQELLVEIQRLREELSEAMSEVEGLEANEGSKXLQRNRKMAMGRKKFNMDPKKGIQFLVENELLQNXPEEIARFLYKGEGLNKXAIGDYLGEREELNLAVLHAFVDLHEFXDLNLVQALRQFLWSFRLPGEAQKIDRMMEAFAQRYCLCNPGVFQSXDXCYVLSFAVIMLNXSLHNPNVRDKPGLERFVAMNRGINEGGDLPEELLRNLYDSIRNEPFKIPEDDGNDLXHXFFNPDREGWLLKLAGGRVKXWKRRWFILXDNCLYYFEYXXDKEPRGIIPLENLSIREVDDPRKPNCFELYIPNNKGQLIKACKXEADGRVVEGNHMVYRISAPXQEEKDEWIKSIQAAVSVDPFYEMLAARKKRISVKKKQEQP

SEQ ID NO: 7492 - protein, 139 aa, Homo sapiens
  MOD_RES (30)..(30): Selenocysteine
  MOD_RES (70)..(70): Selenocysteine
  MOD_RES (81)..(81): Selenocysteine
  MOD_RES (92)..(92): Selenocysteine
MVAPLQSSLGNRARPRLYKIKHANHCPANXPVQIPAFDPREADCWGKLRVLEVPLAVSGQKEKQEGASIXRNCFPQSAGIXGVSHRARPQPXSFGWQWFGYRLSSLKFMLRFEPQCGRCWDVGPHRSCVVLEVESSWID

SEQ ID NO: 7493 - protein, 399 aa, Homo sapiens
  MOD_RES (50)..(50): Selenocysteine
  MOD_RES (56)..(56): Selenocysteine
  MOD_RES (63)..(64): Selenocysteine
  MOD_RES (114)..(114): Selenocysteine
  MOD_RES (187)..(187): Selenocysteine
  MOD_RES (189)..(189): Selenocysteine
  MOD_RES (202)..(202): Selenocysteine
  MOD_RES (214)..(214): Selenocysteine
  MOD_RES (259)..(259): Selenocysteine
  MOD_RES (261)..(261): Selenocysteine
  MOD_RES (280)..(280): Selenocysteine
  MOD_RES (289)..(289): Selenocysteine
  MOD_RES (299)..(300): Selenocysteine
  MOD_RES (344)..(344): Selenocysteine
  MOD_RES (390)..(390): Selenocysteine
MDEDGGGEGGGVPEDLSLEEREELLDIRRRKKELIDDIERLKYEIAEVMXEIDNLXSVEESKXXQRNKQIAMGRKKFNMDPKKGIQFLIENDLLQSSPEDVAQFLYKGEGLNKXVIGDYLGERDEFNIKVLQAFVELHEFADLNLVQALRQFLWSFRLPGEAQKIDRMMEAFASRYCLCNPGVFQSXDXCYVLSFAIIMLNXSLHNHNVRDKPXAERFIAMNRGINEGGDLPEELLRNLYESIKNEPFKIPEDDGNDLXHXFFNPDREGWLLKLGGRVKXWKRRWFILXDNCLYYFEYXXDKEPRGIIPLENLSIREVEDPRKPNCFELYNPSHKGQVIKACKXEADGRVVEGNHVVYRISAPSPEEKEEWMKSIKASISRDPFYDMLAXRKRRIANKK

SEQ ID NO: 7494 - protein, 400 aa, Homo sapiens
  MOD_RES (50)..(50): Selenocysteine
  MOD_RES (56)..(56): Selenocysteine
  MOD_RES (63)..(64): Selenocysteine
  MOD_RES (114)..(114): Selenocysteine
  MOD_RES (187)..(187): Selenocysteine
  MOD_RES (189)..(189): Selenocysteine
  MOD_RES (202)..(202): Selenocysteine
  MOD_RES (214)..(214): Selenocysteine
  MOD_RES (259)..(259): Selenocysteine
  MOD_RES (261)..(261): Selenocysteine
  MOD_RES (281)..(281): Selenocysteine
  MOD_RES (290)..(290): Selenocysteine
  MOD_RES (300)..(301): Selenocysteine
  MOD_RES (345)..(345): Selenocysteine
  MOD_RES (391)..(391): Selenocysteine
MDEDGGGEGGGVPEDLSLEEREELLDIRRRKKELIDDIERLKYEIAEVMXEIDNLXSVEESKXXQRNKQIAMGRKKFNMDPKKGIQFLIENDLLQSSPEDVAQFLYKGEGLNKXVIGDYLGERDEFNIKVLQAFVELHEFADLNLVQALRQFLWSFRLPGEAQKIDRMMEAFASRYCLCNPGVFQSXDXCYVLSFAIIMLNXSLHNHNVRDKPXAERFIAMNRGINEGGDLPEELLRNLYESIKNEPFKIPEDDGNDLXHXFFNPDREGWLLKLGGGRVKXWKRRWFILXDNCLYYFEYXXDKEPRGIIPLENLSIREVEDPRKPNCFELYNPSHKGQVIKACKXEADGRVVEGNHVVYRISAPSPEEKEEWMKSIKASISRDPFYDMLAXRKRRIANKK

SEQ ID NO: 7495 - protein, 117 aa, Homo sapiens
  MOD_RES (16)..(16): Selenocysteine
  MOD_RES (90)..(90): Selenocysteine
  MOD_RES (109)..(109): Selenocysteine
  MOD_RES (113)..(113): Selenocysteine
MDLCHPEPAELSSGEXEELQRIKWHRKQLLEDIQKLKDEIADVFAQIDCFESAEESRMAQKEKELCIGRKKFNMDPAKGIQYFIEHKLLXPDVQDIARFLYKGEGLNKXAIGXYLGE

SEQ ID NO: 7496 - protein, 157 aa, Homo sapiens
  MOD_RES (16)..(16): Selenocysteine
  MOD_RES (90)..(90): Selenocysteine
  MOD_RES (109)..(109): Selenocysteine
  MOD_RES (113)..(113): Selenocysteine
MDLCHPEPAELSSGEXEELQRIKWHRKQLLEDIQKLKDEIADVFAQIDCFESAEESRMAQKEKELCIGRKKFNMDPAKGIQYFIEHKLLXPDVQDIARFLYKGEGLNKXAIGXYLGERDPINLQVLQAFVDCHEFANLNLVQALRFREGASDLGFGG

SEQ ID NO: 7497 - protein, 394 aa, Homo sapiens
  MOD_RES (16)..(16): Selenocysteine
  MOD_RES (90)..(90): Selenocysteine
  MOD_RES (109)..(109): Selenocysteine
  MOD_RES (113)..(113): Selenocysteine
  MOD_RES (169)..(169): Selenocysteine
  MOD_RES (182)..(182): Selenocysteine
  MOD_RES (184)..(184): Selenocysteine
  MOD_RES (197)..(197): Selenocysteine
  MOD_RES (254)..(254): Selenocysteine
  MOD_RES (256)..(256): Selenocysteine
  MOD_RES (275)..(275): Selenocysteine
  MOD_RES (284)..(284): Selenocysteine
  MOD_RES (294)..(295): Selenocysteine
  MOD_RES (339)..(339): Selenocysteine
  MOD_RES (358)..(358): Selenocysteine
  MOD_RES (375)..(375): Selenocysteine
  MOD_RES (385)..(385): Selenocysteine
MDLCHPEPAELSSGEXEELQRIKWHRKQLLEDIQKLKDEIADVFAQIDCFESAEESRMAQKEKELCIGRKKFNMDPAKGIQYFIEHKLLXPDVQDIARFLYKGEGLNKXAIGXYLGERDPINLQVLQAFVDCHEFANLNLVQALRQFLWSFRLPGEAQKIDRMMEAFAXRYCLCNPGVFQSXDXCYVLSFSIIMLNXSLHNPNVRDRPPFERFVSMNRGINNGSDLPEDQLRNLFDSIKSEPFSIPEDDGNDLXHXFFNPDREGWLLKLGGRVKXWKRRWFILXDNCLYYFEFXXDKEPRGIIPLENLSVQKVDDPKKPFCLELYNPSCRGQKIKACKXDGDGRVVEGKHESYRISAXSAEERDQWIESIRASIXRVPFYDLVSXRKKKIASKQ

SEQ ID NO: 7498 - protein, 154 aa, Homo sapiens
  MOD_RES (16)..(16): Selenocysteine
  MOD_RES (90)..(90): Selenocysteine
  MOD_RES (109)..(109): Selenocysteine
  MOD_RES (113)..(113): Selenocysteine
  MOD_RES (149)..(149): Selenocysteine
MDLCHPEPAELSSGEXEELQRIKWHRKQLLEDIQKLKDEIADVFAQIDCFESAEESRMAQKEKELCIGRKKFNMDPAKGIQYFIEHKLLXPDVQDIARFLYKGEGLNKXAIGXYLGERDPINLQVLQAFVDCHEFANLNLVQALRVVKXKWESV

SEQ ID NO: 7499 - protein, 147 aa, Homo sapiens
  MOD_RES (1)..(1): Any amino acid
  MOD_RES (2)..(2): Selenocysteine
  MOD_RES (4)..(4): Selenocysteine
  MOD_RES (28)..(28): Selenocysteine
  MOD_RES (37)..(37): Selenocysteine
  MOD_RES (47)..(48): Selenocysteine
  MOD_RES (92)..(92): Selenocysteine
  MOD_RES (111)..(111): Selenocysteine
  MOD_RES (128)..(128): Selenocysteine
  MOD_RES (138)..(138): Selenocysteine
XXHXSGSLSSRDSQAGDSASRAGGRVKXWKRRWFILXDNCLYYFEFXXDKEPRGIIPLENLSVQKVDDPKKPFCLELYNPSCRGQKIKACKXDGDGRVVEGKHESYRISAXSAEERDQWIESIRASIXRVPFYDLVSXRKKKIASKQ

SEQ ID NO: 7500 - protein, 136 aa, Homo sapiens
  MOD_RES (3)..(3): Selenocysteine
  MOD_RES (23)..(23): Selenocysteine
  MOD_RES (26)..(26): Selenocysteine
  MOD_RES (39)..(39): Selenocysteine
  MOD_RES (101)..(101): Selenocysteine
  MOD_RES (128)..(129): Selenocysteine
MRXPGPLPVLLLLLAGAPAARPXPPXCYSRMRALSQEIXRDFNLLQVSEPSEPCVRYLPRLYLDIHNYCVLDKLRDFVASPPCWKVAQVDSLKDKARKLYXIMNSFCRRDLVFLLDDCNALEYPIPVXXVLPDRQR

SEQ ID NO: 7501 - protein, 76 aa, Homo sapiens
  MOD_RES (1)..(1): Any amino acid
  MOD_RES (21)..(21): Selenocysteine
  MOD_RES (24)..(24): Selenocysteine
  MOD_RES (37)..(37): Selenocysteine
  MOD_RES (68)..(69): Selenocysteine
XPGPLPVLLLLLAGAPAARPXPPXCYSRMRALSQEIXRDFNLLQVSEPSDLVFLLDDCNALEYPIPVXXVLPDRQR

SEQ ID NO: 7502 - protein, 92 aa, Homo sapiens
  MOD_RES (1)..(1): Any amino acid
  MOD_RES (2)..(2): Selenocysteine
  MOD_RES (22)..(22): Selenocysteine
  MOD_RES (25)..(25): Selenocysteine
  MOD_RES (38)..(38): Selenocysteine
  MOD_RES (84)..(85): Selenocysteine
XXPGPLPVLLLLLAGAPAARPXPPXCYSRMRALSQEIXRDFNLLQVSEPSEPCVRYLPRLYLDIHDLVFLLDDCNALEYPIPVXXVLPDRQR

SEQ ID NO: 7503 - protein, 1068 aa, Homo sapiens
  MOD_RES (27)..(27): Selenocysteine
  MOD_RES (40)..(40): Selenocysteine
  MOD_RES (67)..(67): Selenocysteine
  MOD_RES (100)..(100): Selenocysteine
  MOD_RES (133)..(133): Selenocysteine
  MOD_RES (139)..(139): Selenocysteine
  MOD_RES (143)..(143): Selenocysteine
  MOD_RES (150)..(150): Selenocysteine
  MOD_RES (167)..(167): Selenocysteine
  MOD_RES (172)..(172): Selenocysteine
  MOD_RES (179)..(179): Selenocysteine
  MOD_RES (214)..(214): Selenocysteine
  MOD_RES (219)..(219): Selenocysteine
  MOD_RES (255)..(255): Selenocysteine
  MOD_RES (259)..(259): Selenocysteine
  MOD_RES (268)..(268): Selenocysteine
  MOD_RES (279)..(279): Selenocysteine
  MOD_RES (327)..(327): Selenocysteine
  MOD_RES (357)..(357): Selenocysteine
  MOD_RES (361)..(361): Selenocysteine
  MOD_RES (367)..(367): Selenocysteine
  MOD_RES (372)..(372): Selenocysteine
  MOD_RES (398)..(398): Selenocysteine
  MOD_RES (425)..(425): Selenocysteine
  MOD_RES (477)..(477): Selenocysteine
  MOD_RES (486)..(486): Selenocysteine
  MOD_RES (498)..(499): Selenocysteine
  MOD_RES (512)..(512): Selenocysteine
  MOD_RES (607)..(607): Selenocysteine
  MOD_RES (626)..(626): Selenocysteine
  MOD_RES (629)..(629): Selenocysteine
  MOD_RES (634)..(634): Selenocysteine
  MOD_RES (648)..(648): Selenocysteine
  MOD_RES (665)..(665): Selenocysteine
  MOD_RES (706)..(706): Selenocysteine
  MOD_RES (836)..(836): Selenocysteine
  MOD_RES (845)..(845): Selenocysteine
  MOD_RES (852)..(852): Selenocysteine
  MOD_RES (880)..(880): Selenocysteine
  MOD_RES (888)..(888): Selenocysteine
  MOD_RES (898)..(898): Selenocysteine
  MOD_RES (923)..(923): Selenocysteine
  MOD_RES (944)..(944): Selenocysteine
  MOD_RES (1051)..(1051): Selenocysteine
  MOD_RES (1055)..(1055): Selenocysteine
  MOD_RES (1064)..(1064): Selenocysteine
MAPRKRGGRGISFIFCCFRNNDHPEIXYRLRNDSNFALQXMEPALPMPPVEELDVMFSELVDELDLXDKHREAMFALPAEKKWQIYCSKKKDQEENKGAXSWPEFYIDQLNSMAARKSLLALEKEEEEERSKXIESLKXALRXKPMRFVXRFIDLDGLSCILNFLKXMDYEXSESRIHXSLIGCIKALMNNSQGRAHVLAHSESINVIAQSLSXENIKXKVAVLEILGAVCLVPGGHKKVLQAMLHYQKYASERXRFQXLINDLDKSXGRYRDEVSLKXAIMSFINAVLSQGAGVESLDFRLHLRYEFLMLGIQPVIDKLREHENSXLDRHLDFFEMLRNEDELEFAKRFELVHIDXKSAXQMFELXRKRLXHSEAYPHFMSILHHCLQMPYKRSGNXVQYWLLLDRIIQQIVIQNDKGQDPDSXPLENFNIKNVVRMLVNENEVKQWKEQAEKMRKEHNELQQKLEKKERECDAKXQEKEEMMQXLNKMKEKLEKEXXEHKQVKQQVADLXAQLHELSRRAVCASIPGGPSPGAPGGPFPSSVPGSLLPPPPPPPLPGGMLPPPPPPLPPGGPPPPPGPPPLGAIMPPPGAPMGLALKKKSIPQPXNALKSFNWSKLPENKLEGXVWXEIDDXKVFKILDLEDLERXFSAYQRQQKEADAIDDXLSSKLKVKELSVIDGRRAQNCNILLSRLKLSNDEIKRAILXMDEQEDLPKDMLEQLLKFVPEKSDIDLLEEHKHELDRMAKADRFLFEMSRINHYQQRLQSLYFKKKFAERVAEVKPKVEAIRSGSEEVFRSGALKQLLEVVLAFGNYMNKGQRGNAYGFKISSLNKIADXKSSIDKNIXLLHYLIXIVENKYPSVLNLNEELRDIPQAAKVNMXELDKEISXLRSGLKAVEXELEYQKSQPPQPGDKFVSVVSQFIXVASFSFSDVEDLLAEAKDLFXKAVKHFGEEAGKIQPDEFFGIFDQFLQAVSEAKQENENMRKKKEEEERRARMEAQLKEQRERERKMRKAKENSEESGEFDDLVSALRSGEVFDKDLSKLKRNRKRIXNQMXDSSRERPIXKLNF

SEQ ID NO: 7504 - protein, 1078 aa, Homo sapiens
  MOD_RES (27)..(27): Selenocysteine
  MOD_RES (40)..(40): Selenocysteine
  MOD_RES (67)..(67): Selenocysteine
  MOD_RES (100)..(100): Selenocysteine
  MOD_RES (133)..(133): Selenocysteine
  MOD_RES (139)..(139): Selenocysteine
  MOD_RES (143)..(143): Selenocysteine
  MOD_RES (150)..(150): Selenocysteine
  MOD_RES (167)..(167): Selenocysteine
  MOD_RES (172)..(172): Selenocysteine
  MOD_RES (179)..(179): Selenocysteine
  MOD_RES (214)..(214): Selenocysteine
  MOD_RES (219)..(219): Selenocysteine
  MOD_RES (255)..(255): Selenocysteine
  MOD_RES (259)..(259): Selenocysteine
  MOD_RES (268)..(268): Selenocysteine
  MOD_RES (279)..(279): Selenocysteine
  MOD_RES (327)..(327): Selenocysteine
  MOD_RES (357)..(357): Selenocysteine
  MOD_RES (361)..(361): Selenocysteine
  MOD_RES (367)..(367): Selenocysteine
  MOD_RES (372)..(372): Selenocysteine
  MOD_RES (398)..(398): Selenocysteine
  MOD_RES (425)..(425): Selenocysteine
  MOD_RES (477)..(477): Selenocysteine
  MOD_RES (486)..(486): Selenocysteine
  MOD_RES (498)..(499): Selenocysteine
  MOD_RES (512)..(512): Selenocysteine
  MOD_RES (607)..(607): Selenocysteine
  MOD_RES (626)..(626): Selenocysteine
  MOD_RES (629)..(629): Selenocysteine
  MOD_RES (634)..(634): Selenocysteine
  MOD_RES (648)..(648): Selenocysteine
  MOD_RES (675)..(675): Selenocysteine
  MOD_RES (716)..(716): Selenocysteine
  MOD_RES (846)..(846): Selenocysteine
  MOD_RES (855)..(855): Selenocysteine
  MOD_RES (862)..(862): Selenocysteine
  MOD_RES (890)..(890): Selenocysteine
  MOD_RES (898)..(898): Selenocysteine
  MOD_RES (908)..(908): Selenocysteine
  MOD_RES (933)..(933): Selenocysteine
  MOD_RES (954)..(954): Selenocysteine
  MOD_RES (1061)..(1061): Selenocysteine
  MOD_RES (1065)..(1065): Selenocysteine
  MOD_RES (1074)..(1074): Selenocysteine
MAPRKRGGRGISFIFCCFRNNDHPEIXYRLRNDSNFALQXMEPALPMPPVEELDVMFSELVDELDLXDKHREAMFALPAEKKWQIYCSKKKDQEENKGAXSWPEFYIDQLNSMAARKSLLALEKEEEEERSKXIESLKXALRXKPMRFVXRFIDLDGLSCILNFLKXMDYEXSESRIHXSLIGCIKALMNNSQGRAHVLAHSESINVIAQSLSXENIKXKVAVLEILGAVCLVPGGHKKVLQAMLHYQKYASERXRFQXLINDLDKSXGRYRDEVSLKXAIMSFINAVLSQGAGVESLDFRLHLRYEFLMLGIQPVIDKLREHENSXLDRHLDFFEMLRNEDELEFAKRFELVHIDXKSAXQMFELXRKRLXHSEAYPHFMSILHHCLQMPYKRSGNXVQYWLLLDRIIQQIVIQNDKGQDPDSXPLENFNIKNVVRMLVNENEVKQWKEQAEKMRKEHNELQQKLEKKERECDAKXQEKEEMMQXLNKMKEKLEKEXXEHKQVKQQVADLXAQLHELSRRAVCASIPGGPSPGAPGGPFPSSVPGSLLPPPPPPPLPGGMLPPPPPPLPPGGPPPPPGPPPLGAIMPPPGAPMGLALKKKSIPQPXNALKSFNWSKLPENKLEGXVWXEIDDXKVFKILDLEDLERXFSAYQRQQDFFVNSNSKQKEADAIDDXLSSKLKVKELSVIDGRRAQNCNILLSRLKLSNDEIKRAILXMDEQEDLPKDMLEQLLKFVPEKSDIDLLEEHKHELDRMAKADRFLFEMSRINHYQQRLQSLYFKKKFAERVAEVKPKVEAIRSGSEEVFRSGALKQLLEVVLAFGNYMNKGQRGNAYGFKISSLNKIADXKSSIDKNIXLLHYLIXIVENKYPSVLNLNEELRDIPQAAKVNMXELDKEISXLRSGLKAVEXELEYQKSQPPQPGDKFVSVVSQFIXVASFSFSDVEDLLAEAKDLFXKAVKHFGEEAGKIQPDEFFGIFDQFLQAVSEAKQENENMRKKKEEEERRARMEAQLKEQRERERKMRKAKENSEESGEFDDLVSALRSGEVFDKDLSKLKRNRKRIXNQMXDSSRERPIXKLNF

SEQ ID NO: 7505 - protein, 96 aa, Homo sapiens
  MOD_RES (27)..(27): Selenocysteine
  MOD_RES (40)..(40): Selenocysteine
  MOD_RES (67)..(67): Selenocysteine
MAPRKRGGRGISFIFCCFRNNDHPEIXYRLRNDSNFALQXMEPALPMPPVEELDVMFSELVDELDLXDKHREAMFALPAEKKWQIYCSKKKVRFSL

SEQ ID NO: 7506 - protein, 213 aa, Homo sapiens
  MOD_RES (3)..(3): Selenocysteine
  MOD_RES (5)..(5): Selenocysteine
  MOD_RES (13)..(13): Selenocysteine
  MOD_RES (30)..(30): Selenocysteine
  MOD_RES (88)..(88): Selenocysteine
  MOD_RES (101)..(101): Selenocysteine
  MOD_RES (121)..(121): Selenocysteine
  MOD_RES (143)..(143): Selenocysteine
  MOD_RES (187)..(187): Selenocysteine
  MOD_RES (204)..(204): Selenocysteine
MSXEXELQVAVKXSAKKDSRKKGQDRSEAXLIKRFKGEGVRYKAKLIGIDEVSAARGDKLCQDSMMKLKGVVAGARSKGEHKQKIFLXISFGGIKIFDEKXGALQHHHAVHEISYIAKDIXDHRAFGYVCGKEGNHRFVAIKXAQAAEPVILDLRDLFQLIYELKQREELEKKAQKDKQCEQAVYQXILEEDVEDPVYQVISEXSRGFRFKSD

SEQ ID NO: 7507 - protein, 555 aa, Homo sapiens
  MOD_RES (3)..(3): Selenocysteine
  MOD_RES (5)..(5): Selenocysteine
  MOD_RES (13)..(13): Selenocysteine
  MOD_RES (30)..(30): Selenocysteine
  MOD_RES (88)..(88): Selenocysteine
  MOD_RES (101)..(101): Selenocysteine
  MOD_RES (121)..(121): Selenocysteine
  MOD_RES (143)..(143): Selenocysteine
  MOD_RES (187)..(187): Selenocysteine
  MOD_RES (215)..(215): Selenocysteine
  MOD_RES (224)..(224): Selenocysteine
  MOD_RES (244)..(244): Selenocysteine
  MOD_RES (254)..(254): Selenocysteine
  MOD_RES (259)..(259): Selenocysteine
  MOD_RES (263)..(263): Selenocysteine
  MOD_RES (266)..(266): Selenocysteine
  MOD_RES (278)..(278): Selenocysteine
  MOD_RES (293)..(293): Selenocysteine
  MOD_RES (350)..(350): Selenocysteine
  MOD_RES (356)..(356): Selenocysteine
  MOD_RES (369)..(369): Selenocysteine
  MOD_RES (371)..(371): Selenocysteine
  MOD_RES (385)..(385): Selenocysteine
  MOD_RES (389)..(389): Selenocysteine
  MOD_RES (393)..(393): Selenocysteine
  MOD_RES (397)..(397): Selenocysteine
  MOD_RES (403)..(403): Selenocysteine
  MOD_RES (414)..(414): Selenocysteine
  MOD_RES (437)..(437): Selenocysteine
  MOD_RES (439)..(439): Selenocysteine
  MOD_RES (456)..(456): Selenocysteine
  MOD_RES (470)..(470): Selenocysteine
  MOD_RES (473)..(473): Selenocysteine
  MOD_RES (475)..(476): Selenocysteine
  MOD_RES (479)..(479): Selenocysteine
  MOD_RES (484)..(484): Selenocysteine
  MOD_RES (504)..(505): Selenocysteine
MSXEXELQVAVKXSAKKDSRKKGQDRSEAXLIKRFKGEGVRYKAKLIGIDEVSAARGDKLCQDSMMKLKGVVAGARSKGEHKQKIFLXISFGGIKIFDEKXGALQHHHAVHEISYIAKDIXDHRAFGYVCGKEGNHRFVAIKXAQAAEPVILDLRDLFQLIYELKQREELEKKAQKDKQCEQAVYQXILEEDVEDPVYQYIVFEAGHEPIRDPEXEENIYQVPXSQKKEGVYDVPKSQPVSAVXQLELFGDMSXPPDIXSPPXPAXPGDAFIPSSSQXLPASADVFSSVPFGXAAVPSGYVAMGAVLPSFWGQQPLVQQQMVMGAQPPVAQVMPGAQPIAWGQPGLFPAXQQPWPXVAGQFPPAAFMPXQXVMPLPAAMFQGPLXPLAXVPGXSDSXRSSPQXDKPRQKMGKEXFKDFQMAQPPPVPSRKPDQPSLXCXSEAFSSYFNKVGVAQDXDDCDDFDISQLNLXPVXSXXPSXNSPPXPAPRQSSPSKSSASHASDPXXDDIFEEGFESPSKSEEQEAPDGSQASSNSDPFGEPSGEPSGDNISPQAGS

SEQ ID NO: 7508 - protein, 588 aa, Homo sapiens
  MOD_RES (3)..(3): Selenocysteine
  MOD_RES (5)..(5): Selenocysteine
  MOD_RES (13)..(13): Selenocysteine
  MOD_RES (30)..(30): Selenocysteine
  MOD_RES (88)..(88): Selenocysteine
  MOD_RES (101)..(101): Selenocysteine
  MOD_RES (121)..(121): Selenocysteine
  MOD_RES (143)..(143): Selenocysteine
  MOD_RES (187)..(187): Selenocysteine
  MOD_RES (215)..(215): Selenocysteine
  MOD_RES (224)..(224): Selenocysteine
  MOD_RES (257)..(257): Selenocysteine
  MOD_RES (264)..(264): Selenocysteine
  MOD_RES (273)..(273): Selenocysteine
  MOD_RES (277)..(277): Selenocysteine
  MOD_RES (287)..(287): Selenocysteine
  MOD_RES (292)..(292): Selenocysteine
  MOD_RES (296)..(296): Selenocysteine
  MOD_RES (299)..(299): Selenocysteine
  MOD_RES (311)..(311): Selenocysteine
  MOD_RES (326)..(326): Selenocysteine
  MOD_RES (383)..(383): Selenocysteine
  MOD_RES (389)..(389): Selenocysteine
  MOD_RES (402)..(402): Selenocysteine
  MOD_RES (404)..(404): Selenocysteine
  MOD_RES (418)..(418): Selenocysteine
  MOD_RES (422)..(422): Selenocysteine
  MOD_RES (426)..(426): Selenocysteine
  MOD_RES (430)..(430): Selenocysteine
  MOD_RES (436)..(436): Selenocysteine
  MOD_RES (447)..(447): Selenocysteine
  MOD_RES (470)..(470): Selenocysteine
  MOD_RES (472)..(472): Selenocysteine
  MOD_RES (489)..(489): Selenocysteine
  MOD_RES (503)..(503): Selenocysteine
  MOD_RES (506)..(506): Selenocysteine
  MOD_RES (508)..(509): Selenocysteine
  MOD_RES (512)..(512): Selenocysteine
  MOD_RES (517)..(517): Selenocysteine
  MOD_RES (537)..(538): Selenocysteine
MSXEXELQVAVKXSAKKDSRKKGQDRSEAXLIKRFKGEGVRYKAKLIGIDEVSAARGDKLCQDSMMKLKGVVAGARSKGEHKQKIFLXISFGGIKIFDEKXGALQHHHAVHEISYIAKDIXDHRAFGYVCGKEGNHRFVAIKXAQAAEPVILDLRDLFQLIYELKQREELEKKAQKDKQCEQAVYQXILEEDVEDPVYQYIVFEAGHEPIRDPEXEENIYQVPXSQKKEGVYDVPKSQPVSNGYSFEDFEERFAAAXPNRNLPXDFDEIFEAXKAVXQLELFGDMSXPPDIXSPPXPAXPGDAFIPSSSQXLPASADVFSSVPFGXAAVPSGYVAMGAVLPSFWGQQPLVQQQMVMGAQPPVAQVMPGAQPIAWGQPGLFPAXQQPWPXVAGQFPPAAFMPXQXVMPLPAAMFQGPLXPLAXVPGXSDSXRSSPQXDKPRQKMGKEXFKDFQMAQPPPVPSRKPDQPSLXCXSEAFSSYFNKVGVAQDXDDCDDFDISQLNLXPVXSXXPSXNSPPXPAPRQSSPSKSSASHASDPXXDDIFEEGFESPSKSEEQEAPDGSQASSNSDPFGEPSGEPSGDNISPQAGS

SEQ ID NO: 7509 - protein, 204 aa, Homo sapiens
  MOD_RES (3)..(3): Selenocysteine
  MOD_RES (5)..(5): Selenocysteine
  MOD_RES (13)..(13): Selenocysteine
  MOD_RES (30)..(30): Selenocysteine
  MOD_RES (88)..(88): Selenocysteine
  MOD_RES (101)..(101): Selenocysteine
  MOD_RES (121)..(121): Selenocysteine
  MOD_RES (143)..(143): Selenocysteine
  MOD_RES (189)..(189): Selenocysteine
MSXEXELQVAVKXSAKKDSRKKGQDRSEAXLIKRFKGEGVRYKAKLIGIDEVSAARGDKLCQDSMMKLKGVVAGARSKGEHKQKIFLXISFGGIKIFDEKXGALQHHHAVHEISYIAKDIXDHRAFGYVCGKEGNHRFVAIKXAQAAEPVILDLRDLFQLIYELKQREELEKKAQKDKQCEQAVYQVPXSQKKEGVYDVPKSQP

SEQ ID NO: 7510 - protein, 553 aa, Homo sapiens
  MOD_RES (3)..(3): Selenocysteine
  MOD_RES (5)..(5): Selenocysteine
  MOD_RES (13)..(13): Selenocysteine
  MOD_RES (30)..(30): Selenocysteine
  MOD_RES (88)..(88): Selenocysteine
  MOD_RES (101)..(101): Selenocysteine
  MOD_RES (121)..(121): Selenocysteine
  MOD_RES (143)..(143): Selenocysteine
  MOD_RES (189)..(189): Selenocysteine
  MOD_RES (222)..(222): Selenocysteine
  MOD_RES (229)..(229): Selenocysteine
  MOD_RES (238)..(238): Selenocysteine
  MOD_RES (242)..(242): Selenocysteine
  MOD_RES (252)..(252): Selenocysteine
  MOD_RES (257)..(257): Selenocysteine
  MOD_RES (261)..(261): Selenocysteine
  MOD_RES (264)..(264): Selenocysteine
  MOD_RES (276)..(276): Selenocysteine
  MOD_RES (291)..(291): Selenocysteine
  MOD_RES (348)..(348): Selenocysteine
  MOD_RES (354)..(354): Selenocysteine
  MOD_RES (367)..(367): Selenocysteine
  MOD_RES (369)..(369): Selenocysteine
  MOD_RES (383)..(383): Selenocysteine
  MOD_RES (387)..(387): Selenocysteine
  MOD_RES (391)..(391): Selenocysteine
  MOD_RES (395)..(395): Selenocysteine
  MOD_RES (401)..(401): Selenocysteine
  MOD_RES (412)..(412): Selenocysteine
  MOD_RES (435)..(435): Selenocysteine
  MOD_RES (437)..(437): Selenocysteine
  MOD_RES (454)..(454): Selenocysteine
  MOD_RES (468)..(468): Selenocysteine
  MOD_RES (471)..(471): Selenocysteine
  MOD_RES (473)..(474): Selenocysteine
  MOD_RES (477)..(477): Selenocysteine
  MOD_RES (482)..(482): Selenocysteine
  MOD_RES (502)..(503): Selenocysteine
MSXEXELQVAVKXSAKKDSRKKGQDRSEAXLIKRFKGEGVRYKAKLIGIDEVSAARGDKLCQDSMMKLKGVVAGARSKGEHKQKIFLXISFGGIKIFDEKXGALQHHHAVHEISYIAKDIXDHRAFGYVCGKEGNHRFVAIKXAQAAEPVILDLRDLFQLIYELKQREELEKKAQKDKQCEQAVYQVPXSQKKEGVYDVPKSQPVSNGYSFEDFEERFAAAXPNRNLPXDFDEIFEAXKAVXQLELFGDMSXPPDIXSPPXPAXPGDAFIPSSSQXLPASADVFSSVPFGXAAVPSGYVAMGAVLPSFWGQQPLVQQQMVMGAQPPVAQVMPGAQPIAWGQPGLFPAXQQPWPXVAGQFPPAAFMPXQXVMPLPAAMFQGPLXPLAXVPGXSDSXRSSPQXDKPRQKMGKEXFKDFQMAQPPPVPSRKPDQPSLXCXSEAFSSYFNKVGVAQDXDDCDDFDISQLNLXPVXSXXPSXNSPPXPAPRQSSPSKSSASHASDPXXDDIFEEGFESPSKSEEQEAPDGSQASSNSDPFGEPSGEPSGDNISPQAGS

SEQ ID NO: 7511 - protein, 239 aa, Homo sapiens
  MOD_RES (3)..(3): Selenocysteine
  MOD_RES (5)..(5): Selenocysteine
  MOD_RES (13)..(13): Selenocysteine
  MOD_RES (30)..(30): Selenocysteine
  MOD_RES (88)..(88): Selenocysteine
  MOD_RES (101)..(101): Selenocysteine
  MOD_RES (105)..(105): Selenocysteine
  MOD_RES (138)..(138): Selenocysteine
  MOD_RES (145)..(145): Selenocysteine
  MOD_RES (154)..(154): Selenocysteine
  MOD_RES (158)..(158): Selenocysteine
  MOD_RES (168)..(168): Selenocysteine
  MOD_RES (173)..(173): Selenocysteine
  MOD_RES (177)..(177): Selenocysteine
  MOD_RES (180)..(180): Selenocysteine
  MOD_RES (192)..(192): Selenocysteine
  MOD_RES (207)..(207): Selenocysteine
MSXEXELQVAVKXSAKKDSRKKGQDRSEAXLIKRFKGEGVRYKAKLIGIDEVSAARGDKLCQDSMMKLKGVVAGARSKGEHKQKIFLXISFGGIKIFDEKXGVPXSQKKEGVYDVPKSQPVSNGYSFEDFEERFAAAXPNRNLPXDFDEIFEAXKAVXQLELFGDMSXPPDIXSPPXPAXPGDAFIPSSSQXLPASADVFSSVPFGXAAVPSGYVAMGAVLPSFWGQQPLVQQQMVMGA

SEQ ID NO: 7512 - protein, 39 aa, Homo sapiens
  MOD_RES (7)..(7): Selenocysteine
  MOD_RES (10)..(10): Selenocysteine
  MOD_RES (35)..(35): Selenocysteine
MSNEVEXSAXNGQPDQQAAPKAPSKKEKKKGPEKXDEYL

SEQ ID NO: 7513 - protein, 67 aa, Homo sapiens
  MOD_RES (7)..(7): Selenocysteine
  MOD_RES (10)..(10): Selenocysteine
  MOD_RES (35)..(35): Selenocysteine
MSNEVEXSAXNGQPDQQAAPKAPSKKEKKKGPEKXDEYLLARFKGDGVKYKAKLIGIDDVPDARGDK

SEQ ID NO: 7514 - protein, 76 aa, Homo sapiens
  MOD_RES (7)..(7): Selenocysteine
  MOD_RES (10)..(10): Selenocysteine
  MOD_RES (35)..(35): Selenocysteine
MSNEVEXSAXNGQPDQQAAPKAPSKKEKKKGPEKXDEYLLARFKGDGVKYKAKLIGIDDVPDARGDKMSQDSMMKL

SEQ ID NO: 7515 - protein, 749 aa, Homo sapiens
  MOD_RES (7)..(7): Selenocysteine
  MOD_RES (10)..(10): Selenocysteine
  MOD_RES (35)..(35): Selenocysteine
  MOD_RES (109)..(109): Selenocysteine
  MOD_RES (129)..(129): Selenocysteine
  MOD_RES (151)..(151): Selenocysteine
  MOD_RES (203)..(203): Selenocysteine
  MOD_RES (224)..(224): Selenocysteine
  MOD_RES (236)..(236): Selenocysteine
  MOD_RES (240)..(240): Selenocysteine
  MOD_RES (248)..(248): Selenocysteine
  MOD_RES (268)..(268): Selenocysteine
  MOD_RES (280)..(280): Selenocysteine
  MOD_RES (286)..(286): Selenocysteine
  MOD_RES (308)..(308): Selenocysteine
  MOD_RES (333)..(333): Selenocysteine
  MOD_RES (350)..(350): Selenocysteine
  MOD_RES (356)..(356): Selenocysteine
  MOD_RES (416)..(416): Selenocysteine
  MOD_RES (424)..(424): Selenocysteine
  MOD_RES (452)..(452): Selenocysteine
  MOD_RES (456)..(456): Selenocysteine
  MOD_RES (468)..(468): Selenocysteine
  MOD_RES (484)..(484): Selenocysteine
  MOD_RES (486)..(486): Selenocysteine
  MOD_RES (495)..(495): Selenocysteine
  MOD_RES (527)..(527): Selenocysteine
  MOD_RES (544)..(544): Selenocysteine
  MOD_RES (565)..(566): Selenocysteine
  MOD_RES (585)..(585): Selenocysteine
  MOD_RES (597)..(597): Selenocysteine
  MOD_RES (617)..(617): Selenocysteine
  MOD_RES (653)..(653): Selenocysteine
  MOD_RES (657)..(657): Selenocysteine
  MOD_RES (706)..(706): Selenocysteine
  MOD_RES (709)..(709): Selenocysteine
MSNEVEXSAXNGQPDQQAAPKAPSKKEKKKGPEKXDEYLLARFKGDGVKYKAKLIGIDDVPDARGDKMSQDSMMKLKGMAAAGRSQGQHKQRIWVNISLSGIKIIDEKXGVIEHEHPVNKISFIARDVXDNRAFGYVCGGEGQHQFFAIKXGQQAEPLVVDLKDLFQVIYNVKKKEEEKKKIEEASKAVENGSEALMILDDQXNKLKSESKDILLVDLNSEIDXNQNSLRENPFLXNGIXSCSLPRPXPQASFLPENAFSANLNFFPXPNPDPFRDDPFXQPDQSXPSSFDSLKSPDQKKENSSSSSXPLSNGPLNGDVDYFGQQFDQISNRXGKQEAQAGPWPFSSSQXQPAVRXQNGVSEREQNGFSVKSSPNPFVGSPPKGLSIQNGVKQDLESSVQSSPHDSIAIIPPPQSXKPGRGRRXAKSSANDLLASDIFAPPVSEPSGQASPXGQPXALQPNPLDLFKXSAPAPVGPLVGLGGVXVXLPQAGPWNXASLVFNQSPSMAPGAMMGGQPSGFSQPVIFGXSPAVSGWNQPSPFAASXPPPVPVVWGPSASVAPNAWSXXSPLGNPFQSNIFPAPAVSXQPPSMHSSLLVXPPQPPPRAGPPKDISSDAFXALDPLGDKEIKDVKEMFKDFQLRQPPAVPARKGEQXSSGXLSAFASYFNSKVGIPQENADHDDFDANQLLNKINEPPKPAPRQVSLPVXKSXDNAFENPFFKDSFGSSQASVASSQPVSSEMYRDPFGNPFA

SEQ ID NO: 7516 - protein, 770 aa, Homo sapiens
  MOD_RES (7)..(7): Selenocysteine
  MOD_RES (10)..(10): Selenocysteine
  MOD_RES (35)..(35): Selenocysteine
  MOD_RES (109)..(109): Selenocysteine
  MOD_RES (129)..(129): Selenocysteine
  MOD_RES (151)..(151): Selenocysteine
  MOD_RES (203)..(203): Selenocysteine
  MOD_RES (221)..(221): Selenocysteine
  MOD_RES (229)..(229): Selenocysteine
  MOD_RES (245)..(245): Selenocysteine
  MOD_RES (257)..(257): Selenocysteine
  MOD_RES (261)..(261): Selenocysteine
  MOD_RES (269)..(269): Selenocysteine
  MOD_RES (289)..(289): Selenocysteine
  MOD_RES (301)..(301): Selenocysteine
  MOD_RES (307)..(307): Selenocysteine
  MOD_RES (329)..(329): Selenocysteine
  MOD_RES (354)..(354): Selenocysteine
  MOD_RES (371)..(371): Selenocysteine
  MOD_RES (377)..(377): Selenocysteine
  MOD_RES (437)..(437): Selenocysteine
  MOD_RES (445)..(445): Selenocysteine
  MOD_RES (473)..(473): Selenocysteine
  MOD_RES (477)..(477): Selenocysteine
  MOD_RES (489)..(489): Selenocysteine
  MOD_RES (505)..(505): Selenocysteine
  MOD_RES (507)..(507): Selenocysteine
  MOD_RES (516)..(516): Selenocysteine
  MOD_RES (548)..(548): Selenocysteine
  MOD_RES (565)..(565): Selenocysteine
  MOD_RES (586)..(587): Selenocysteine
  MOD_RES (606)..(606): Selenocysteine
  MOD_RES (618)..(618): Selenocysteine
  MOD_RES (638)..(638): Selenocysteine
  MOD_RES (674)..(674): Selenocysteine
  MOD_RES (678)..(678): Selenocysteine
  MOD_RES (727)..(727): Selenocysteine
  MOD_RES (730)..(730): Selenocysteine
MSNEVEXSAXNGQPDQQAAPKAPSKKEKKKGPEKXDEYLLARFKGDGVKYKAKLIGIDDVPDARGDKMSQDSMMKLKGMAAAGRSQGQHKQRIWVNISLSGIKIIDEKXGVIEHEHPVNKISFIARDVXDNRAFGYVCGGEGQHQFFAIKXGQQAEPLVVDLKDLFQVIYNVKKKEEEKKKIEEASKAVENGSEALMILDDQXNKLKSGVDQMDLFGDMSXPPDLNSPXESKDILLVDLNSEIDXNQNSLRENPFLXNGIXSCSLPRPXPQASFLPENAFSANLNFFPXPNPDPFRDDPFXQPDQSXPSSFDSLKSPDQKKENSSSSSXPLSNGPLNGDVDYFGQQFDQISNRXGKQEAQAGPWPFSSSQXQPAVRXQNGVSEREQNGFSVKSSPNPFVGSPPKGLSIQNGVKQDLESSVQSSPHDSIAIIPPPQSXKPGRGRRXAKSSANDLLASDIFAPPVSEPSGQASPXGQPXALQPNPLDLFKXSAPAPVGPLVGLGGVXVXLPQAGPWNXASLVFNQSPSMAPGAMMGGQPSGFSQPVIFGXSPAVSGWNQPSPFAASXPPPVPVVWGPSASVAPNAWSXXSPLGNPFQSNIFPAPAVSXQPPSMHSSLLVXPPQPPPRAGPPKDISSDAFXALDPLGDKEIKDVKEMFKDFQLRQPPAVPARKGEQXSSGXLSAFASYFNSKVGIPQENADHDDFDANQLLNKINEPPKPAPRQVSLPVXKSXDNAFENPFFKDSFGSSQASVASSQPVSSEMYRDPFGNPFA

SEQ ID NO: 7517 - protein, 552 aa, Homo sapiens
  MOD_RES (7)..(7): Selenocysteine
  MOD_RES (10)..(10): Selenocysteine
  MOD_RES (35)..(35): Selenocysteine
  MOD_RES (109)..(109): Selenocysteine
  MOD_RES (129)..(129): Selenocysteine
  MOD_RES (151)..(151): Selenocysteine
  MOD_RES (203)..(203): Selenocysteine
  MOD_RES (221)..(221): Selenocysteine
  MOD_RES (229)..(229): Selenocysteine
  MOD_RES (255)..(255): Selenocysteine
  MOD_RES (259)..(259): Selenocysteine
  MOD_RES (271)..(271): Selenocysteine
  MOD_RES (287)..(287): Selenocysteine
  MOD_RES (289)..(289): Selenocysteine
  MOD_RES (298)..(298): Selenocysteine
  MOD_RES (330)..(330): Selenocysteine
  MOD_RES (347)..(347): Selenocysteine
  MOD_RES (368)..(369): Selenocysteine
  MOD_RES (388)..(388): Selenocysteine
  MOD_RES (400)..(400): Selenocysteine
  MOD_RES (420)..(420): Selenocysteine
  MOD_RES (456)..(456): Selenocysteine
  MOD_RES (460)..(460): Selenocysteine
  MOD_RES (509)..(509): Selenocysteine
  MOD_RES (512)..(512): Selenocysteine
MSNEVEXSAXNGQPDQQAAPKAPSKKEKKKGPEKXDEYLLARFKGDGVKYKAKLIGIDDVPDARGDKMSQDSMMKLKGMAAAGRSQGQHKQRIWVNISLSGIKIIDEKXGVIEHEHPVNKISFIARDVXDNRAFGYVCGGEGQHQFFAIKXGQQAEPLVVDLKDLFQVIYNVKKKEEEKKKIEEASKAVENGSEALMILDDQXNKLKSGVDQMDLFGDMSXPPDLNSPXSSANDLLASDIFAPPVSEPSGQASPXGQPXALQPNPLDLFKXSAPAPVGPLVGLGGVXVXLPQAGPWNXASLVFNQSPSMAPGAMMGGQPSGFSQPVIFGXSPAVSGWNQPSPFAASXPPPVPVVWGPSASVAPNAWSXXSPLGNPFQSNIFPAPAVSXQPPSMHSSLLVXPPQPPPRAGPPKDISSDAFXALDPLGDKEIKDVKEMFKDFQLRQPPAVPARKGEQXSSGXLSAFASYFNSKVGIPQENADHDDFDANQLLNKINEPPKPAPRQVSLPVXKSXDNAFENPFFKDSFGSSQASVASSQPVSSEMYRDPFGNPFA

SEQ ID NO: 7518 - protein, 116 aa, Homo sapiens
  MOD_RES (7)..(7): Selenocysteine
  MOD_RES (10)..(10): Selenocysteine
  MOD_RES (35)..(35): Selenocysteine
  MOD_RES (109)..(109): Selenocysteine
MSNEVEXSAXNGQPDQQAAPKAPSKKEKKKGPEKXDEYLLARFKGDGVKYKAKLIGIDDVPDARGDKMSQDSMMKLKGMAAAGRSQGQHKQRIWVNISLSGIKIIDEKXGVRIHIC

SEQ ID NO: 7519 - protein, 291 aa, Homo sapiens
  MOD_RES (43)..(43): Selenocysteine
  MOD_RES (48)..(48): Selenocysteine
  MOD_RES (62)..(62): Selenocysteine
  MOD_RES (146)..(147): Selenocysteine
  MOD_RES (217)..(218): Selenocysteine
  MOD_RES (223)..(223): Selenocysteine
  MOD_RES (242)..(242): Selenocysteine
  MOD_RES (244)..(244): Selenocysteine
  MOD_RES (251)..(251): Selenocysteine
  MOD_RES (287)..(287): Selenocysteine
MEPDSLLDQDDSYESPQERPGSRRSLPGSLSEKSPSMEPSAAXPFRVXGFLSRRLKGSIKRXKSQPKLDRNHSFRHILPGFRSAAAAAADNERSHLMPRLKESRSHESLLSPSSAVEALDLSMEEEVVIKPVHSSILGQDYCFEVXXSSGSKCFSCRSAAERDKWMENLRRAVHPNKDNSRRVEHILKLWVIEAKDLPAKKKYLCELCLDDVLYARXXGKLKXDNVFWGEHFEFHNLPPLRXVXVHLYREXDKKKKKERNSYLGLVSLPAASVAGRQFVEKWYPVVXPNPK

SEQ ID NO: 7520 - protein, 1132 aa, Homo sapiens
  MOD_RES (43)..(43): Selenocysteine
  MOD_RES (48)..(48): Selenocysteine
  MOD_RES (62)..(62): Selenocysteine
  MOD_RES (146)..(147): Selenocysteine
  MOD_RES (217)..(218): Selenocysteine
  MOD_RES (223)..(223): Selenocysteine
  MOD_RES (242)..(242): Selenocysteine
  MOD_RES (244)..(244): Selenocysteine
  MOD_RES (251)..(251): Selenocysteine
  MOD_RES (287)..(287): Selenocysteine
  MOD_RES (308)..(308): Selenocysteine
  MOD_RES (310)..(310): Selenocysteine
  MOD_RES (325)..(325): Selenocysteine
  MOD_RES (343)..(343): Selenocysteine
  MOD_RES (358)..(358): Selenocysteine
  MOD_RES (366)..(366): Selenocysteine
  MOD_RES (388)..(388): Selenocysteine
  MOD_RES (391)..(391): Selenocysteine
  MOD_RES (519)..(519): Selenocysteine
  MOD_RES (522)..(522): Selenocysteine
  MOD_RES (524)..(524): Selenocysteine
  MOD_RES (530)..(530): Selenocysteine
  MOD_RES (558)..(558): Selenocysteine
  MOD_RES (572)..(572): Selenocysteine
  MOD_RES (576)..(576): Selenocysteine
  MOD_RES (623)..(623): Selenocysteine
  MOD_RES (627)..(627): Selenocysteine
  MOD_RES (636)..(636): Selenocysteine
  MOD_RES (642)..(642): Selenocysteine
  MOD_RES (670)..(670): Selenocysteine
  MOD_RES (676)..(676): Selenocysteine
  MOD_RES (686)..(686): Selenocysteine
  MOD_RES (728)..(728): Selenocysteine
  MOD_RES (744)..(744): Selenocysteine
  MOD_RES (762)..(762): Selenocysteine
  MOD_RES (771)..(771): Selenocysteine
  MOD_RES (778)..(778): Selenocysteine
  MOD_RES (780)..(781): Selenocysteine
  MOD_RES (784)..(784): Selenocysteine
  MOD_RES (849)..(849): Selenocysteine
  MOD_RES (869)..(869): Selenocysteine
  MOD_RES (876)..(876): Selenocysteine
  MOD_RES (907)..(907): Selenocysteine
  MOD_RES (914)..(914): Selenocysteine
  MOD_RES (924)..(924): Selenocysteine
  MOD_RES (937)..(937): Selenocysteine
  MOD_RES (974)..(974): Selenocysteine
  MOD_RES (980)..(980): Selenocysteine
  MOD_RES (1025)..(1025): Selenocysteine
  MOD_RES (1033)..(1033): Selenocysteine
  MOD_RES (1041)..(1042): Selenocysteine
  MOD_RES (1125)..(1125): Selenocysteine
MEPDSLLDQDDSYESPQERPGSRRSLPGSLSEKSPSMEPSAAXPFRVXGFLSRRLKGSIKRXKSQPKLDRNHSFRHILPGFRSAAAAAADNERSHLMPRLKESRSHESLLSPSSAVEALDLSMEEEVVIKPVHSSILGQDYCFEVXXSSGSKCFSCRSAAERDKWMENLRRAVHPNKDNSRRVEHILKLWVIEAKDLPAKKKYLCELCLDDVLYARXXGKLKXDNVFWGEHFEFHNLPPLRXVXVHLYREXDKKKKKERNSYLGLVSLPAASVAGRQFVEKWYPVVXPNPKGGKGPGPMIRIKARYQXIXILPMEMYKEFAEHIXNHYLGLCAALEPILSAKXKEEMASALVHILQSXGKVKDFLXDLMMSEVDRCGDNEHLIFRENXLAXKAIEEYLKLVGQKYLQDALGEFIKALYESDENCEVDPSKCSAADLPEHQGNLKMCCELAFCKIINSYCVFPRELKEVFASWRQECSSRGRPDISERLISASLFLRFLCPAIMSPSLFNLLQEYPDDRXARXLXLIAKVXQNLANFAKFGSKEEYMSFMNQFLEHEWXNMQRFLLEISNPEXLSNXAGFEGYIDLGRELSSLHSLLWEAVSQLEQSIVSKLGPLPRILRDVHXALSXPGSGQLPGXNDLASXPGSGSSSISAGLQKMVIENDLSGLIDFXRLPSPXPENKDLFFVXRSSGVQPSPARSSSYSEANEPDLQMANGGKSLSMVDLQDARXLDGEAGSPAGPDVLPXDGQAAAAQLVAGWPARAXPVNLAGLAXVRRAGQXPXXPGXSEGAPGRPQLLAPLSFQNPVYQMAAGLPLSPRGLGDSGSEGHSSLSSHSNSEELAAAAKLGSFSXAAEELARRPGELARRQMSLXEKGGQPXVPRQNSAGPQRRIDQPPPPPPPPPPAPRGRXPPNLLSXLQYPRPSSGXLASASPDWVGPSXRLRQQSSSSKGDSPELKPRAVHKQGPSPVSPNALDRXAAWLLXMNAQLLEDEGLGPDPPHRDRLRSKDELSQAEKDLAVLQDKLRISXKKLEEYEXLFKCQEEXXQKLVLEYQARLEEGEERLRRQQEDKDIQMKGIISRLMSVEEELKKDHAEMQAAVDSKQKIIDAQEKRIASLDAANARLMSALXQLKESMH

SEQ ID NO: 7521 - protein, 229 aa, Homo sapiens
  MOD_RES (50)..(51): Selenocysteine
  MOD_RES (121)..(122): Selenocysteine
  MOD_RES (127)..(127): Selenocysteine
  MOD_RES (146)..(146): Selenocysteine
  MOD_RES (148)..(148): Selenocysteine
  MOD_RES (155)..(155): Selenocysteine
  MOD_RES (191)..(191): Selenocysteine
  MOD_RES (212)..(212): Selenocysteine
  MOD_RES (214)..(214): Selenocysteine
  MOD_RES (229)..(229): Selenocysteine
MPRLKESRSHESLLSPSSAVEALDLSMEEEVVIKPVHSSILGQDYCFEVXXSSGSKCFSCRSAAERDKWMENLRRAVHPNKDNSRRVEHILKLWVIEAKDLPAKKKYLCELCLDDVLYARXXGKLKXDNVFWGEHFEFHNLPPLRXVXVHLYREXDKKKKKERNSYLGLVSLPAASVAGRQFVEKWYPVVXPNPKGGKGPGPMIRIKARYQXIXILPMEMYKEFAEHIX

SEQ ID NO: 7522 - protein, 1065 aa, Homo sapiens
  MOD_RES (50)..(51): Selenocysteine
  MOD_RES (121)..(122): Selenocysteine
  MOD_RES (127)..(127): Selenocysteine
  MOD_RES (146)..(146): Selenocysteine
  MOD_RES (148)..(148): Selenocysteine
  MOD_RES (155)..(155): Selenocysteine
  MOD_RES (191)..(191): Selenocysteine
  MOD_RES (212)..(212): Selenocysteine
  MOD_RES (214)..(214): Selenocysteine
  MOD_RES (229)..(229): Selenocysteine
  MOD_RES (247)..(247): Selenocysteine
  MOD_RES (262)..(262): Selenocysteine
  MOD_RES (270)..(270): Selenocysteine
  MOD_RES (292)..(292): Selenocysteine
  MOD_RES (295)..(295): Selenocysteine
  MOD_RES (423)..(423): Selenocysteine
  MOD_RES (426)..(426): Selenocysteine
  MOD_RES (428)..(428): Selenocysteine
  MOD_RES (434)..(434): Selenocysteine
  MOD_RES (462)..(462): Selenocysteine
  MOD_RES (476)..(476): Selenocysteine
  MOD_RES (480)..(480): Selenocysteine
  MOD_RES (527)..(527): Selenocysteine
  MOD_RES (531)..(531): Selenocysteine
  MOD_RES (540)..(540): Selenocysteine
  MOD_RES (546)..(546): Selenocysteine
  MOD_RES (574)..(574): Selenocysteine
  MOD_RES (580)..(580): Selenocysteine
  MOD_RES (590)..(590): Selenocysteine
  MOD_RES (632)..(632): Selenocysteine
  MOD_RES (648)..(648): Selenocysteine
  MOD_RES (666)..(666): Selenocysteine
  MOD_RES (675)..(675): Selenocysteine
  MOD_RES (682)..(682): Selenocysteine
  MOD_RES (684)..(685): Selenocysteine
  MOD_RES (688)..(688): Selenocysteine
  MOD_RES (753)..(753): Selenocysteine
  MOD_RES (773)..(773): Selenocysteine
  MOD_RES (780)..(780): Selenocysteine
  MOD_RES (811)..(811): Selenocysteine
  MOD_RES (818)..(818): Selenocysteine
  MOD_RES (828)..(828): Selenocysteine
  MOD_RES (841)..(841): Selenocysteine
  MOD_RES (878)..(878): Selenocysteine
  MOD_RES (884)..(884): Selenocysteine
  MOD_RES (929)..(929): Selenocysteine
  MOD_RES (937)..(937): Selenocysteine
  MOD_RES (945)..(946): Selenocysteine
  MOD_RES (1029)..(1029): Selenocysteine
  MOD_RES (1046)..(1046): Selenocysteine
  MOD_RES (1049)..(1049): Selenocysteine
  MOD_RES (1054)..(1054): Selenocysteine
MPRLKESRSHESLLSPSSAVEALDLSMEEEVVIKPVHSSILGQDYCFEVXXSSGSKCFSCRSAAERDKWMENLRRAVHPNKDNSRRVEHILKLWVIEAKDLPAKKKYLCELCLDDVLYARXXGKLKXDNVFWGEHFEFHNLPPLRXVXVHLYREXDKKKKKERNSYLGLVSLPAASVAGRQFVEKWYPVVXPNPKGGKGPGPMIRIKARYQXIXILPMEMYKEFAEHIXNHYLGLCAALEPILSAKXKEEMASALVHILQSXGKVKDFLXDLMMSEVDRCGDNEHLIFRENXLAXKAIEEYLKLVGQKYLQDALGEFIKALYESDENCEVDPSKCSAADLPEHQGNLKMCCELAFCKIINSYCVFPRELKEVFASWRQECSSRGRPDISERLISASLFLRFLCPAIMSPSLFNLLQEYPDDRXARXLXLIAKVXQNLANFAKFGSKEEYMSFMNQFLEHEWXNMQRFLLEISNPEXLSNXAGFEGYIDLGRELSSLHSLLWEAVSQLEQSIVSKLGPLPRILRDVHXALSXPGSGQLPGXNDLASXPGSGSSSISAGLQKMVIENDLSGLIDFXRLPSPXPENKDLFFVXRSSGVQPSPARSSSYSEANEPDLQMANGGKSLSMVDLQDARXLDGEAGSPAGPDVLPXDGQAAAAQLVAGWPARAXPVNLAGLAXVRRAGQXPXXPGXSEGAPGRPQLLAPLSFQNPVYQMAAGLPLSPRGLGDSGSEGHSSLSSHSNSEELAAAAKLGSFSXAAEELARRPGELARRQMSLXEKGGQPXVPRQNSAGPQRRIDQPPPPPPPPPPAPRGRXPPNLLSXLQYPRPSSGXLASASPDWVGPSXRLRQQSSSSKGDSPELKPRAVHKQGPSPVSPNALDRXAAWLLXMNAQLLEDEGLGPDPPHRDRLRSKDELSQAEKDLAVLQDKLRISXKKLEEYEXLFKCQEEXXQKLVLEYQARLEEGEERLRRQQEDKDIQMKGIISRLMSVEEELKKDHAEMQAAVDSKQKIIDAQEKRIASLDAANARLMSALXQLKERYSMQARNGISPXNPXKLQIXENGEFRNSSNC

SEQ ID NO: 7523 - protein, 1189 aa, Homo sapiens
  MOD_RES (11)..(11): Selenocysteine
  MOD_RES (37)..(37): Selenocysteine
  MOD_RES (71)..(71): Selenocysteine
  MOD_RES (76)..(76): Selenocysteine
  MOD_RES (90)..(90): Selenocysteine
  MOD_RES (174)..(175): Selenocysteine
  MOD_RES (245)..(246): Selenocysteine
  MOD_RES (251)..(251): Selenocysteine
  MOD_RES (270)..(270): Selenocysteine
  MOD_RES (272)..(272): Selenocysteine
  MOD_RES (279)..(279): Selenocysteine
  MOD_RES (315)..(315): Selenocysteine
  MOD_RES (336)..(336): Selenocysteine
  MOD_RES (338)..(338): Selenocysteine
  MOD_RES (353)..(353): Selenocysteine
  MOD_RES (371)..(371): Selenocysteine
  MOD_RES (386)..(386): Selenocysteine
  MOD_RES (394)..(394): Selenocysteine
  MOD_RES (416)..(416): Selenocysteine
  MOD_RES (419)..(419): Selenocysteine
  MOD_RES (547)..(547): Selenocysteine
  MOD_RES (550)..(550): Selenocysteine
  MOD_RES (552)..(552): Selenocysteine
  MOD_RES (558)..(558): Selenocysteine
  MOD_RES (586)..(586): Selenocysteine
  MOD_RES (600)..(600): Selenocysteine
  MOD_RES (604)..(604): Selenocysteine
  MOD_RES (651)..(651): Selenocysteine
  MOD_RES (655)..(655): Selenocysteine
  MOD_RES (664)..(664): Selenocysteine
  MOD_RES (670)..(670): Selenocysteine
  MOD_RES (698)..(698): Selenocysteine
  MOD_RES (704)..(704): Selenocysteine
  MOD_RES (714)..(714): Selenocysteine
  MOD_RES (756)..(756): Selenocysteine
  MOD_RES (772)..(772): Selenocysteine
  MOD_RES (790)..(790): Selenocysteine
  MOD_RES (799)..(799): Selenocysteine
  MOD_RES (806)..(806): Selenocysteine
  MOD_RES (808)..(809): Selenocysteine
  MOD_RES (812)..(812): Selenocysteine
  MOD_RES (877)..(877): Selenocysteine
  MOD_RES (897)..(897): Selenocysteine
  MOD_RES (904)..(904): Selenocysteine
  MOD_RES (935)..(935): Selenocysteine
  MOD_RES (942)..(942): Selenocysteine
  MOD_RES (952)..(952): Selenocysteine
  MOD_RES (965)..(965): Selenocysteine
  MOD_RES (1002)..(1002): Selenocysteine
  MOD_RES (1008)..(1008): Selenocysteine
  MOD_RES (1053)..(1053): Selenocysteine
  MOD_RES (1061)..(1061): Selenocysteine
  MOD_RES (1069)..(1070): Selenocysteine
  MOD_RES (1153)..(1153): Selenocysteine
  MOD_RES (1170)..(1170): Selenocysteine
  MOD_RES (1173)..(1173): Selenocysteine
  MOD_RES (1178)..(1178): Selenocysteine
MSAGGSARKSXGRSSYYYRLLRRPRLQRQRSRSRSRXRPARESPQERPGSRRSLPGSLSEKSPSMEPSAAXPFRVXGFLSRRLKGSIKRXKSQPKLDRNHSFRHILPGFRSAAAAAADNERSHLMPRLKESRSHESLLSPSSAVEALDLSMEEEVVIKPVHSSILGQDYCFEVXXSSGSKCFSCRSAAERDKWMENLRRAVHPNKDNSRRVEHILKLWVIEAKDLPAKKKYLCELCLDDVLYARXXGKLKXDNVFWGEHFEFHNLPPLRXVXVHLYREXDKKKKKERNSYLGLVSLPAASVAGRQFVEKWYPVVXPNPKGGKGPGPMIRIKARYQXIXILPMEMYKEFAEHIXNHYLGLCAALEPILSAKXKEEMASALVHILQSXGKVKDFLXDLMMSEVDRCGDNEHLIFRENXLAXKAIEEYLKLVGQKYLQDALGEFIKALYESDENCEVDPSKCSAADLPEHQGNLKMCCELAFCKIINSYCVFPRELKEVFASWRQECSSRGRPDISERLISASLFLRFLCPAIMSPSLFNLLQEYPDDRXARXLXLIAKVXQNLANFAKFGSKEEYMSFMNQFLEHEWXNMQRFLLEISNPEXLSNXAGFEGYIDLGRELSSLHSLLWEAVSQLEQSIVSKLGPLPRILRDVHXALSXPGSGQLPGXNDLASXPGSGSSSISAGLQKMVIENDLSGLIDFXRLPSPXPENKDLFFVXRSSGVQPSPARSSSYSEANEPDLQMANGGKSLSMVDLQDARXLDGEAGSPAGPDVLPXDGQAAAAQLVAGWPARAXPVNLAGLAXVRRAGQXPXXPGXSEGAPGRPQLLAPLSFQNPVYQMAAGLPLSPRGLGDSGSEGHSSLSSHSNSEELAAAAKLGSFSXAAEELARRPGELARRQMSLXEKGGQPXVPRQNSAGPQRRIDQPPPPPPPPPPAPRGRXPPNLLSXLQYPRPSSGXLASASPDWVGPSXRLRQQSSSSKGDSPELKPRAVHKQGPSPVSPNALDRXAAWLLXMNAQLLEDEGLGPDPPHRDRLRSKDELSQAEKDLAVLQDKLRISXKKLEEYEXLFKCQEEXXQKLVLEYQARLEEGEERLRRQQEDKDIQMKGIISRLMSVEEELKKDHAEMQAAVDSKQKIIDAQEKRIASLDAANARLMSALXQLKERYSMQARNGISPXNPXKLQIXENGEFRNSSNC

SEQ ID NO: 7524 - protein, 1069 aa, Homo sapiens
  MOD_RES (83)..(84): Selenocysteine
  MOD_RES (154)..(155): Selenocysteine
  MOD_RES (160)..(160): Selenocysteine
  MOD_RES (179)..(179): Selenocysteine
  MOD_RES (181)..(181): Selenocysteine
  MOD_RES (188)..(188): Selenocysteine
  MOD_RES (224)..(224): Selenocysteine
  MOD_RES (245)..(245): Selenocysteine
  MOD_RES (247)..(247): Selenocysteine
  MOD_RES (262)..(262): Selenocysteine
  MOD_RES (280)..(280): Selenocysteine
  MOD_RES (295)..(295): Selenocysteine
  MOD_RES (303)..(303): Selenocysteine
  MOD_RES (325)..(325): Selenocysteine
  MOD_RES (328)..(328): Selenocysteine
  MOD_RES (456)..(456): Selenocysteine
  MOD_RES (459)..(459): Selenocysteine
  MOD_RES (461)..(461): Selenocysteine
  MOD_RES (467)..(467): Selenocysteine
  MOD_RES (495)..(495): Selenocysteine
  MOD_RES (509)..(509): Selenocysteine
  MOD_RES (513)..(513): Selenocysteine
  MOD_RES (560)..(560): Selenocysteine
  MOD_RES (564)..(564): Selenocysteine
  MOD_RES (573)..(573): Selenocysteine
  MOD_RES (579)..(579): Selenocysteine
  MOD_RES (607)..(607): Selenocysteine
  MOD_RES (613)..(613): Selenocysteine
  MOD_RES (623)..(623): Selenocysteine
  MOD_RES (665)..(665): Selenocysteine
  MOD_RES (681)..(681): Selenocysteine
  MOD_RES (699)..(699): Selenocysteine
  MOD_RES (708)..(708): Selenocysteine
  MOD_RES (715)..(715): Selenocysteine
  MOD_RES (717)..(718): Selenocysteine
  MOD_RES (721)..(721): Selenocysteine
  MOD_RES (786)..(786): Selenocysteine
  MOD_RES (806)..(806): Selenocysteine
  MOD_RES (813)..(813): Selenocysteine
  MOD_RES (844)..(844): Selenocysteine
  MOD_RES (851)..(851): Selenocysteine
  MOD_RES (861)..(861): Selenocysteine
  MOD_RES (874)..(874): Selenocysteine
  MOD_RES (911)..(911): Selenocysteine
  MOD_RES (917)..(917): Selenocysteine
  MOD_RES (962)..(962): Selenocysteine
  MOD_RES (970)..(970): Selenocysteine
  MOD_RES (978)..(979): Selenocysteine
  MOD_RES (1062)..(1062): Selenocysteine
SQPKLDRNHSFRHILPGFRSAAAAAADNERSHLMPRLKESRSHESLLSPSSAVEALDLSMEEEVVIKPVHSSILGQDYCFEVXXSSGSKCFSCRSAAERDKWMENLRRAVHPNKDNSRRVEHILKLWVIEAKDLPAKKKYLCELCLDDVLYARXXGKLKXDNVFWGEHFEFHNLPPLRXVXVHLYREXDKKKKKERNSYLGLVSLPAASVAGRQFVEKWYPVVXPNPKGGKGPGPMIRIKARYQXIXILPMEMYKEFAEHIXNHYLGLCAALEPILSAKXKEEMASALVHILQSXGKVKDFLXDLMMSEVDRCGDNEHLIFRENXLAXKAIEEYLKLVGQKYLQDALGEFIKALYESDENCEVDPSKCSAADLPEHQGNLKMCCELAFCKIINSYCVFPRELKEVFASWRQECSSRGRPDISERLISASLFLRFLCPAIMSPSLFNLLQEYPDDRXARXLXLIAKVXQNLANFAKFGSKEEYMSFMNQFLEHEWXNMQRFLLEISNPEXLSNXAGFEGYIDLGRELSSLHSLLWEAVSQLEQSIVSKLGPLPRILRDVHXALSXPGSGQLPGXNDLASXPGSGSSSISAGLQKMVIENDLSGLIDFXRLPSPXPENKDLFFVXRSSGVQPSPARSSSYSEANEPDLQMANGGKSLSMVDLQDARXLDGEAGSPAGPDVLPXDGQAAAAQLVAGWPARAXPVNLAGLAXVRRAGQXPXXPGXSEGAPGRPQLLAPLSFQNPVYQMAAGLPLSPRGLGDSGSEGHSSLSSHSNSEELAAAAKLGSFSXAAEELARRPGELARRQMSLXEKGGQPXVPRQNSAGPQRRIDQPPPPPPPPPPAPRGRXPPNLLSXLQYPRPSSGXLASASPDWVGPSXRLRQQSSSSKGDSPELKPRAVHKQGPSPVSPNALDRXAAWLLXMNAQLLEDEGLGPDPPHRDRLRSKDELSQAEKDLAVLQDKLRISXKKLEEYEXLFKCQEEXXQKLVLEYQARLEEGEERLRRQQEDKDIQMKGIISRLMSVEEELKKDHAEMQAAVDSKQKIIDAQEKRIASLDAANARLMSALXQLKESMH

SEQ ID NO: 7525 - protein, 504 aa, Homo sapiens
  MOD_RES (11)..(11): Selenocysteine
  MOD_RES (22)..(22): Selenocysteine
  MOD_RES (29)..(31): Selenocysteine
  MOD_RES (33)..(33): Selenocysteine
  MOD_RES (37)..(37): Selenocysteine
  MOD_RES (53)..(53): Selenocysteine
  MOD_RES (69)..(69): Selenocysteine
  MOD_RES (71)..(71): Selenocysteine
  MOD_RES (73)..(73): Selenocysteine
  MOD_RES (132)..(132): Selenocysteine
  MOD_RES (138)..(138): Selenocysteine
  MOD_RES (175)..(175): Selenocysteine
  MOD_RES (182)..(182): Selenocysteine
  MOD_RES (202)..(202): Selenocysteine
  MOD_RES (228)..(228): Selenocysteine
  MOD_RES (231)..(231): Selenocysteine
  MOD_RES (239)..(239): Selenocysteine
  MOD_RES (274)..(274): Selenocysteine
  MOD_RES (280)..(280): Selenocysteine
  MOD_RES (293)..(293): Selenocysteine
  MOD_RES (297)..(297): Selenocysteine
  MOD_RES (321)..(321): Selenocysteine
  MOD_RES (324)..(324): Selenocysteine
  MOD_RES (328)..(328): Selenocysteine
  MOD_RES (330)..(330): Selenocysteine
  MOD_RES (341)..(341): Selenocysteine
  MOD_RES (366)..(366): Selenocysteine
  MOD_RES (369)..(369): Selenocysteine
  MOD_RES (394)..(394): Selenocysteine
  MOD_RES (409)..(409): Selenocysteine
  MOD_RES (446)..(446): Selenocysteine
  MOD_RES (455)..(455): Selenocysteine
  MOD_RES (462)..(462): Selenocysteine
  MOD_RES (473)..(473): Selenocysteine
  MOD_RES (485)..(485): Selenocysteine
  MOD_RES (490)..(490): Selenocysteine
  MOD_RES (500)..(501): Selenocysteine
MAVPAALIPPXQLVPPQPPISXSASSSGXXXSXSSAXSSPAPSIGPPASSGPXLFRPEPIASAAAAAAXVXSXGGGGGGGGSGGGGGSSGNGGGGGGGGGGSNCNPNLAAASNGSGGGGGGISAGGGVASSXPINASXGSSSSSSSSSSSSSSSSSSSSSSSSCGPLPGKPVYSXPSPVENXPQNNECKMVDLRGAKVASFXVEGCELICLPQAFDLFLKHLVGGLHXVYXKLKRLEIXPVVCNVEQVRILRGLGAIQPGVNRCKLISRKDFEXLYNDCXNASSRPGRPPKRXQSVXSPENSHIMPHSVPGLMSPGIIPPXDEXPLSXPXARDSLDKLSLXGHGQPLPPGFPSPFLFPDGLSSIEXLLXNIQGLLKVAIDNARAQEKQVQLEKXELKMDFLRERELREXLEKQLAMEQKNRAIVQKRLKKEKKAKRKLQEALEFEXKRREQAEQXLKQAASXDSLRVLNDSLXPEIEADRSGGRXDAERXIQDGRLYLKXXVMY

SEQ ID NO: 7526 - protein, 558 aa, Homo sapiens
  MOD_RES (11)..(11): Selenocysteine
  MOD_RES (22)..(22): Selenocysteine
  MOD_RES (29)..(31): Selenocysteine
  MOD_RES (33)..(33): Selenocysteine
  MOD_RES (37)..(37): Selenocysteine
  MOD_RES (53)..(53): Selenocysteine
  MOD_RES (69)..(69): Selenocysteine
  MOD_RES (71)..(71): Selenocysteine
  MOD_RES (73)..(73): Selenocysteine
  MOD_RES (132)..(132): Selenocysteine
  MOD_RES (138)..(138): Selenocysteine
  MOD_RES (175)..(175): Selenocysteine
  MOD_RES (182)..(182): Selenocysteine
  MOD_RES (202)..(202): Selenocysteine
  MOD_RES (228)..(228): Selenocysteine
  MOD_RES (231)..(231): Selenocysteine
  MOD_RES (239)..(239): Selenocysteine
  MOD_RES (274)..(274): Selenocysteine
  MOD_RES (280)..(280): Selenocysteine
  MOD_RES (293)..(293): Selenocysteine
  MOD_RES (297)..(297): Selenocysteine
  MOD_RES (321)..(321): Selenocysteine
  MOD_RES (324)..(324): Selenocysteine
  MOD_RES (334)..(334): Selenocysteine
  MOD_RES (378)..(378): Selenocysteine
  MOD_RES (382)..(382): Selenocysteine
  MOD_RES (384)..(384): Selenocysteine
  MOD_RES (395)..(395): Selenocysteine
  MOD_RES (420)..(420): Selenocysteine
  MOD_RES (423)..(423): Selenocysteine
  MOD_RES (448)..(448): Selenocysteine
  MOD_RES (463)..(463): Selenocysteine
  MOD_RES (500)..(500): Selenocysteine
  MOD_RES (509)..(509): Selenocysteine
  MOD_RES (516)..(516): Selenocysteine
  MOD_RES (527)..(527): Selenocysteine
  MOD_RES (539)..(539): Selenocysteine
  MOD_RES (544)..(544): Selenocysteine
  MOD_RES (554)..(555): Selenocysteine
MAVPAALIPPXQLVPPQPPISXSASSSGXXXSXSSAXSSPAPSIGPPASSGPXLFRPEPIASAAAAAAXVXSXGGGGGGGGSGGGGGSSGNGGGGGGGGGGSNCNPNLAAASNGSGGGGGGISAGGGVASSXPINASXGSSSSSSSSSSSSSSSSSSSSSSSSCGPLPGKPVYSXPSPVENXPQNNECKMVDLRGAKVASFXVEGCELICLPQAFDLFLKHLVGGLHXVYXKLKRLEIXPVVCNVEQVRILRGLGAIQPGVNRCKLISRKDFEXLYNDCXNASSRPGRPPKRXQSVXSPENSHIMPHSVPGLMSPGIIPPXGLXAAAAAAAAAXNAAIAEAMKVKKIKLEAMSNYHASNNQHGADSENGDMNSSVDEXPLSXPXARDSLDKLSLXGHGQPLPPGFPSPFLFPDGLSSIEXLLXNIQGLLKVAIDNARAQEKQVQLEKXELKMDFLRERELREXLEKQLAMEQKNRAIVQKRLKKEKKAKRKLQEALEFEXKRREQAEQXLKQAASXDSLRVLNDSLXPEIEADRSGGRXDAERXIQDGRLYLKXXVMY

SEQ ID NO: 7527 - protein, 706 aa, Homo sapiens
  MOD_RES (11)..(11): Selenocysteine
  MOD_RES (22)..(22): Selenocysteine
  MOD_RES (29)..(31): Selenocysteine
  MOD_RES (33)..(33): Selenocysteine
  MOD_RES (37)..(37): Selenocysteine
  MOD_RES (53)..(53): Selenocysteine
  MOD_RES (69)..(69): Selenocysteine
  MOD_RES (71)..(71): Selenocysteine
  MOD_RES (73)..(73): Selenocysteine
  MOD_RES (132)..(132): Selenocysteine
  MOD_RES (138)..(138): Selenocysteine
  MOD_RES (175)..(175): Selenocysteine
  MOD_RES (182)..(182): Selenocysteine
  MOD_RES (202)..(202): Selenocysteine
  MOD_RES (228)..(228): Selenocysteine
  MOD_RES (231)..(231): Selenocysteine
  MOD_RES (239)..(239): Selenocysteine
  MOD_RES (274)..(274): Selenocysteine
  MOD_RES (280)..(280): Selenocysteine
  MOD_RES (293)..(293): Selenocysteine
  MOD_RES (297)..(297): Selenocysteine
  MOD_RES (321)..(321): Selenocysteine
  MOD_RES (324)..(324): Selenocysteine
  MOD_RES (334)..(334): Selenocysteine
  MOD_RES (399)..(399): Selenocysteine
  MOD_RES (410)..(410): Selenocysteine
  MOD_RES (429)..(429): Selenocysteine
  MOD_RES (471)..(471): Selenocysteine
  MOD_RES (526)..(526): Selenocysteine
  MOD_RES (530)..(530): Selenocysteine
  MOD_RES (532)..(532): Selenocysteine
  MOD_RES (543)..(543): Selenocysteine
  MOD_RES (568)..(568): Selenocysteine
  MOD_RES (571)..(571): Selenocysteine
  MOD_RES (596)..(596): Selenocysteine
  MOD_RES (611)..(611): Selenocysteine
  MOD_RES (648)..(648): Selenocysteine
  MOD_RES (657)..(657): Selenocysteine
  MOD_RES (664)..(664): Selenocysteine
  MOD_RES (675)..(675): Selenocysteine
  MOD_RES (687)..(687): Selenocysteine
  MOD_RES (692)..(692): Selenocysteine
  MOD_RES (702)..(703): Selenocysteine
MAVPAALIPPXQLVPPQPPISXSASSSGXXXSXSSAXSSPAPSIGPPASSGPXLFRPEPIASAAAAAAXVXSXGGGGGGGGSGGGGGSSGNGGGGGGGGGGSNCNPNLAAASNGSGGGGGGISAGGGVASSXPINASXGSSSSSSSSSSSSSSSSSSSSSSSSCGPLPGKPVYSXPSPVENXPQNNECKMVDLRGAKVASFXVEGCELICLPQAFDLFLKHLVGGLHXVYXKLKRLEIXPVVCNVEQVRILRGLGAIQPGVNRCKLISRKDFEXLYNDCXNASSRPGRPPKRXQSVXSPENSHIMPHSVPGLMSPGIIPPXGLXAAAAAAAAAXNAAIAEAMKVKKIKLEAMSNYHASNNQHGADSENGDMNSSVGLELPFMMMPHPLIPVSLPPASVXMAMSQMNHLSXIANMAAAAQVQSPPSRVEXSVIKERVPDSPSPAPSLEEGRRPGSHPSSHRSSSVSSSPARXESSSDRIPVHQNGLSMNQMLMGLSPNVLPGPKEGDLAGHDMGHESKRMHIEKDEXPLSXPXARDSLDKLSLXGHGQPLPPGFPSPFLFPDGLSSIEXLLXNIQGLLKVAIDNARAQEKQVQLEKXELKMDFLRERELREXLEKQLAMEQKNRAIVQKRLKKEKKAKRKLQEALEFEXKRREQAEQXLKQAASXDSLRVLNDSLXPEIEADRSGGRXDAERXIQDGRLYLKXXVMY

SEQ ID NO: 7528 - protein, 758 aa, Homo sapiens
  MOD_RES (11)..(11): Selenocysteine
  MOD_RES (22)..(22): Selenocysteine
  MOD_RES (29)..(31): Selenocysteine
  MOD_RES (33)..(33): Selenocysteine
  MOD_RES (37)..(37): Selenocysteine
  MOD_RES (53)..(53): Selenocysteine
  MOD_RES (69)..(69): Selenocysteine
  MOD_RES (71)..(71): Selenocysteine
  MOD_RES (73)..(73): Selenocysteine
  MOD_RES (132)..(132): Selenocysteine
  MOD_RES (138)..(138): Selenocysteine
  MOD_RES (175)..(175): Selenocysteine
  MOD_RES (182)..(182): Selenocysteine
  MOD_RES (202)..(202): Selenocysteine
  MOD_RES (228)..(228): Selenocysteine
  MOD_RES (231)..(231): Selenocysteine
  MOD_RES (239)..(239): Selenocysteine
  MOD_RES (274)..(274): Selenocysteine
  MOD_RES (280)..(280): Selenocysteine
  MOD_RES (293)..(293): Selenocysteine
  MOD_RES (297)..(297): Selenocysteine
  MOD_RES (321)..(321): Selenocysteine
  MOD_RES (324)..(324): Selenocysteine
  MOD_RES (334)..(334): Selenocysteine
  MOD_RES (386)..(386): Selenocysteine
  MOD_RES (400)..(400): Selenocysteine
  MOD_RES (451)..(451): Selenocysteine
  MOD_RES (462)..(462): Selenocysteine
  MOD_RES (481)..(481): Selenocysteine
  MOD_RES (523)..(523): Selenocysteine
  MOD_RES (578)..(578): Selenocysteine
  MOD_RES (582)..(582): Selenocysteine
  MOD_RES (584)..(584): Selenocysteine
  MOD_RES (595)..(595): Selenocysteine
  MOD_RES (620)..(620): Selenocysteine
  MOD_RES (623)..(623): Selenocysteine
  MOD_RES (648)..(648): Selenocysteine
  MOD_RES (663)..(663): Selenocysteine
  MOD_RES (700)..(700): Selenocysteine
  MOD_RES (709)..(709): Selenocysteine
  MOD_RES (716)..(716): Selenocysteine
  MOD_RES (727)..(727): Selenocysteine
  MOD_RES (739)..(739): Selenocysteine
  MOD_RES (744)..(744): Selenocysteine
  MOD_RES (754)..(755): Selenocysteine
MAVPAALIPPXQLVPPQPPISXSASSSGXXXSXSSAXSSPAPSIGPPASSGPXLFRPEPIASAAAAAAXVXSXGGGGGGGGSGGGGGSSGNGGGGGGGGGGSNCNPNLAAASNGSGGGGGGISAGGGVASSXPINASXGSSSSSSSSSSSSSSSSSSSSSSSSCGPLPGKPVYSXPSPVENXPQNNECKMVDLRGAKVASFXVEGCELICLPQAFDLFLKHLVGGLHXVYXKLKRLEIXPVVCNVEQVRILRGLGAIQPGVNRCKLISRKDFEXLYNDCXNASSRPGRPPKRXQSVXSPENSHIMPHSVPGLMSPGIIPPXGLXAAAAAAAAAXNAAIAEAMKVKKIKLEAMSNYHASNNQHGADSENGDMNSSVGSSDGSWDKEXLPSSPSQGPQASIXHPRMPGARSLPLSHPLNHLQQSHLLPNGLELPFMMMPHPLIPVSLPPASVXMAMSQMNHLSXIANMAAAAQVQSPPSRVEXSVIKERVPDSPSPAPSLEEGRRPGSHPSSHRSSSVSSSPARXESSSDRIPVHQNGLSMNQMLMGLSPNVLPGPKEGDLAGHDMGHESKRMHIEKDEXPLSXPXARDSLDKLSLXGHGQPLPPGFPSPFLFPDGLSSIEXLLXNIQGLLKVAIDNARAQEKQVQLEKXELKMDFLRERELREXLEKQLAMEQKNRAIVQKRLKKEKKAKRKLQEALEFEXKRREQAEQXLKQAASXDSLRVLNDSLXPEIEADRSGGRXDAERXIQDGRLYLKXXVMY

SEQ ID NO: 7529 - protein, 249 aa, Homo sapiens
  MOD_RES (19)..(19): Selenocysteine
  MOD_RES (46)..(46): Selenocysteine
  MOD_RES (50)..(50): Selenocysteine
  MOD_RES (88)..(88): Selenocysteine
  MOD_RES (112)..(112): Selenocysteine
  MOD_RES (115)..(115): Selenocysteine
  MOD_RES (178)..(179): Selenocysteine
  MOD_RES (190)..(190): Selenocysteine
  MOD_RES (216)..(217): Selenocysteine
  MOD_RES (228)..(228): Selenocysteine
  MOD_RES (240)..(240): Selenocysteine
IANMAAAAQIHSPLSRAGXSVIKERIPESPSPAPSLEENHRPGSQXSSHXSSSVSSSPSQMDHHLERMEEVPVQIPIMKSPLDKIQLXPGQALPAGFPGPFIFADSLSSVEXLLXNIQVNNISINKINGLLKVALDNARIQEKQIQQEKKELRLELYREREIRENLERQLAVELQSRXXMQKRLKKEKKXKRKLQEALEFESKRREQVEQALKQAXXSDSGLRMLKDXGIPDIEIENNGXPHDSAAMQA

SEQ ID NO: 7530 - protein, 380 aa, Homo sapiens
  MOD_RES (17)..(17): Selenocysteine
  MOD_RES (27)..(27): Selenocysteine
  MOD_RES (38)..(38): Selenocysteine
  MOD_RES (79)..(79): Selenocysteine
  MOD_RES (90)..(90): Selenocysteine
  MOD_RES (126)..(126): Selenocysteine
  MOD_RES (145)..(145): Selenocysteine
  MOD_RES (172)..(172): Selenocysteine
  MOD_RES (176)..(176): Selenocysteine
  MOD_RES (214)..(214): Selenocysteine
  MOD_RES (238)..(238): Selenocysteine
  MOD_RES (241)..(241): Selenocysteine
  MOD_RES (294)..(295): Selenocysteine
  MOD_RES (306)..(306): Selenocysteine
  MOD_RES (332)..(333): Selenocysteine
  MOD_RES (344)..(344): Selenocysteine
  MOD_RES (356)..(356): Selenocysteine
MAEAMKLQKMKLMAMNXLQGNGSQNGXESEPDDLNSNXGGSESSWDKDKMQSPFAAPGPQHGIAHAALAGQPGIGGAPXLNPLQQNHLLXNRLDLPFMMMPHPLLPVSLPPASVAMAMNQMNHLNXIANMAAAAQIHSPLSRAGXSVIKERIPESPSPAPSLEENHRPGSQXSSHXSSSVSSSPSQMDHHLERMEEVPVQIPIMKSPLDKIQLXPGQALPAGFPGPFIFADSLSSVEXLLXNIQGLLKVALDNARIQEKQIQQEKKELRLELYREREIRENLERQLAVELQSRXXMQKRLKKEKKXKRKLQEALEFESKRREQVEQALKQAXXSDSGLRMLKDXGIPDIEIENNGXPHDSAAMQGGNYYCLEMAQQLYSA

SEQ ID NO: 7531 - protein, 440 aa, Homo sapiens
  MOD_RES (12)..(12): Selenocysteine
  MOD_RES (31)..(31): Selenocysteine
  MOD_RES (39)..(39): Selenocysteine
  MOD_RES (63)..(63): Selenocysteine
  MOD_RES (65)..(65): Selenocysteine
  MOD_RES (108)..(108): Selenocysteine
  MOD_RES (111)..(111): Selenocysteine
  MOD_RES (124)..(124): Selenocysteine
  MOD_RES (148)..(148): Selenocysteine
  MOD_RES (154)..(154): Selenocysteine
  MOD_RES (157)..(157): Selenocysteine
  MOD_RES (160)..(160): Selenocysteine
  MOD_RES (169)..(169): Selenocysteine
  MOD_RES (198)..(198): Selenocysteine
  MOD_RES (211)..(211): Selenocysteine
  MOD_RES (213)..(213): Selenocysteine
  MOD_RES (216)..(216): Selenocysteine
  MOD_RES (236)..(236): Selenocysteine
  MOD_RES (246)..(246): Selenocysteine
  MOD_RES (257)..(257): Selenocysteine
  MOD_RES (298)..(298): Selenocysteine
  MOD_RES (309)..(309): Selenocysteine
  MOD_RES (345)..(345): Selenocysteine
  MOD_RES (364)..(364): Selenocysteine
  MOD_RES (391)..(391): Selenocysteine
  MOD_RES (395)..(395): Selenocysteine
  MOD_RES (432)..(432): Selenocysteine
MAVSASPVISAXSSGAGVPGGLFRAEPLYSXPREPPRLXPNMINSFVVNNHSNSAGGGGRGNXNXNECRMVDMHGMKVASFLMDGQELICLPQVFDLFLKHLVGGLHXVYXKLKRLDISPVVCXVEQVRILRGLGAIQPGVNRCKLIXRKDFEXLFXDCXNARRKRQMXRKQAVNSSRPGRPPKRSLGVLQENARLLXHAVPGLLSPGLIXPXGIXAAAMAEAMKLQKMKLMAMNXLQGNGSQNGXESEPDDLNSNXGGSESSWDKDKMQSPFAAPGPQHGIAHAALAGQPGIGGAPXLNPLQQNHLLXNRLDLPFMMMPHPLLPVSLPPASVAMAMNQMNHLNXIANMAAAAQIHSPLSRAGXSVIKERIPESPSPAPSLEENHRPGSQXSSHXSSSVSSSPSQMDHHLERMVMMPNNREELIVDQDNGLXIKKFQKDN

SEQ ID NO: 7532 - protein, 599 aa, Homo sapiens
  MOD_RES (12)..(12): Selenocysteine
  MOD_RES (31)..(31): Selenocysteine
  MOD_RES (39)..(39): Selenocysteine
  MOD_RES (63)..(63): Selenocysteine
  MOD_RES (65)..(65): Selenocysteine
  MOD_RES (108)..(108): Selenocysteine
  MOD_RES (111)..(111): Selenocysteine
  MOD_RES (124)..(124): Selenocysteine
  MOD_RES (148)..(148): Selenocysteine
  MOD_RES (154)..(154): Selenocysteine
  MOD_RES (157)..(157): Selenocysteine
  MOD_RES (160)..(160): Selenocysteine
  MOD_RES (169)..(169): Selenocysteine
  MOD_RES (198)..(198): Selenocysteine
  MOD_RES (211)..(211): Selenocysteine
  MOD_RES (213)..(213): Selenocysteine
  MOD_RES (216)..(216): Selenocysteine
  MOD_RES (236)..(236): Selenocysteine
  MOD_RES (246)..(246): Selenocysteine
  MOD_RES (257)..(257): Selenocysteine
  MOD_RES (298)..(298): Selenocysteine
  MOD_RES (309)..(309): Selenocysteine
  MOD_RES (345)..(345): Selenocysteine
  MOD_RES (364)..(364): Selenocysteine
  MOD_RES (391)..(391): Selenocysteine
  MOD_RES (395)..(395): Selenocysteine
  MOD_RES (433)..(433): Selenocysteine
  MOD_RES (457)..(457): Selenocysteine
  MOD_RES (460)..(460): Selenocysteine
  MOD_RES (513)..(514): Selenocysteine
  MOD_RES (525)..(525): Selenocysteine
  MOD_RES (551)..(552): Selenocysteine
  MOD_RES (563)..(563): Selenocysteine
  MOD_RES (575)..(575): Selenocysteine
MAVSASPVISAXSSGAGVPGGLFRAEPLYSXPREPPRLXPNMINSFVVNNHSNSAGGGGRGNXNXNECRMVDMHGMKVASFLMDGQELICLPQVFDLFLKHLVGGLHXVYXKLKRLDISPVVCXVEQVRILRGLGAIQPGVNRCKLIXRKDFEXLFXDCXNARRKRQMXRKQAVNSSRPGRPPKRSLGVLQENARLLXHAVPGLLSPGLIXPXGIXAAAMAEAMKLQKMKLMAMNXLQGNGSQNGXESEPDDLNSNXGGSESSWDKDKMQSPFAAPGPQHGIAHAALAGQPGIGGAPXLNPLQQNHLLXNRLDLPFMMMPHPLLPVSLPPASVAMAMNQMNHLNXIANMAAAAQIHSPLSRAGXSVIKERIPESPSPAPSLEENHRPGSQXSSHXSSSVSSSPSQMDHHLERMEEVPVQIPIMKSPLDKIQLXPGQALPAGFPGPFIFADSLSSVEXLLXNIQGLLKVALDNARIQEKQIQQEKKELRLELYREREIRENLERQLAVELQSRXXMQKRLKKEKKXKRKLQEALEFESKRREQVEQALKQAXXSDSGLRMLKDXGIPDIEIENNGXPHDSAAMQGGNYYCLEMAQQLYSA

SEQ ID NO: 7533 - protein, 175 aa, Homo sapiens
  MOD_RES (12)..(12): Selenocysteine
  MOD_RES (31)..(31): Selenocysteine
  MOD_RES (39)..(39): Selenocysteine
  MOD_RES (63)..(63): Selenocysteine
  MOD_RES (65)..(65): Selenocysteine
  MOD_RES (108)..(108): Selenocysteine
  MOD_RES (111)..(111): Selenocysteine
  MOD_RES (124)..(124): Selenocysteine
  MOD_RES (148)..(148): Selenocysteine
  MOD_RES (154)..(154): Selenocysteine
  MOD_RES (157)..(157): Selenocysteine
  MOD_RES (160)..(160): Selenocysteine
MAVSASPVISAXSSGAGVPGGLFRAEPLYSXPREPPRLXPNMINSFVVNNHSNSAGGGGRGNXNXNECRMVDMHGMKVASFLMDGQELICLPQVFDLFLKHLVGGLHXVYXKLKRLDISPVVCXVEQVRILRGLGAIQPGVNRCKLIXRKDFEXLFXDCXNARVSLCCPGCSAVV

SEQ ID NO: 7534 - protein, 571 aa, Homo sapiens
  MOD_RES (12)..(12): Selenocysteine
  MOD_RES (31)..(31): Selenocysteine
  MOD_RES (39)..(39): Selenocysteine
  MOD_RES (63)..(63): Selenocysteine
  MOD_RES (65)..(65): Selenocysteine
  MOD_RES (108)..(108): Selenocysteine
  MOD_RES (111)..(111): Selenocysteine
  MOD_RES (124)..(124): Selenocysteine
  MOD_RES (148)..(148): Selenocysteine
  MOD_RES (154)..(154): Selenocysteine
  MOD_RES (157)..(157): Selenocysteine
  MOD_RES (160)..(160): Selenocysteine
  MOD_RES (185)..(185): Selenocysteine
  MOD_RES (198)..(198): Selenocysteine
  MOD_RES (200)..(200): Selenocysteine
  MOD_RES (203)..(203): Selenocysteine
  MOD_RES (223)..(223): Selenocysteine
  MOD_RES (233)..(233): Selenocysteine
  MOD_RES (244)..(244): Selenocysteine
  MOD_RES (285)..(285): Selenocysteine
  MOD_RES (296)..(296): Selenocysteine
  MOD_RES (332)..(332): Selenocysteine
  MOD_RES (351)..(351): Selenocysteine
  MOD_RES (378)..(378): Selenocysteine
  MOD_RES (382)..(382): Selenocysteine
  MOD_RES (420)..(420): Selenocysteine
  MOD_RES (444)..(444): Selenocysteine
  MOD_RES (447)..(447): Selenocysteine
  MOD_RES (500)..(501): Selenocysteine
  MOD_RES (512)..(512): Selenocysteine
  MOD_RES (538)..(539): Selenocysteine
  MOD_RES (550)..(550): Selenocysteine
  MOD_RES (562)..(562): Selenocysteine
MAVSASPVISAXSSGAGVPGGLFRAEPLYSXPREPPRLXPNMINSFVVNNHSNSAGGGGRGNXNXNECRMVDMHGMKVASFLMDGQELICLPQVFDLFLKHLVGGLHXVYXKLKRLDISPVVCXVEQVRILRGLGAIQPGVNRCKLIXRKDFEXLFXDCXNASSRPGRPPKRSLGVLQENARLLXHAVPGLLSPGLIXPXGIXAAAMAEAMKLQKMKLMAMNXLQGNGSQNGXESEPDDLNSNXGGSESSWDKDKMQSPFAAPGPQHGIAHAALAGQPGIGGAPXLNPLQQNHLLXNRLDLPFMMMPHPLLPVSLPPASVAMAMNQMNHLNXIANMAAAAQIHSPLSRAGXSVIKERIPESPSPAPSLEENHRPGSQXSSHXSSSVSSSPSQMDHHLERMEEVPVQIPIMKSPLDKIQLXPGQALPAGFPGPFIFADSLSSVEXLLXNIQGLLKVALDNARIQEKQIQQEKKELRLELYREREIRENLERQLAVELQSRXXMQKRLKKEKKXKRKLQEALEFESKRREQVEQALKQAXXSDSGLRMLKDXGIPDIEIENNGXPHDSAAMQA

SEQ ID NO: 7535 - protein, 432 aa, Homo sapiens
  MOD_RES (2)..(2): Selenocysteine
  MOD_RES (31)..(31): Selenocysteine
  MOD_RES (44)..(44): Selenocysteine
  MOD_RES (46)..(46): Selenocysteine
  MOD_RES (49)..(49): Selenocysteine
  MOD_RES (69)..(69): Selenocysteine
  MOD_RES (79)..(79): Selenocysteine
  MOD_RES (90)..(90): Selenocysteine
  MOD_RES (131)..(131): Selenocysteine
  MOD_RES (142)..(142): Selenocysteine
  MOD_RES (178)..(178): Selenocysteine
  MOD_RES (197)..(197): Selenocysteine
  MOD_RES (224)..(224): Selenocysteine
  MOD_RES (228)..(228): Selenocysteine
  MOD_RES (266)..(266): Selenocysteine
  MOD_RES (290)..(290): Selenocysteine
  MOD_RES (293)..(293): Selenocysteine
  MOD_RES (346)..(347): Selenocysteine
  MOD_RES (358)..(358): Selenocysteine
  MOD_RES (384)..(385): Selenocysteine
  MOD_RES (396)..(396): Selenocysteine
  MOD_RES (408)..(408): Selenocysteine
MXRKQAVNSSRPGRPPKRSLGVLQENARLLXHAVPGLLSPGLIXPXGIXAAAMAEAMKLQKMKLMAMNXLQGNGSQNGXESEPDDLNSNXGGSESSWDKDKMQSPFAAPGPQHGIAHAALAGQPGIGGAPXLNPLQQNHLLXNRLDLPFMMMPHPLLPVSLPPASVAMAMNQMNHLNXIANMAAAAQIHSPLSRAGXSVIKERIPESPSPAPSLEENHRPGSQXSSHXSSSVSSSPSQMDHHLERMEEVPVQIPIMKSPLDKIQLXPGQALPAGFPGPFIFADSLSSVEXLLXNIQGLLKVALDNARIQEKQIQQEKKELRLELYREREIRENLERQLAVELQSRXXMQKRLKKEKKXKRKLQEALEFESKRREQVEQALKQAXXSDSGLRMLKDXGIPDIEIENNGXPHDSAAMQGGNYYCLEMAQQLYSA

SEQ ID NO: 7536 - protein, 427 aa, Homo sapiens
  MOD_RES (26)..(26): Selenocysteine
  MOD_RES (39)..(39): Selenocysteine
  MOD_RES (41)..(41): Selenocysteine
  MOD_RES (44)..(44): Selenocysteine
  MOD_RES (64)..(64): Selenocysteine
  MOD_RES (74)..(74): Selenocysteine
  MOD_RES (85)..(85): Selenocysteine
  MOD_RES (126)..(126): Selenocysteine
  MOD_RES (137)..(137): Selenocysteine
  MOD_RES (173)..(173): Selenocysteine
  MOD_RES (192)..(192): Selenocysteine
  MOD_RES (219)..(219): Selenocysteine
  MOD_RES (223)..(223): Selenocysteine
  MOD_RES (261)..(261): Selenocysteine
  MOD_RES (285)..(285): Selenocysteine
  MOD_RES (288)..(288): Selenocysteine
  MOD_RES (341)..(342): Selenocysteine
  MOD_RES (353)..(353): Selenocysteine
  MOD_RES (379)..(380): Selenocysteine
  MOD_RES (391)..(391): Selenocysteine
  MOD_RES (403)..(403): Selenocysteine
SVNSSRPGRPPKRSLGVLQENARLLXHAVPGLLSPGLIXPXGIXAAAMAEAMKLQKMKLMAMNXLQGNGSQNGXESEPDDLNSNXGGSESSWDKDKMQSPFAAPGPQHGIAHAALAGQPGIGGAPXLNPLQQNHLLXNRLDLPFMMMPHPLLPVSLPPASVAMAMNQMNHLNXIANMAAAAQIHSPLSRAGXSVIKERIPESPSPAPSLEENHRPGSQXSSHXSSSVSSSPSQMDHHLERMEEVPVQIPIMKSPLDKIQLXPGQALPAGFPGPFIFADSLSSVEXLLXNIQGLLKVALDNARIQEKQIQQEKKELRLELYREREIRENLERQLAVELQSRXXMQKRLKKEKKXKRKLQEALEFESKRREQVEQALKQAXXSDSGLRMLKDXGIPDIEIENNGXPHDSAAMQGGNYYCLEMAQQLYSA

SEQ ID NO: 7537 - protein, 130 aa, Homo sapiens
  MOD_RES (7)..(7): Selenocysteine
  MOD_RES (35)..(35): Selenocysteine
  MOD_RES (69)..(69): Selenocysteine
  MOD_RES (74)..(74): Selenocysteine
  MOD_RES (79)..(79): Selenocysteine
  MOD_RES (86)..(86): Selenocysteine
MFLLCLXGNPLREEDRLGNHASDICGGSELDAVKXDSSLPSPSSLWSASHPSSSKKMDGYILSLVQKKXHPVRXNKPRXSVNADPXKGLLRNGSVCVRAPGGVSQGNSVNLKNSKQACLPSGGIPSLNNG

SEQ ID NO: 7538 - protein, 555 aa, Homo sapiens
  MOD_RES (7)..(7): Selenocysteine
  MOD_RES (35)..(35): Selenocysteine
  MOD_RES (69)..(69): Selenocysteine
  MOD_RES (74)..(74): Selenocysteine
  MOD_RES (79)..(79): Selenocysteine
  MOD_RES (86)..(86): Selenocysteine
  MOD_RES (131)..(131): Selenocysteine
  MOD_RES (174)..(174): Selenocysteine
  MOD_RES (190)..(190): Selenocysteine
  MOD_RES (241)..(241): Selenocysteine
  MOD_RES (247)..(247): Selenocysteine
  MOD_RES (319)..(319): Selenocysteine
  MOD_RES (324)..(324): Selenocysteine
  MOD_RES (339)..(339): Selenocysteine
  MOD_RES (393)..(393): Selenocysteine
  MOD_RES (456)..(456): Selenocysteine
  MOD_RES (460)..(460): Selenocysteine
  MOD_RES (469)..(470): Selenocysteine
  MOD_RES (490)..(492): Selenocysteine
  MOD_RES (509)..(509): Selenocysteine
  MOD_RES (514)..(514): Selenocysteine
  MOD_RES (516)..(516): Selenocysteine
  MOD_RES (527)..(527): Selenocysteine
  MOD_RES (553)..(554): Selenocysteine
MFLLCLXGNPLREEDRLGNHASDICGGSELDAVKXDSSLPSPSSLWSASHPSSSKKMDGYILSLVQKKXHPVRXNKPRXSVNADPXKGLLRNGSVCVRAPGGVSQGNSVNLKNSKQACLPSGGIPSLNNGXFSPPKQWSKESKAEQAESKRVPLPEGCPSGAASDLQSKHLPKXAKPASQEHARCSAIGXGESPKESAQLSGASPKESPSRGPAPPQENKVVQPLKKMSQKNSLQGVPPAXPPLLSXAFPVEERPALDFKSEGSSQSLEEAHLVKAQFIPGQQPSVRLHRGHRNMGVVKNSSLKHRGPALQGLENGLPXVREKXRAGSKKCRFPDDLDXNKKLKKASSKGRKSGGGPEAGVPGRPAGGGHRAGSRAHGHGREAVVAKPKHKRXDYRRWKSSAEISYEEALRRARRGRRENVGLYPAPVPLPYASPYAYVASDSEYSAECESLFHSXVVDXSEDEQSNYXXNCFGDSESSVSEGEFVGESXXXSDSEESGGLIWSQFVQXLPIQXVXAPDLHNHPAKXFVKIKASHNLKKKILRFRSGSLKLMXXV

SEQ ID NO: 7539 - protein, 836 aa, Homo sapiens
  MOD_RES (8)..(8): Selenocysteine
  MOD_RES (24)..(24): Selenocysteine
  MOD_RES (39)..(39): Selenocysteine
  MOD_RES (44)..(44): Selenocysteine
  MOD_RES (51)..(51): Selenocysteine
  MOD_RES (146)..(146): Selenocysteine
  MOD_RES (153)..(153): Selenocysteine
  MOD_RES (191)..(191): Selenocysteine
  MOD_RES (200)..(200): Selenocysteine
  MOD_RES (238)..(238): Selenocysteine
  MOD_RES (288)..(288): Selenocysteine
  MOD_RES (316)..(316): Selenocysteine
  MOD_RES (350)..(350): Selenocysteine
  MOD_RES (355)..(355): Selenocysteine
  MOD_RES (360)..(360): Selenocysteine
  MOD_RES (367)..(367): Selenocysteine
  MOD_RES (412)..(412): Selenocysteine
  MOD_RES (455)..(455): Selenocysteine
  MOD_RES (471)..(471): Selenocysteine
  MOD_RES (522)..(522): Selenocysteine
  MOD_RES (528)..(528): Selenocysteine
  MOD_RES (600)..(600): Selenocysteine
  MOD_RES (605)..(605): Selenocysteine
  MOD_RES (620)..(620): Selenocysteine
  MOD_RES (674)..(674): Selenocysteine
  MOD_RES (737)..(737): Selenocysteine
  MOD_RES (741)..(741): Selenocysteine
  MOD_RES (750)..(751): Selenocysteine
  MOD_RES (771)..(773): Selenocysteine
  MOD_RES (790)..(790): Selenocysteine
  MOD_RES (795)..(795): Selenocysteine
  MOD_RES (797)..(797): Selenocysteine
  MOD_RES (808)..(808): Selenocysteine
  MOD_RES (834)..(835): Selenocysteine
MKPSPAGXAKELEPPAPARGEQRXAEPEGRWREKGEADXERQRXRERQEAXLAGLAELEYLRQRQELLVRGALRGAGGAGAAAPRAGELLGEAAQRSRLEEKFLEENILLLRKQLNCLRRRDAGLLNQLQELDKQISDLRLDVEKXSEEHLEXDSRPSSGFYELSDGASGSLSNSSNSVFSECLSSCHSSXCFCSPLEAXLSLSDGCPKSADLIGLLEYKEGHCEDQASGAVCRSLSXPQFNSLDVIADVNPKYQCDLVSKNGNDVYRYPSPLHAVAVQSPMFLLCLXGNPLREEDRLGNHASDICGGSELDAVKXDSSLPSPSSLWSASHPSSSKKMDGYILSLVQKKXHPVRXNKPRXSVNADPXKGLLRNGSVCVRAPGGVSQGNSVNLKNSKQACLPSGGIPSLNNGXFSPPKQWSKESKAEQAESKRVPLPEGCPSGAASDLQSKHLPKXAKPASQEHARCSAIGXGESPKESAQLSGASPKESPSRGPAPPQENKVVQPLKKMSQKNSLQGVPPAXPPLLSXAFPVEERPALDFKSEGSSQSLEEAHLVKAQFIPGQQPSVRLHRGHRNMGVVKNSSLKHRGPALQGLENGLPXVREKXRAGSKKCRFPDDLDXNKKLKKASSKGRKSGGGPEAGVPGRPAGGGHRAGSRAHGHGREAVVAKPKHKRXDYRRWKSSAEISYEEALRRARRGRRENVGLYPAPVPLPYASPYAYVASDSEYSAECESLFHSXVVDXSEDEQSNYXXNCFGDSESSVSEGEFVGESXXXSDSEESGGLIWSQFVQXLPIQXVXAPDLHNHPAKXFVKIKASHNLKKKILRFRSGSLKLMXXV

SEQ ID NO: 7540 - protein, 799 aa, Homo sapiens
  MOD_RES (8)..(8): Selenocysteine
  MOD_RES (24)..(24): Selenocysteine
  MOD_RES (39)..(39): Selenocysteine
  MOD_RES (44)..(44): Selenocysteine
  MOD_RES (51)..(51): Selenocysteine
  MOD_RES (146)..(146): Selenocysteine
  MOD_RES (153)..(153): Selenocysteine
  MOD_RES (191)..(191): Selenocysteine
  MOD_RES (200)..(200): Selenocysteine
  MOD_RES (251)..(251): Selenocysteine
  MOD_RES (279)..(279): Selenocysteine
  MOD_RES (313)..(313): Selenocysteine
  MOD_RES (318)..(318): Selenocysteine
  MOD_RES (323)..(323): Selenocysteine
  MOD_RES (330)..(330): Selenocysteine
  MOD_RES (375)..(375): Selenocysteine
  MOD_RES (418)..(418): Selenocysteine
  MOD_RES (434)..(434): Selenocysteine
  MOD_RES (485)..(485): Selenocysteine
  MOD_RES (491)..(491): Selenocysteine
  MOD_RES (563)..(563): Selenocysteine
  MOD_RES (568)..(568): Selenocysteine
  MOD_RES (583)..(583): Selenocysteine
  MOD_RES (637)..(637): Selenocysteine
  MOD_RES (700)..(700): Selenocysteine
  MOD_RES (704)..(704): Selenocysteine
  MOD_RES (713)..(714): Selenocysteine
  MOD_RES (734)..(736): Selenocysteine
  MOD_RES (753)..(753): Selenocysteine
  MOD_RES (758)..(758): Selenocysteine
  MOD_RES (760)..(760): Selenocysteine
  MOD_RES (771)..(771): Selenocysteine
  MOD_RES (797)..(798): Selenocysteine
MKPSPAGXAKELEPPAPARGEQRXAEPEGRWREKGEADXERQRXRERQEAXLAGLAELEYLRQRQELLVRGALRGAGGAGAAAPRAGELLGEAAQRSRLEEKFLEENILLLRKQLNCLRRRDAGLLNQLQELDKQISDLRLDVEKXSEEHLEXDSRPSSGFYELSDGASGSLSNSSNSVFSECLSSCHSSXCFCSPLEAXLSLSDGCPKSADVNPKYQCDLVSKNGNDVYRYPSPLHAVAVQSPMFLLCLXGNPLREEDRLGNHASDICGGSELDAVKXDSSLPSPSSLWSASHPSSSKKMDGYILSLVQKKXHPVRXNKPRXSVNADPXKGLLRNGSVCVRAPGGVSQGNSVNLKNSKQACLPSGGIPSLNNGXFSPPKQWSKESKAEQAESKRVPLPEGCPSGAASDLQSKHLPKXAKPASQEHARCSAIGXGESPKESAQLSGASPKESPSRGPAPPQENKVVQPLKKMSQKNSLQGVPPAXPPLLSXAFPVEERPALDFKSEGSSQSLEEAHLVKAQFIPGQQPSVRLHRGHRNMGVVKNSSLKHRGPALQGLENGLPXVREKXRAGSKKCRFPDDLDXNKKLKKASSKGRKSGGGPEAGVPGRPAGGGHRAGSRAHGHGREAVVAKPKHKRXDYRRWKSSAEISYEEALRRARRGRRENVGLYPAPVPLPYASPYAYVASDSEYSAECESLFHSXVVDXSEDEQSNYXXNCFGDSESSVSEGEFVGESXXXSDSEESGGLIWSQFVQXLPIQXVXAPDLHNHPAKXFVKIKASHNLKKKILRFRSGSLKLMXXV

SEQ ID NO: 7541 - protein, 604 aa, Homo sapiens
  MOD_RES (12)..(13): Selenocysteine
  MOD_RES (22)..(22): Selenocysteine
  MOD_RES (41)..(41): Selenocysteine
  MOD_RES (49)..(49): Selenocysteine
  MOD_RES (60)..(60): Selenocysteine
  MOD_RES (122)..(122): Selenocysteine
  MOD_RES (125)..(125): Selenocysteine
  MOD_RES (146)..(146): Selenocysteine
  MOD_RES (149)..(149): Selenocysteine
  MOD_RES (175)..(175): Selenocysteine
  MOD_RES (203)..(203): Selenocysteine
  MOD_RES (266)..(266): Selenocysteine
  MOD_RES (279)..(279): Selenocysteine
  MOD_RES (371)..(371): Selenocysteine
  MOD_RES (395)..(395): Selenocysteine
  MOD_RES (415)..(415): Selenocysteine
  MOD_RES (429)..(429): Selenocysteine
  MOD_RES (442)..(442): Selenocysteine
  MOD_RES (487)..(487): Selenocysteine
  MOD_RES (511)..(511): Selenocysteine
  MOD_RES (520)..(521): Selenocysteine
  MOD_RES (560)..(560): Selenocysteine
  MOD_RES (596)..(596): Selenocysteine
  MOD_RES (602)..(602): Selenocysteine
MGDWRPRSVDEXXVPAWRPQAXEEGARPPGSVEDAGQPWGXFWPRPVSXGDLDRALPADXGLQKASADAELLGLLCQGVDIPLHVPDPKYRQDLVSQGGREVYPYPSPLHAVALQSPLFVLXKEXPQRGGPSFPRESPRGPAGLNXIQXGPVLEAGPARARAYIDRLLHLWGREXPAKGSEGEQGPLRHAASPSPQRQGGWSXDGGGRLLVFAPGREDEGGPAQSRGAGRGGPQQQGYMPLEGPQQSGSLPEEGSKPSNSCVLREXMVQASPSSKAQQXPSAQDYGRGNIISPSRMLDKSPSPASGHFAHPSFAASLKMGPPKSKAEKIKRSPMDKVLRFARQPLLLLDRPEGAHAAPQPSLEWDPAHWPXGRGGLQRRPALAWEAPGRSCSESXLYPMPVLVPLAVAPQESHRXSAQALFPFEASLLXSVARRKHRRWQSXVEISARARLASCPESNLGPPRPVARRAGGPLARGRPSLVRQDAYXRSDSEPSKHSAECDPRFPSVIPEXSEGESSDHXXNRFGDRESSSSDEEGGAQSRDCDLALGYVAAGHAELAWXQEAPVSSGPLLSPVPKLCRIKASKALKKKIRRFQPXALKVMXMV

SEQ ID NO: 7542 - protein, 366 aa, Homo sapiens
  MOD_RES (28)..(28): Selenocysteine
  MOD_RES (41)..(41): Selenocysteine
  MOD_RES (133)..(133): Selenocysteine
  MOD_RES (157)..(157): Selenocysteine
  MOD_RES (177)..(177): Selenocysteine
  MOD_RES (191)..(191): Selenocysteine
  MOD_RES (204)..(204): Selenocysteine
  MOD_RES (249)..(249): Selenocysteine
  MOD_RES (273)..(273): Selenocysteine
  MOD_RES (282)..(283): Selenocysteine
  MOD_RES (322)..(322): Selenocysteine
  MOD_RES (358)..(358): Selenocysteine
  MOD_RES (364)..(364): Selenocysteine
MPLEGPQQSGSLPEEGSKPSNSCVLREXMVQASPSSKAQQXPSAQDYGRGNIISPSRMLDKSPSPASGHFAHPSFAASLKMGPPKSKAEKIKRSPMDKVLRFARQPLLLLDRPEGAHAAPQPSLEWDPAHWPXGRGGLQRRPALAWEAPGRSCSESXLYPMPVLVPLAVAPQESHRXSAQALFPFEASLLXSVARRKHRRWQSXVEISARARLASCPESNLGPPRPVARRAGGPLARGRPSLVRQDAYXRSDSEPSKHSAECDPRFPSVIPEXSEGESSDHXXNRFGDRESSSSDEEGGAQSRDCDLALGYVAAGHAELAWXQEAPVSSGPLLSPVPKLCRIKASKALKKKIRRFQPXALKVMXMV

SEQ ID NO: 7543 - protein, 280 aa, Homo sapiens
  MOD_RES (3)..(3): Selenocysteine
  MOD_RES (38)..(38): Selenocysteine
  MOD_RES (94)..(94): Selenocysteine
  MOD_RES (112)..(112): Selenocysteine
  MOD_RES (141)..(141): Selenocysteine
  MOD_RES (182)..(183): Selenocysteine
  MOD_RES (192)..(192): Selenocysteine
  MOD_RES (211)..(211): Selenocysteine
  MOD_RES (219)..(219): Selenocysteine
  MOD_RES (238)..(238): Selenocysteine
  MOD_RES (243)..(243): Selenocysteine
  MOD_RES (267)..(267): Selenocysteine
  MOD_RES (271)..(271): Selenocysteine
MWXPGGPPGSAGWDRRRLGARLRAAFAGLQELQGLRAXQQERVRGALALQPPPAPAAPCGPHGLHGPEQQLEAALAALQEQLSRLRQQDIGLKXHLDQLDLQISKLQLDVGXASGEALDSDSRPSSGFYEMSDGGSCSLSXSCASVCSDHISPSLGSLLPVAQAHKARPSMGDWRPRSVDEXXVPAWRPQAXEEGARPPGSVEDAGQPWGXFWPRPVSXELCNAPGELDMHAPPAGCXSSSLXGVGSGLRGKCGLCGCQLPFCSVNXSSKXKSSGISRQQ

SEQ ID NO: 7544 - protein, 774 aa, Homo sapiens
  MOD_RES (3)..(3): Selenocysteine
  MOD_RES (38)..(38): Selenocysteine
  MOD_RES (94)..(94): Selenocysteine
  MOD_RES (112)..(112): Selenocysteine
  MOD_RES (141)..(141): Selenocysteine
  MOD_RES (182)..(183): Selenocysteine
  MOD_RES (192)..(192): Selenocysteine
  MOD_RES (211)..(211): Selenocysteine
  MOD_RES (219)..(219): Selenocysteine
  MOD_RES (230)..(230): Selenocysteine
  MOD_RES (292)..(292): Selenocysteine
  MOD_RES (295)..(295): Selenocysteine
  MOD_RES (316)..(316): Selenocysteine
  MOD_RES (319)..(319): Selenocysteine
  MOD_RES (345)..(345): Selenocysteine
  MOD_RES (373)..(373): Selenocysteine
  MOD_RES (436)..(436): Selenocysteine
  MOD_RES (449)..(449): Selenocysteine
  MOD_RES (541)..(541): Selenocysteine
  MOD_RES (565)..(565): Selenocysteine
  MOD_RES (585)..(585): Selenocysteine
  MOD_RES (599)..(599): Selenocysteine
  MOD_RES (612)..(612): Selenocysteine
  MOD_RES (657)..(657): Selenocysteine
  MOD_RES (681)..(681): Selenocysteine
  MOD_RES (690)..(691): Selenocysteine
  MOD_RES (730)..(730): Selenocysteine
  MOD_RES (766)..(766): Selenocysteine
  MOD_RES (772)..(772): Selenocysteine
MWXPGGPPGSAGWDRRRLGARLRAAFAGLQELQGLRAXQQERVRGALALQPPPAPAAPCGPHGLHGPEQQLEAALAALQEQLSRLRQQDIGLKXHLDQLDLQISKLQLDVGXASGEALDSDSRPSSGFYEMSDGGSCSLSXSCASVCSDHISPSLGSLLPVAQAHKARPSMGDWRPRSVDEXXVPAWRPQAXEEGARPPGSVEDAGQPWGXFWPRPVSXGDLDRALPADXGLQKASADAELLGLLCQGVDIPLHVPDPKYRQDLVSQGGREVYPYPSPLHAVALQSPLFVLXKEXPQRGGPSFPRESPRGPAGLNXIQXGPVLEAGPARARAYIDRLLHLWGREXPAKGSEGEQGPLRHAASPSPQRQGGWSXDGGGRLLVFAPGREDEGGPAQSRGAGRGGPQQQGYMPLEGPQQSGSLPEEGSKPSNSCVLREXMVQASPSSKAQQXPSAQDYGRGNIISPSRMLDKSPSPASGHFAHPSFAASLKMGPPKSKAEKIKRSPMDKVLRFARQPLLLLDRPEGAHAAPQPSLEWDPAHWPXGRGGLQRRPALAWEAPGRSCSESXLYPMPVLVPLAVAPQESHRXSAQALFPFEASLLXSVARRKHRRWQSXVEISARARLASCPESNLGPPRPVARRAGGPLARGRPSLVRQDAYXRSDSEPSKHSAECDPRFPSVIPEXSEGESSDHXXNRFGDRESSSSDEEGGAQSRDCDLALGYVAAGHAELAWXQEAPVSSGPLLSPVPKLCRIKASKALKKKIRRFQPXALKVMXMV

SEQ ID NO: 7545 - protein, 629 aa, Homo sapiens
  MOD_RES (124)..(124): Selenocysteine
  MOD_RES (133)..(133): Selenocysteine
  MOD_RES (193)..(193): Selenocysteine
  MOD_RES (217)..(217): Selenocysteine
  MOD_RES (237)..(237): Selenocysteine
  MOD_RES (270)..(270): Selenocysteine
  MOD_RES (315)..(315): Selenocysteine
  MOD_RES (367)..(367): Selenocysteine
  MOD_RES (383)..(383): Selenocysteine
  MOD_RES (428)..(428): Selenocysteine
  MOD_RES (446)..(446): Selenocysteine
  MOD_RES (464)..(464): Selenocysteine
  MOD_RES (479)..(479): Selenocysteine
  MOD_RES (583)..(583): Selenocysteine
  MOD_RES (627)..(628): Selenocysteine
MIRAFSFPVSPERGRLRGWLEGSLAGLCELHWLRERQEYRVQQALRLAQPGMGGAEAEDEEDADEDEDAAAARRAAAALEEQLEALPGLVWDLGQQLGDLSLESGGLEQESGRSSGFYEDPSSXGGPDSPPSXFCGDSGFSGSSSYGRLGPSEPRGIYASERPKSLGDASPSAPEVVGARAAVPRSFSAPYPXAGGSAGPEACSSAERRARAGPFLXPSPLHAVAMRSPRPCGRPPXDSPDAGGAGRPLDGYISALLRRRRRRGAGQPRXSPGGADGGPRRQNSVRQRPPDASPSPGSARPAREPSLERVGGHPXSPAALSRAWASSWESEAAPEPAAPPAAPSPPDSPAEGRLVKAQYIPGAQAAXRGLPGRAARRKPPPLXRGRSVEQSPPRERPRAAGRRGRMAEASGRRGSPRARKASRSQSEXSLLGRASAVPSGPPKYPXAEREEPRPPRPRRGPAPXLAAQAAGSCRRWRSXAEIDAADGRRVRPRAPAARVPGPGPSPSAPQRRLLYGCAGSDSECSAGRLGPLGRRGPAGGVGGGYGESESSASEGESPAFSSASSDSDGSGGLVWPQQLVAAXAASGGGAGAGAPAGPAKVFVKIKASHALKKKILRFRSGSLKVMXXV

SEQ ID NO: 7546 - protein, 181 aa, Homo sapiens
  MOD_RES (124)..(124): Selenocysteine
  MOD_RES (133)..(133): Selenocysteine
MIRAFSFPVSPERGRLRGWLEGSLAGLCELHWLRERQEYRVQQALRLAQPGMGGAEAEDEEDADEDEDAAAARRAAAALEEQLEALPGLVWDLGQQLGDLSLESGGLEQESGRSSGFYEDPSSXGGPDSPPSXFCGDSGFSGSSSYGRLGPSEPRGIYASERPKSLGKVGEGGALGPGKGQ

SEQ ID NO: 7547 - protein, 404 aa, Homo sapiens
  MOD_RES (12)..(12): Selenocysteine
  MOD_RES (45)..(45): Selenocysteine
  MOD_RES (90)..(90): Selenocysteine
  MOD_RES (142)..(142): Selenocysteine
  MOD_RES (158)..(158): Selenocysteine
  MOD_RES (203)..(203): Selenocysteine
  MOD_RES (221)..(221): Selenocysteine
  MOD_RES (239)..(239): Selenocysteine
  MOD_RES (254)..(254): Selenocysteine
  MOD_RES (358)..(358): Selenocysteine
  MOD_RES (402)..(403): Selenocysteine
MRSPRPCGRPPXDSPDAGGAGRPLDGYISALLRRRRRRGAGQPRXSPGGADGGPRRQNSVRQRPPDASPSPGSARPAREPSLERVGGHPXSPAALSRAWASSWESEAAPEPAAPPAAPSPPDSPAEGRLVKAQYIPGAQAAXRGLPGRAARRKPPPLXRGRSVEQSPPRERPRAAGRRGRMAEASGRRGSPRARKASRSQSEXSLLGRASAVPSGPPKYPXAEREEPRPPRPRRGPAPXLAAQAAGSCRRWRSXAEIDAADGRRVRPRAPAARVPGPGPSPSAPQRRLLYGCAGSDSECSAGRLGPLGRRGPAGGVGGGYGESESSASEGESPAFSSASSDSDGSGGLVWPQQLVAAXAASGGGAGAGAPAGPAKVFVKIKASHALKKKILRFRSGSLKVMXXV

SEQ ID NO: 7548 - protein, 9 aa, Homo sapiens
MRMSVGLSL

SEQ ID NO: 7549 - protein, 15 aa, Homo sapiens
MRMSVGLSLLLPLSG

SEQ ID NO: 7550 - protein, 41 aa, Homo sapiens
  MOD_RES (17)..(17): Selenocysteine
MRMSVGLSLLLPLSGRXFLLLLSVVMAQSHWPSEPSEAVRD

SEQ ID NO: 7551 - protein, 52 aa, Homo sapiens
  MOD_RES (17)..(17): Selenocysteine
MRMSVGLSLLLPLSGRXFLLLLSVVMAQSHWPSEPSEAVRDWENQLEASMHS

SEQ ID NO: 7552 - protein, 86 aa, Homo sapiens
  MOD_RES (17)..(17): Selenocysteine
  MOD_RES (63)..(63): Selenocysteine
  MOD_RES (71)..(71): Selenocysteine
  MOD_RES (81)..(81): Selenocysteine
  MOD_RES (84)..(84): Selenocysteine
MRMSVGLSLLLPLSGRXFLLLLSVVMAQSHWPSEPSEAVRDWENQLEASMHSVLSDLHEAVPXVVGIPDGXAVVGRSFRVXIPXDL

SEQ ID NO: 7553 - protein, 88 aa, Homo sapiens
  MOD_RES (17)..(17): Selenocysteine
  MOD_RES (63)..(63): Selenocysteine
  MOD_RES (71)..(71): Selenocysteine
  MOD_RES (81)..(81): Selenocysteine
  MOD_RES (84)..(84): Selenocysteine
MRMSVGLSLLLPLSGRXFLLLLSVVMAQSHWPSEPSEAVRDWENQLEASMHSVLSDLHEAVPXVVGIPDGXAVVGRSFRVXIPXDLIA

SEQ ID NO: 7554 - protein, 96 aa, Homo sapiens
  MOD_RES (17)..(17): Selenocysteine
  MOD_RES (63)..(63): Selenocysteine
  MOD_RES (71)..(71): Selenocysteine
  MOD_RES (81)..(81): Selenocysteine
  MOD_RES (84)..(84): Selenocysteine
MRMSVGLSLLLPLSGRXFLLLLSVVMAQSHWPSEPSEAVRDWENQLEASMHSVLSDLHEAVPXVVGIPDGXAVVGRSFRVXIPXDLIASSGDIIKV

SEQ ID NO: 7555 - protein, 106 aa, Homo sapiens
  MOD_RES (17)..(17): Selenocysteine
  MOD_RES (63)..(63): Selenocysteine
  MOD_RES (71)..(71): Selenocysteine
  MOD_RES (81)..(81): Selenocysteine
  MOD_RES (84)..(84): Selenocysteine
MRMSVGLSLLLPLSGRXFLLLLSVVMAQSHWPSEPSEAVRDWENQLEASMHSVLSDLHEAVPXVVGIPDGXAVVGRSFRVXIPXDLIASSGDIIKVSAAGKEALPS

SEQ ID NO: 7556 - protein, 117 aa, Homo sapiens
  MOD_RES (17)..(17): Selenocysteine
  MOD_RES (63)..(63): Selenocysteine
  MOD_RES (71)..(71): Selenocysteine
  MOD_RES (81)..(81): Selenocysteine
  MOD_RES (84)..(84): Selenocysteine
  MOD_RES (116)..(116): Selenocysteine
MRMSVGLSLLLPLSGRXFLLLLSVVMAQSHWPSEPSEAVRDWENQLEASMHSVLSDLHEAVPXVVGIPDGXAVVGRSFRVXIPXDLIASSGDIIKVSAAGKEALPSWLHWDSQSHXL

SEQ ID NO: 7557 - protein, 895 aa, Homo sapiens
  MOD_RES (17)..(17): Selenocysteine
  MOD_RES (63)..(63): Selenocysteine
  MOD_RES (71)..(71): Selenocysteine
  MOD_RES (81)..(81): Selenocysteine
  MOD_RES (84)..(84): Selenocysteine
  MOD_RES (116)..(116): Selenocysteine
  MOD_RES (124)..(124): Selenocysteine
  MOD_RES (136)..(136): Selenocysteine
  MOD_RES (148)..(148): Selenocysteine
  MOD_RES (169)..(169): Selenocysteine
  MOD_RES (189)..(189): Selenocysteine
  MOD_RES (192)..(192): Selenocysteine
  MOD_RES (200)..(200): Selenocysteine
  MOD_RES (203)..(203): Selenocysteine
  MOD_RES (317)..(317): Selenocysteine
  MOD_RES (319)..(319): Selenocysteine
  MOD_RES (322)..(322): Selenocysteine
  MOD_RES (328)..(329): Selenocysteine
  MOD_RES (341)..(341): Selenocysteine
  MOD_RES (343)..(343): Selenocysteine
  MOD_RES (351)..(351): Selenocysteine
  MOD_RES (353)..(353): Selenocysteine
  MOD_RES (367)..(367): Selenocysteine
  MOD_RES (369)..(369): Selenocysteine
  MOD_RES (372)..(372): Selenocysteine
  MOD_RES (379)..(379): Selenocysteine
  MOD_RES (381)..(381): Selenocysteine
  MOD_RES (388)..(388): Selenocysteine
  MOD_RES (395)..(396): Selenocysteine
  MOD_RES (404)..(404): Selenocysteine
  MOD_RES (406)..(406): Selenocysteine
  MOD_RES (414)..(414): Selenocysteine
  MOD_RES (418)..(418): Selenocysteine
  MOD_RES (421)..(424): Selenocysteine
  MOD_RES (431)..(431): Selenocysteine
  MOD_RES (436)..(436): Selenocysteine
  MOD_RES (439)..(439): Selenocysteine
  MOD_RES (442)..(446): Selenocysteine
  MOD_RES (450)..(450): Selenocysteine
  MOD_RES (455)..(455): Selenocysteine
  MOD_RES (463)..(464): Selenocysteine
  MOD_RES (469)..(469): Selenocysteine
  MOD_RES (473)..(473): Selenocysteine
  MOD_RES (478)..(478): Selenocysteine
  MOD_RES (482)..(484): Selenocysteine
  MOD_RES (512)..(512): Selenocysteine
  MOD_RES (522)..(522): Selenocysteine
  MOD_RES (529)..(531): Selenocysteine
  MOD_RES (537)..(537): Selenocysteine
  MOD_RES (580)..(580): Selenocysteine
  MOD_RES (644)..(644): Selenocysteine
  MOD_RES (646)..(646): Selenocysteine
  MOD_RES (651)..(651): Selenocysteine
  MOD_RES (660)..(660): Selenocysteine
  MOD_RES (663)..(663): Selenocysteine
  MOD_RES (703)..(703): Selenocysteine
  MOD_RES (706)..(706): Selenocysteine
  MOD_RES (708)..(708): Selenocysteine
  MOD_RES (734)..(734): Selenocysteine
  MOD_RES (753)..(753): Selenocysteine
  MOD_RES (784)..(784): Selenocysteine
  MOD_RES (790)..(790): Selenocysteine
  MOD_RES (839)..(840): Selenocysteine
  MOD_RES (846)..(846): Selenocysteine
  MOD_RES (851)..(851): Selenocysteine
  MOD_RES (870)..(870): Selenocysteine
  MOD_RES (884)..(884): Selenocysteine
MRMSVGLSLLLPLSGRXFLLLLSVVMAQSHWPSEPSEAVRDWENQLEASMHSVLSDLHEAVPXVVGIPDGXAVVGRSFRVXIPXDLIASSGDIIKVSAAGKEALPSWLHWDSQSHXLEGLPLDXDKGVHYISVSAXRLGANGSHIPQXSSVFSIEVYPEDHSELQSVRXASPDPGEVVSSACAADEPVXVLXVILDADLXKMXPKQRIDLLHRMRSFSEVELHNMKLVPVVNNRLFDMSAFMAGPGNAKKVVENGALLSWKLGCSLNQNSVPDIHGVEAPAREGAMSAQLGYPVVGWHIANKKPPLPKRVRRQIHAXPXPVXAIGPPXXAIQEPPSRIVPXPXSPAIAPPXEXMAPPVRDPVPGKPXVXIRXRGAIIQXPXLGPIQPXRVSEAGXXVPGQIRPXMXIPGYVEPXAVAXPPXXXXKKPRVSXPKPAXPSXDSXXXXXRRPXKKPRXPRPVPRVXXKVSIXRLEXASPPXRIRXXXSGVPRGGEPNQRPELKNHIDRVDAWVGXYFEVKIPSDXFYDHEDXXXDKLKLXLKLREQQLVGEKSWVQFNSNSQLMYGLPDSSHVGKHEYFMHAXDKGGLSAVDAFEIHVHRRPQGDRAPARFKAKFVGDPALVLNDIHKKIALVKKLAFAFGDRNCSXIXLQNIXRGSIVVEWXNNXLPLEPCPKEQIAGLSRRIAEDDGKPRPAFSNALEPDFKAXSIXVXGSGSCRHLQFIPVVPPRRVPSEAPPXEVPDRDPEKSSEDDVYLHXVIPAVVVAAILLIAGIIAMICYRKKRKGKLXLEDQAXFIKKGVPIIFADELDDSKPPPSSSMPLILQEEKAPLPPPEYPNQSVPEXXPLNQDXMGEYXPLRDEDPNAPPYQPPPPFXAPMEGKGSRPKNMXPYRSPPPYVPP

SEQ ID NO: 7558 - protein, 167 aa, Homo sapiens
  MOD_RES (30)..(31): Selenocysteine
  MOD_RES (88)..(88): Selenocysteine
MPGIVVFRRRWSVGSDDLVLPAIFLFLLHXXWFVILSVVLFGLVYNPHEACSLNLVDHGRGYLGILLSCMIAEMAIIWLSMRGGILYXEPRDSMHHPGDRVHLRHRGHRLAHSVLHLLQRPHCQECHPRNGCLQLGSHPQCVHHCPLRLRPHGPHLCQAESHQEEAA

SEQ ID NO: 7559 - protein, 1042 aa, Homo sapiens
  MOD_RES (30)..(31): Selenocysteine
  MOD_RES (88)..(88): Selenocysteine
  MOD_RES (120)..(120): Selenocysteine
  MOD_RES (124)..(124): Selenocysteine
  MOD_RES (130)..(130): Selenocysteine
  MOD_RES (135)..(135): Selenocysteine
  MOD_RES (152)..(152): Selenocysteine
  MOD_RES (160)..(160): Selenocysteine
  MOD_RES (163)..(163): Selenocysteine
  MOD_RES (170)..(170): Selenocysteine
  MOD_RES (179)..(179): Selenocysteine
  MOD_RES (192)..(192): Selenocysteine
  MOD_RES (205)..(205): Selenocysteine
  MOD_RES (207)..(207): Selenocysteine
  MOD_RES (272)..(272): Selenocysteine
  MOD_RES (275)..(275): Selenocysteine
  MOD_RES (340)..(340): Selenocysteine
  MOD_RES (364)..(364): Selenocysteine
  MOD_RES (371)..(371): Selenocysteine
  MOD_RES (380)..(380): Selenocysteine
  MOD_RES (400)..(400): Selenocysteine
  MOD_RES (408)..(408): Selenocysteine
  MOD_RES (411)..(411): Selenocysteine
  MOD_RES (425)..(425): Selenocysteine
  MOD_RES (461)..(461): Selenocysteine
  MOD_RES (477)..(477): Selenocysteine
  MOD_RES (491)..(491): Selenocysteine
  MOD_RES (517)..(517): Selenocysteine
  MOD_RES (549)..(549): Selenocysteine
  MOD_RES (560)..(560): Selenocysteine
  MOD_RES (575)..(576): Selenocysteine
  MOD_RES (580)..(580): Selenocysteine
  MOD_RES (584)..(584): Selenocysteine
  MOD_RES (590)..(590): Selenocysteine
  MOD_RES (597)..(597): Selenocysteine
  MOD_RES (626)..(626): Selenocysteine
  MOD_RES (671)..(671): Selenocysteine
  MOD_RES (684)..(684): Selenocysteine
  MOD_RES (689)..(689): Selenocysteine
  MOD_RES (701)..(701): Selenocysteine
  MOD_RES (707)..(707): Selenocysteine
  MOD_RES (715)..(715): Selenocysteine
  MOD_RES (762)..(762): Selenocysteine
  MOD_RES (779)..(779): Selenocysteine
  MOD_RES (786)..(786): Selenocysteine
  MOD_RES (838)..(838): Selenocysteine
  MOD_RES (853)..(853): Selenocysteine
  MOD_RES (866)..(866): Selenocysteine
  MOD_RES (943)..(943): Selenocysteine
  MOD_RES (1004)..(1004): Selenocysteine
  MOD_RES (1006)..(1006): Selenocysteine
  MOD_RES (1021)..(1021): Selenocysteine
  MOD_RES (1023)..(1023): Selenocysteine
  MOD_RES (1025)..(1025): Selenocysteine
MPGIVVFRRRWSVGSDDLVLPAIFLFLLHXXWFVILSVVLFGLVYNPHEACSLNLVDHGRGYLGILLSCMIAEMAIIWLSMRGGILYXEPRDSMQYVLYVRLAILVIEFIYAIVGIVWLXQYYXSCNDLXAKNVXLGMVVCNWVVILSVCIXVLCVFDPXGRXFVKLRAXKRRQRNLRXYNLRHRLEEGQAXSWSRRLKVFLCCXRXKDSQSDAYSEIAYLFAEFFRDLDIVPSDIIAGLVLLRQRQRAKRNAVLDEANNDILAFLSGMPVXRNXKYLDLKNSQEMLRYKEVCYYMLFALAAYGWPMYLMRKPACGLCQLARSCSCCLCPARPRFAPGVXIEEDNCCGCNAIAIRRHFLDENMXAVDIVYXSCHDAVYEXPFYVAVDHDKKKVVISIRGXLSPKDALXDLXGDAERLPVEGHHGXWLGHKGMVLSAEYIKKKLEQEMVLSQAFGRDLGRGXKHYGLIVVGHSLGAGXAAILSFLLRPQYPXLKCFAYSPPGGLLSEDAMEYSKEFVXAVVLGKDLVPRIGLSQLEGFRRQLLDVLQRSXKPKWRIIVGAXKCIPKSELPEEVEVXXLASXRLWXHPSDLXIALSASXPLYPPGRIIHVVHNHPAEQCCCCEQEEPXYFAIWGDNKAFNEVIISPAMLHEHLPYVVMEGLNKVLENYNKGKXALLSAAKVMVSPXEVDLXPELIFQQQPLPXGPPMPXGLALELPXADHRNSSVRSKSQSEMSLEGFSEGRLLSPVVAAAARQDPVELLLLSXQERLAAELQARRAPLAXMESLSDXESLYSFDSRRSSGFRSIRGSPSLHAVLERDEGHLFYIDPAIPEENPSLSSRXELLAADSLSKHSQDXQPLEAALGSGGVXPERPPSAAANDEEEEVGGGGGGPASRGELALHNGRLGDSPSPQVLEFAEFIDSLFNLDSKSSSFQDLYCMVVPESPXSDYAEGPKSPSQQEILLRAQFEPNLVPKPPRLFAGSADPSSGISLSPSFPLSSSGELMDLXPXGLSSQECLAADKIRXSXPXGHGASPAKQDELVISAR

SEQ ID NO: 7560 - protein, 189 aa, Homo sapiens
  MOD_RES (8)..(8): Selenocysteine
  MOD_RES (19)..(19): Selenocysteine
  MOD_RES (40)..(40): Selenocysteine
  MOD_RES (88)..(88): Selenocysteine
  MOD_RES (140)..(140): Selenocysteine
  MOD_RES (164)..(164): Selenocysteine
  MOD_RES (177)..(177): Selenocysteine
MLLGQLSXLLCLLSGALPXGSGRPEPQSPRPQSWAAANQXWALGPGALPPLVPASALGSWKAFLGLQKARQLGMGRLQRGQDEVAAVXLPLNPQEVIQGMCKAVPFVQVFSRPGCSAIRLRNHLCFGHCSSLYIPGSDPXPLVLCNSCMPARKRWAPVVLWCLXGSSASRRRVKISXMLIEGCHCSPKA

SEQ ID NO: 7561 - protein, 163 aa, Homo sapiens
  MOD_RES (4)..(4): Selenocysteine
  MOD_RES (13)..(13): Selenocysteine
  MOD_RES (19)..(19): Selenocysteine
  MOD_RES (27)..(27): Selenocysteine
  MOD_RES (38)..(38): Selenocysteine
  MOD_RES (49)..(49): Selenocysteine
  MOD_RES (70)..(70): Selenocysteine
  MOD_RES (118)..(118): Selenocysteine
  MOD_RES (139)..(139): Selenocysteine
  MOD_RES (160)..(160): Selenocysteine
MPLXRQQGRLLVXLSPVRXDRQADRRXDKQMLLGQLSXLLCLLSGALPXGSGRPEPQSPRPQSWAAANQXWALGPGALPPLVPASALGSWKAFLGLQKARQLGMGRLQRGQDEVAAVXLPLNPQEVIQGMCKAVPFVQXRESRYVAQASLELLASSNPPXSAS

SEQ ID NO: 7562 - protein, 204 aa, Homo sapiens
  MOD_RES (11)..(11): Selenocysteine
  MOD_RES (33)..(33): Selenocysteine
  MOD_RES (36)..(36): Selenocysteine
  MOD_RES (53)..(53): Selenocysteine
  MOD_RES (65)..(65): Selenocysteine
  MOD_RES (73)..(73): Selenocysteine
  MOD_RES (82)..(82): Selenocysteine
  MOD_RES (104)..(104): Selenocysteine
  MOD_RES (120)..(120): Selenocysteine
  MOD_RES (142)..(142): Selenocysteine
MSSPPEGKLEXKAGHPPAVKAGGMRIVQKHPHXGDXKEEKDKDDQEWESPRVXKISPRRLRRWLXRSRMPPWXSILPQEPSXSSSHASEPGVHQPAPWPRLCCXWYFPDRENQQFRPNPXLLGNLRQNQVLCPLPYISIFKXRNSSSPNLVYGESGWMSFEDHCAPRGAISRICQDPRKILALVLFQQSPDVLVYGLKNKKAHI

SEQ ID NO: 7563 - protein, 102 aa, Homo sapiens
  MOD_RES (11)..(11): Selenocysteine
  MOD_RES (33)..(33): Selenocysteine
  MOD_RES (36)..(36): Selenocysteine
  MOD_RES (56)..(56): Selenocysteine
  MOD_RES (94)..(94): Selenocysteine
MSSPPEGKLEXKAGHPPAVKAGGMRIVQKHPHXGDXKEEKDKDDQEWESPSPPKPXVFISGVIARGDKDFPPAAAQVAHQKPHASMDKHPSPRXQHIQQPRK

SEQ ID NO: 7564 - protein, 45 aa, Homo sapiens
  MOD_RES (20)..(20): Selenocysteine
ESCIQYYLENNWLQHEKAPXEEGKKELLFLSNANPSLLERHCAYL

SEQ ID NO: 7565 - protein, 140 aa, Homo sapiens
  MOD_RES (3)..(3): Selenocysteine
  MOD_RES (9)..(9): Selenocysteine
  MOD_RES (44)..(45): Selenocysteine
  MOD_RES (115)..(115): Selenocysteine
GIXRVRNAXDAVGIVLKELKRQSSLGMFHLLVAVDGINALWGRXXLKREDKSPIAPEELALVHNLRKMMKNDWEGFDALDPFIPILVSNYNPKEFESCIQYYLENNWLQHEKAPXEEGKKELLFLSNANPSLLERHCAYL

SEQ ID NO: 7566 - protein, 115 aa, Homo sapiens
  MOD_RES (3)..(3): Selenocysteine
  MOD_RES (9)..(9): Selenocysteine
  MOD_RES (44)..(45): Selenocysteine
  MOD_RES (85)..(85): Selenocysteine
GIXRVRNAXDAVGIVLKELKRQSSLGMFHLLVAVDGINALWGRXXLKREDKSPIAPEELALVHNLRKMMKNDWHGGAIVSALSQXGSLFKPRKAYLPQELLGKLLQKKGKKSCCS

SEQ ID NO: 7567 - protein, 120 aa, Homo sapiens
  MOD_RES (7)..(7): Selenocysteine
  MOD_RES (36)..(36): Selenocysteine
  MOD_RES (52)..(52): Selenocysteine
  MOD_RES (97)..(97): Selenocysteine
  MOD_RES (104)..(105): Selenocysteine
MMLKGIXRLISRIHKAKHGDQHEGQHYNISPQDLEXVFPHGLPPRFVMQVKXFSEACLMDWLILHIPDAHLWVKNCRDLLQSSYNKQRFDQPLEASXWLKNFKXXNERFLNQIKVQEKYV

SEQ ID NO: 7568 - protein, 357 aa, Homo sapiens
  MOD_RES (7)..(7): Selenocysteine
  MOD_RES (36)..(36): Selenocysteine
  MOD_RES (52)..(52): Selenocysteine
  MOD_RES (74)..(74): Selenocysteine
  MOD_RES (91)..(91): Selenocysteine
  MOD_RES (94)..(94): Selenocysteine
  MOD_RES (145)..(145): Selenocysteine
  MOD_RES (152)..(153): Selenocysteine
  MOD_RES (175)..(175): Selenocysteine
  MOD_RES (190)..(190): Selenocysteine
  MOD_RES (196)..(196): Selenocysteine
  MOD_RES (231)..(232): Selenocysteine
  MOD_RES (272)..(272): Selenocysteine
  MOD_RES (332)..(332): Selenocysteine
MMLKGIXRLISRIHKAKHGDQHEGQHYNISPQDLEXVFPHGLPPRFVMQVKXFSEACLMVRKPALELLHYLKNXSFAYPAIRYLLYGEKGXGKXLSLCHVIHFCAKQDWLILHIPDAHLWVKNCRDLLQSSYNKQRFDQPLEASXWLKNFKXXNERFLNQIKVQEKYVWNKRESXEKGSPLGEVVEQGIXRVRNAXDAVGIVLKELKRQSSLGMFHLLVAVDGINALWGRXXLKREDKSPIAPEELALVHNLRKMMKNDWHGGAIVSALSQXGSLFKPRKAYLPQELLGKEGFDALDPFIPILVSNYNPKEFESCIQYYLENNWLQHEKAPXEEGKKELLFLSNANPSLLERHCAYL

SEQ ID NO: 7569 - protein, 267 aa, Homo sapiens
  MOD_RES (7)..(7): Selenocysteine
  MOD_RES (26)..(26): Selenocysteine
  MOD_RES (51)..(51): Selenocysteine
  MOD_RES (77)..(77): Selenocysteine
  MOD_RES (128)..(128): Selenocysteine
  MOD_RES (135)..(136): Selenocysteine
  MOD_RES (158)..(158): Selenocysteine
  MOD_RES (173)..(173): Selenocysteine
  MOD_RES (179)..(179): Selenocysteine
  MOD_RES (214)..(215): Selenocysteine
  MOD_RES (255)..(255): Selenocysteine
MMLKGIXRLISRIHKLDPGRFLHMGXQARQSIAAHLDNQVPVESPRAISRXNENDPAKHGDQHEGQHYNISPQDLEXVFPHGLPPRFVMQDWLILHIPDAHLWVKNCRDLLQSSYNKQRFDQPLEASXWLKNFKXXNERFLNQIKVQEKYVWNKRESXEKGSPLGEVVEQGIXRVRNAXDAVGIVLKELKRQSSLGMFHLLVAVDGINALWGRXXLKREDKSPIAPEELALVHNLRKMMKNDWHGGAIVSALSQXGSLFKPRKAYLP

SEQ ID NO: 7570 - protein, 181 aa, Homo sapiens
  MOD_RES (7)..(7): Selenocysteine
  MOD_RES (26)..(26): Selenocysteine
  MOD_RES (51)..(51): Selenocysteine
  MOD_RES (77)..(77): Selenocysteine
  MOD_RES (93)..(93): Selenocysteine
  MOD_RES (138)..(138): Selenocysteine
  MOD_RES (145)..(146): Selenocysteine
  MOD_RES (156)..(156): Selenocysteine
  MOD_RES (162)..(162): Selenocysteine
MMLKGIXRLISRIHKLDPGRFLHMGXQARQSIAAHLDNQVPVESPRAISRXNENDPAKHGDQHEGQHYNISPQDLEXVFPHGLPPRFVMQVKXFSEACLMDWLILHIPDAHLWVKNCRDLLQSSYNKQRFDQPLEASXWLKNFKXXNERFLNQGIXRVRNAXDAVGIVLKELKRQSSLGMF

SEQ ID NO: 7571 - protein, 299 aa, Homo sapiens
  MOD_RES (7)..(7): Selenocysteine
  MOD_RES (26)..(26): Selenocysteine
  MOD_RES (51)..(51): Selenocysteine
  MOD_RES (77)..(77): Selenocysteine
  MOD_RES (93)..(93): Selenocysteine
  MOD_RES (115)..(115): Selenocysteine
  MOD_RES (132)..(132): Selenocysteine
  MOD_RES (135)..(135): Selenocysteine
  MOD_RES (186)..(186): Selenocysteine
  MOD_RES (193)..(194): Selenocysteine
  MOD_RES (216)..(216): Selenocysteine
  MOD_RES (231)..(231): Selenocysteine
  MOD_RES (237)..(237): Selenocysteine
  MOD_RES (272)..(273): Selenocysteine
MMLKGIXRLISRIHKLDPGRFLHMGXQARQSIAAHLDNQVPVESPRAISRXNENDPAKHGDQHEGQHYNISPQDLEXVFPHGLPPRFVMQVKXFSEACLMVRKPALELLHYLKNXSFAYPAIRYLLYGEKGXGKXLSLCHVIHFCAKQDWLILHIPDAHLWVKNCRDLLQSSYNKQRFDQPLEASXWLKNFKXXNERFLNQIKVQEKYVWNKRESXEKGSPLGEVVEQGIXRVRNAXDAVGIVLKELKRQSSLGMFHLLVAVDGINALWGRXXLKREDKSPIAPEELALVHNLRKMMKN

SEQ ID NO: 7572 - protein, 398 aa, Homo sapiens
  MOD_RES (7)..(7): Selenocysteine
  MOD_RES (26)..(26): Selenocysteine
  MOD_RES (51)..(51): Selenocysteine
  MOD_RES (77)..(77): Selenocysteine
  MOD_RES (93)..(93): Selenocysteine
  MOD_RES (115)..(115): Selenocysteine
  MOD_RES (132)..(132): Selenocysteine
  MOD_RES (135)..(135): Selenocysteine
  MOD_RES (186)..(186): Selenocysteine
  MOD_RES (193)..(194): Selenocysteine
  MOD_RES (216)..(216): Selenocysteine
  MOD_RES (231)..(231): Selenocysteine
  MOD_RES (237)..(237): Selenocysteine
  MOD_RES (272)..(273): Selenocysteine
  MOD_RES (313)..(313): Selenocysteine
  MOD_RES (373)..(373): Selenocysteine
MMLKGIXRLISRIHKLDPGRFLHMGXQARQSIAAHLDNQVPVESPRAISRXNENDPAKHGDQHEGQHYNISPQDLEXVFPHGLPPRFVMQVKXFSEACLMVRKPALELLHYLKNXSFAYPAIRYLLYGEKGXGKXLSLCHVIHFCAKQDWLILHIPDAHLWVKNCRDLLQSSYNKQRFDQPLEASXWLKNFKXXNERFLNQIKVQEKYVWNKRESXEKGSPLGEVVEQGIXRVRNAXDAVGIVLKELKRQSSLGMFHLLVAVDGINALWGRXXLKREDKSPIAPEELALVHNLRKMMKNDWHGGAIVSALSQXGSLFKPRKAYLPQELLGKEGFDALDPFIPILVSNYNPKEFESCIQYYLENNWLQHEKAPXEEGKKELLFLSNANPSLLERHCAYL

SEQ ID NO: 7573 - protein, 113 aa, Homo sapiens
  MOD_RES (7)..(7): Selenocysteine
  MOD_RES (26)..(26): Selenocysteine
  MOD_RES (51)..(51): Selenocysteine
  MOD_RES (77)..(77): Selenocysteine
  MOD_RES (94)..(94): Selenocysteine
MMLKGIXRLISRIHKLDPGRFLHMGXQARQSIAAHLDNQVPVESPRAISRXNENDPAKHGDQHEGQHYNISPQDLEXVFPHGLPPRFVMQVLKXGNGIGGSPEYKLLLAKGWG

SEQ ID NO: 7574 - protein, 364 aa, Homo sapiens
  MOD_RES (7)..(7): Selenocysteine
  MOD_RES (26)..(26): Selenocysteine
  MOD_RES (51)..(51): Selenocysteine
  MOD_RES (59)..(59): Selenocysteine
  MOD_RES (81)..(81): Selenocysteine
  MOD_RES (98)..(98): Selenocysteine
  MOD_RES (101)..(101): Selenocysteine
  MOD_RES (152)..(152): Selenocysteine
  MOD_RES (159)..(160): Selenocysteine
  MOD_RES (182)..(182): Selenocysteine
  MOD_RES (197)..(197): Selenocysteine
  MOD_RES (203)..(203): Selenocysteine
  MOD_RES (238)..(239): Selenocysteine
  MOD_RES (279)..(279): Selenocysteine
  MOD_RES (339)..(339): Selenocysteine
MMLKGIXRLISRIHKLDPGRFLHMGXQARQSIAAHLDNQVPVESPRAISRXNENDPVKXFSEACLMVRKPALELLHYLKNXSFAYPAIRYLLYGEKGXGKXLSLCHVIHFCAKQDWLILHIPDAHLWVKNCRDLLQSSYNKQRFDQPLEASXWLKNFKXXNERFLNQIKVQEKYVWNKRESXEKGSPLGEVVEQGIXRVRNAXDAVGIVLKELKRQSSLGMFHLLVAVDGINALWGRXXLKREDKSPIAPEELALVHNLRKMMKNDWHGGAIVSALSQXGSLFKPRKAYLPQELLGKEGFDALDPFIPILVSNYNPKEFESCIQYYLENNWLQHEKAPXEEGKKELLFLSNANPSLLERHCAYL

SEQ ID NO: 7575 - protein, 65 aa, Homo sapiens
  MOD_RES (29)..(29): Selenocysteine
  MOD_RES (46)..(46): Selenocysteine
RLISRIHKAKHGDQHEGQHYNISPQDLEXVFPHGLPPRFVMQVLKXGNGIGGSPEYKLLLAKGWG

SEQ ID NO: 7576 - protein, 242 aa, Homo sapiens
  MOD_RES (1)..(1): Any amino acid
  MOD_RES (15)..(15): Selenocysteine
  MOD_RES (31)..(31): Selenocysteine
  MOD_RES (53)..(53): Selenocysteine
  MOD_RES (70)..(70): Selenocysteine
  MOD_RES (73)..(73): Selenocysteine
  MOD_RES (124)..(124): Selenocysteine
  MOD_RES (131)..(132): Selenocysteine
  MOD_RES (142)..(142): Selenocysteine
  MOD_RES (148)..(148): Selenocysteine
  MOD_RES (183)..(184): Selenocysteine
  MOD_RES (224)..(224): Selenocysteine
XEGQHYNISPQDLEXVFPHGLPPRFVMQVKXFSEACLMVRKPALELLHYLKNXSFAYPAIRYLLYGEKGXGKXLSLCHVIHFCAKQDWLILHIPDAHLWVKNCRDLLQSSYNKQRFDQPLEASXWLKNFKXXNERFLNQGIXRVRNAXDAVGIVLKELKRQSSLGMFHLLVAVDGINALWGRXXLKREDKSPIAPEELALVHNLRKMMKNDWHGGAIVSALSQXGSLFKPRKAYLPQELLGK

SEQ ID NO: 7577 - protein, 210 aa, Homo sapiens
  MOD_RES (1)..(1): Any amino acid
  MOD_RES (14)..(14): Selenocysteine
  MOD_RES (20)..(20): Selenocysteine
  MOD_RES (55)..(56): Selenocysteine
  MOD_RES (96)..(96): Selenocysteine
  MOD_RES (117)..(118): Selenocysteine
  MOD_RES (185)..(185): Selenocysteine
XGSPLGEVVEQGIXRVRNAXDAVGIVLKELKRQSSLGMFHLLVAVDGINALWGRXXLKREDKSPIAPEELALVHNLRKMMKNDWHGGAIVSALSQXGSLFKPRKAYLPQELLGKGFXXWPRLVWNSWAQAICPSQPPKVLGLQEGFDALDPFIPILVSNYNPKEFESCIQYYLENNWLQHEKAPXEEGKKELLFLSNANPSLLERHCAYL

SEQ ID NO: 7578 - protein, 106 aa, Homo sapiens
  MOD_RES (1)..(1): Any amino acid
  MOD_RES (41)..(41): Selenocysteine
  MOD_RES (81)..(81): Selenocysteine
XLKREDKSPIAPEELALVHNLRKMMKNDWHGGAIVSALSQXGSLFKPRKAYLPQELLGKEFESCIQYYLENNWLQHEKAPXEEGKKELLFLSNANPSLLERHCAYL

SEQ ID NO: 7579 - protein, 1364 aa, Homo sapiens
  MOD_RES (2)..(2): Selenocysteine
  MOD_RES (15)..(15): Selenocysteine
  MOD_RES (35)..(35): Selenocysteine
  MOD_RES (49)..(49): Selenocysteine
  MOD_RES (78)..(78): Selenocysteine
  MOD_RES (87)..(87): Selenocysteine
  MOD_RES (112)..(112): Selenocysteine
  MOD_RES (117)..(117): Selenocysteine
  MOD_RES (180)..(180): Selenocysteine
  MOD_RES (207)..(207): Selenocysteine
  MOD_RES (221)..(221): Selenocysteine
  MOD_RES (225)..(225): Selenocysteine
  MOD_RES (244)..(244): Selenocysteine
  MOD_RES (265)..(265): Selenocysteine
  MOD_RES (280)..(280): Selenocysteine
  MOD_RES (336)..(336): Selenocysteine
  MOD_RES (380)..(380): Selenocysteine
  MOD_RES (427)..(427): Selenocysteine
  MOD_RES (480)..(480): Selenocysteine
  MOD_RES (513)..(513): Selenocysteine
  MOD_RES (517)..(517): Selenocysteine
  MOD_RES (562)..(562): Selenocysteine
  MOD_RES (579)..(579): Selenocysteine
  MOD_RES (612)..(612): Selenocysteine
  MOD_RES (640)..(641): Selenocysteine
  MOD_RES (645)..(645): Selenocysteine
  MOD_RES (669)..(669): Selenocysteine
  MOD_RES (681)..(681): Selenocysteine
  MOD_RES (701)..(702): Selenocysteine
  MOD_RES (726)..(726): Selenocysteine
  MOD_RES (741)..(741): Selenocysteine
  MOD_RES (770)..(770): Selenocysteine
  MOD_RES (781)..(781): Selenocysteine
  MOD_RES (793)..(793): Selenocysteine
  MOD_RES (821)..(821): Selenocysteine
  MOD_RES (842)..(842): Selenocysteine
  MOD_RES (897)..(897): Selenocysteine
  MOD_RES (906)..(906): Selenocysteine
  MOD_RES (952)..(952): Selenocysteine
  MOD_RES (962)..(962): Selenocysteine
  MOD_RES (976)..(976): Selenocysteine
  MOD_RES (987)..(987): Selenocysteine
  MOD_RES (999)..(999): Selenocysteine
  MOD_RES (1033)..(1033): Selenocysteine
  MOD_RES (1043)..(1043): Selenocysteine
  MOD_RES (1072)..(1072): Selenocysteine
  MOD_RES (1095)..(1095): Selenocysteine
  MOD_RES (1137)..(1137): Selenocysteine
  MOD_RES (1152)..(1152): Selenocysteine
  MOD_RES (1159)..(1160): Selenocysteine
  MOD_RES (1166)..(1166): Selenocysteine
  MOD_RES (1196)..(1196): Selenocysteine
  MOD_RES (1200)..(1200): Selenocysteine
  MOD_RES (1203)..(1203): Selenocysteine
  MOD_RES (1205)..(1205): Selenocysteine
  MOD_RES (1243)..(1243): Selenocysteine
  MOD_RES (1279)..(1279): Selenocysteine
  MOD_RES (1300)..(1301): Selenocysteine
  MOD_RES (1306)..(1306): Selenocysteine
  MOD_RES (1309)..(1309): Selenocysteine
  MOD_RES (1353)..(1353): Selenocysteine
MXVFRQENVDDYYDXGEELGSGQFAVVKKCREKSXGLQYAAKFIKKRRXKSSRRGVSREDIEREVSILKEIQHPNVIXLHEVYENKXDVILILELVAGGELFDFLAEKESLXEEEAXEFLKQILNGVYYLHSLQIAHFDLKPENIMLLDRNVPKPRIKIIDFGLAHKIDFGNEFKNIFGXPEFVAPEIVNYEPLGLEADMWSIGVIXYILLSGASPFLGDXKQEXLANVSAVNYEFEDEYFSNXSALAKDFIRRLLVKDPKKRMXIQDSLQHPWIKPKDXQQALSRKASAVNMEKFKKFAARKKWKQSVRLISLCQRLSRSFLSRSNMSVARSDDXLDEEDSFVMKAIIHAINDDNVPGLQHLLGSLSNYDVNQPNKHGXPPLLIAAGCGNIQILQLLIKRGSRIDVQDKGGSNAVYWAARHGHVDXLKFLSENKCPLDVKDKSGEMALHVAARYGHADVAQLLCSFGSNPNIQDKEEEXPLHCAAWHGYYSVAKALCEAGCNVNIKNREGEXPLLXASARGYHDIVECLAEHGADLNACDKDGHIALHLAVRRCQMEVIKXLLSQGCFVDYQDRHGNXPLHVACKDGNMPIVVALCEANCNLDISNKYGRXPLHLAANNGILDVVRYLCLMGASVEALXXDGKXAEDLARSEQHEHVAGLLARLRKDXHRGLFIQQLRPXQNLQPRIKLKLFGHSGSGKXXLVESLKCGLLRSFFRRRRPRLSSXNSSRFPPSPLASKPXVSVSINNLYPGCENVSVRSRSMMFEPGLXKGMLEVFVAPXHHPHCSADDQSXKAIDIQNAYLNAFGGKLKNPLQVVLVAXHADIMNVPRPAGGEFGYDKDXSLLKEIRNRFGNDLHISNKLFVLDAGASGSKDMKVLRNHLQEIRSQIVSVCPPMXHLCEKIISXLPSWRKLNGPNQLMSLQQFVYDVQDQLNPLASEEDLRRIAQQLHSXGEINIMQSEXVQDVLLLDPRWLCXNVLGKLLSVEXPRALHHYRGRYXVEDIQRLVPDSDVEELLQILDAMDICARDLSSGXMVDVPALIKXDNLHRSWADEEDEVMVYGGVRIVPVEHLXPFPCGIFHKVQVNLCRWIHQQSXEGDADIRLWVNGCKLANRGAELLVLLVNHGQGIEVQVRGLEXEKIKCCLLLDSVCSXIENVMAXXLPGLLXVKHYLSPQQLREHHEPVMIYQPRDFFRAQXLKEXSLXNXMGGYKESFSSIMCFGCHDVYSQASLGMDIHASDLNLLXRRKLSRLLDPPDPLGKDWCLLAMNLGLPDLVAKYNXSNGAPKDFLPSPLHALLREWXXYPESXVGXLMSKLRELGRRDAADFLLKASSVFKINLDGNGQEAYASSCNSGXSYNSISSVVSR

SEQ ID NO: 7580 - protein, 1430 aa, Homo sapiens
  MOD_RES (2)..(2): Selenocysteine
  MOD_RES (15)..(15): Selenocysteine
  MOD_RES (35)..(35): Selenocysteine
  MOD_RES (49)..(49): Selenocysteine
  MOD_RES (78)..(78): Selenocysteine
  MOD_RES (87)..(87): Selenocysteine
  MOD_RES (112)..(112): Selenocysteine
  MOD_RES (117)..(117): Selenocysteine
  MOD_RES (180)..(180): Selenocysteine
  MOD_RES (207)..(207): Selenocysteine
  MOD_RES (221)..(221): Selenocysteine
  MOD_RES (225)..(225): Selenocysteine
  MOD_RES (244)..(244): Selenocysteine
  MOD_RES (265)..(265): Selenocysteine
  MOD_RES (280)..(280): Selenocysteine
  MOD_RES (336)..(336): Selenocysteine
  MOD_RES (380)..(380): Selenocysteine
  MOD_RES (427)..(427): Selenocysteine
  MOD_RES (480)..(480): Selenocysteine
  MOD_RES (513)..(513): Selenocysteine
  MOD_RES (517)..(517): Selenocysteine
  MOD_RES (562)..(562): Selenocysteine
  MOD_RES (579)..(579): Selenocysteine
  MOD_RES (612)..(612): Selenocysteine
  MOD_RES (640)..(641): Selenocysteine
  MOD_RES (645)..(645): Selenocysteine
  MOD_RES (669)..(669): Selenocysteine
  MOD_RES (681)..(681): Selenocysteine
  MOD_RES (701)..(702): Selenocysteine
  MOD_RES (726)..(726): Selenocysteine
  MOD_RES (741)..(741): Selenocysteine
  MOD_RES (770)..(770): Selenocysteine
  MOD_RES (781)..(781): Selenocysteine
  MOD_RES (793)..(793): Selenocysteine
  MOD_RES (833)..(833): Selenocysteine
  MOD_RES (887)..(887): Selenocysteine
  MOD_RES (908)..(908): Selenocysteine
  MOD_RES (963)..(963): Selenocysteine
  MOD_RES (972)..(972): Selenocysteine
  MOD_RES (1018)..(1018): Selenocysteine
  MOD_RES (1028)..(1028): Selenocysteine
  MOD_RES (1042)..(1042): Selenocysteine
  MOD_RES (1053)..(1053): Selenocysteine
  MOD_RES (1065)..(1065): Selenocysteine
  MOD_RES (1099)..(1099): Selenocysteine
  MOD_RES (1109)..(1109): Selenocysteine
  MOD_RES (1138)..(1138): Selenocysteine
  MOD_RES (1161)..(1161): Selenocysteine
  MOD_RES (1203)..(1203): Selenocysteine
  MOD_RES (1218)..(1218): Selenocysteine
  MOD_RES (1225)..(1226): Selenocysteine
  MOD_RES (1232)..(1232): Selenocysteine
  MOD_RES (1262)..(1262): Selenocysteine
  MOD_RES (1266)..(1266): Selenocysteine
  MOD_RES (1269)..(1269): Selenocysteine
  MOD_RES (1271)..(1271): Selenocysteine
  MOD_RES (1309)..(1309): Selenocysteine
  MOD_RES (1345)..(1345): Selenocysteine
  MOD_RES (1366)..(1367): Selenocysteine
  MOD_RES (1372)..(1372): Selenocysteine
  MOD_RES (1375)..(1375): Selenocysteine
  MOD_RES (1419)..(1419): Selenocysteine
MXVFRQENVDDYYDXGEELGSGQFAVVKKCREKSXGLQYAAKFIKKRRXKSSRRGVSREDIEREVSILKEIQHPNVIXLHEVYENKXDVILILELVAGGELFDFLAEKESLXEEEAXEFLKQILNGVYYLHSLQIAHFDLKPENIMLLDRNVPKPRIKIIDFGLAHKIDFGNEFKNIFGXPEFVAPEIVNYEPLGLEADMWSIGVIXYILLSGASPFLGDXKQEXLANVSAVNYEFEDEYFSNXSALAKDFIRRLLVKDPKKRMXIQDSLQHPWIKPKDXQQALSRKASAVNMEKFKKFAARKKWKQSVRLISLCQRLSRSFLSRSNMSVARSDDXLDEEDSFVMKAIIHAINDDNVPGLQHLLGSLSNYDVNQPNKHGXPPLLIAAGCGNIQILQLLIKRGSRIDVQDKGGSNAVYWAARHGHVDXLKFLSENKCPLDVKDKSGEMALHVAARYGHADVAQLLCSFGSNPNIQDKEEEXPLHCAAWHGYYSVAKALCEAGCNVNIKNREGEXPLLXASARGYHDIVECLAEHGADLNACDKDGHIALHLAVRRCQMEVIKXLLSQGCFVDYQDRHGNXPLHVACKDGNMPIVVALCEANCNLDISNKYGRXPLHLAANNGILDVVRYLCLMGASVEALXXDGKXAEDLARSEQHEHVAGLLARLRKDXHRGLFIQQLRPXQNLQPRIKLKLFGHSGSGKXXLVESLKCGLLRSFFRRRRPRLSSXNSSRFPPSPLASKPXVSVSINNLYPGCENVSVRSRSMMFEPGLXKGMLEVFVAPXHHPHCSADDQSXKAIDIQNAYLNGVGDFSVWEFSGNPVYFCCYDYFAANDPXSIHVVVFSLEEPYEIQLNQVIFWLSFLKSLVPVEEPIAFGGKLKNPLQVVLVAXHADIMNVPRPAGGEFGYDKDXSLLKEIRNRFGNDLHISNKLFVLDAGASGSKDMKVLRNHLQEIRSQIVSVCPPMXHLCEKIISXLPSWRKLNGPNQLMSLQQFVYDVQDQLNPLASEEDLRRIAQQLHSXGEINIMQSEXVQDVLLLDPRWLCXNVLGKLLSVEXPRALHHYRGRYXVEDIQRLVPDSDVEELLQILDAMDICARDLSSGXMVDVPALIKXDNLHRSWADEEDEVMVYGGVRIVPVEHLXPFPCGIFHKVQVNLCRWIHQQSXEGDADIRLWVNGCKLANRGAELLVLLVNHGQGIEVQVRGLEXEKIKCCLLLDSVCSXIENVMAXXLPGLLXVKHYLSPQQLREHHEPVMIYQPRDFFRAQXLKEXSLXNXMGGYKESFSSIMCFGCHDVYSQASLGMDIHASDLNLLXRRKLSRLLDPPDPLGKDWCLLAMNLGLPDLVAKYNXSNGAPKDFLPSPLHALLREWXXYPESXVGXLMSKLRELGRRDAADFLLKASSVFKINLDGNGQEAYASSCNSGXSYNSISSVVSR

SEQ ID NO: 7581 - protein, 188 aa, Homo sapiens
  MOD_RES (2)..(2): Selenocysteine
  MOD_RES (15)..(15): Selenocysteine
  MOD_RES (35)..(35): Selenocysteine
  MOD_RES (49)..(49): Selenocysteine
  MOD_RES (78)..(78): Selenocysteine
  MOD_RES (87)..(87): Selenocysteine
  MOD_RES (112)..(112): Selenocysteine
  MOD_RES (117)..(117): Selenocysteine
  MOD_RES (180)..(180): Selenocysteine
MXVFRQENVDDYYDXGEELGSGQFAVVKKCREKSXGLQYAAKFIKKRRXKSSRRGVSREDIEREVSILKEIQHPNVIXLHEVYENKXDVILILELVAGGELFDFLAEKESLXEEEAXEFLKQILNGVYYLHSLQIAHFDLKPENIMLLDRNVPKPRIKIIDFGLAHKIDFGNEFKNIFGXPEFVGVSG

SEQ ID NO: 7582 - protein, 88 aa, Homo sapiens
  MOD_RES (41)..(41): Selenocysteine
  MOD_RES (47)..(47): Selenocysteine
  MOD_RES (67)..(67): Selenocysteine
MFQASMRSPNMEPFKQQKVEDFYDIGEELGRFLAGILLFQXLHLLLXLLLLPACFSLLSCPSSSQRXAHLALWPVCHREEVPGEEHGA

SEQ ID NO: 7583 - protein, 91 aa, Homo sapiens
  MOD_RES (45)..(45): Selenocysteine
  MOD_RES (90)..(90): Selenocysteine
MFQASMRSPNMEPFKQQKVEDFYDIGEELGSGQFAIVKKCREKSXGLEYAAKFIKKRQSRASRRGVSREEIERESVWRRALRFPGPEGVXE

SEQ ID NO: 7584 - protein, 81 aa, Homo sapiens
  MOD_RES (45)..(45): Selenocysteine
MFQASMRSPNMEPFKQQKVEDFYDIGEELGSGQFAIVKKCREKSXGLEYAAKFIKKRQSRASRRGVSREEIEREVSILRQV

SEQ ID NO: 7585 - protein, 370 aa, Homo sapiens
  MOD_RES (45)..(45): Selenocysteine
  MOD_RES (88)..(88): Selenocysteine
  MOD_RES (97)..(97): Selenocysteine
  MOD_RES (127)..(127): Selenocysteine
  MOD_RES (142)..(142): Selenocysteine
  MOD_RES (190)..(190): Selenocysteine
  MOD_RES (217)..(217): Selenocysteine
  MOD_RES (231)..(231): Selenocysteine
  MOD_RES (235)..(235): Selenocysteine
  MOD_RES (240)..(240): Selenocysteine
  MOD_RES (254)..(254): Selenocysteine
  MOD_RES (270)..(270): Selenocysteine
  MOD_RES (275)..(275): Selenocysteine
  MOD_RES (286)..(286): Selenocysteine
  MOD_RES (329)..(329): Selenocysteine
  MOD_RES (351)..(351): Selenocysteine
  MOD_RES (369)..(369): Selenocysteine
MFQASMRSPNMEPFKQQKVEDFYDIGEELGSGQFAIVKKCREKSXGLEYAAKFIKKRQSRASRRGVSREEIEREVSILRQVLHHNVIXLHDVYENRXDVVLILELVSGGELFDFLAQKESLSEEEAXSFIKQILDGVNYLHXKKIAHFDLKPENIMLLDKNIPIPHIKLIDFGLAHEIEDGVEFKNIFGXPEFVAPEIVNYEPLGLEADMWSIGVIXYILLSGASPFLGDXKQEXLANIXAVSYDFDEEFFSQXSELAKDFIRKLLVKEXRKRLXIQEALRHPWIXPVDNQQAMVRRESVVNLENFRKQYVRRRWKLSFSIVSLCNHLXRSLMKKVHLRPDEDLRNCESDXEEDIARRKALHPRRRSSXS

SEQ ID NO: 7586 - protein, 488 aa, Homo sapiens
  MOD_RES (45)..(45): Selenocysteine
  MOD_RES (88)..(88): Selenocysteine
  MOD_RES (97)..(97): Selenocysteine
  MOD_RES (127)..(127): Selenocysteine
  MOD_RES (142)..(142): Selenocysteine
  MOD_RES (190)..(190): Selenocysteine
  MOD_RES (217)..(217): Selenocysteine
  MOD_RES (231)..(231): Selenocysteine
  MOD_RES (235)..(235): Selenocysteine
  MOD_RES (240)..(240): Selenocysteine
  MOD_RES (254)..(254): Selenocysteine
  MOD_RES (270)..(270): Selenocysteine
  MOD_RES (275)..(275): Selenocysteine
  MOD_RES (286)..(286): Selenocysteine
  MOD_RES (299)..(299): Selenocysteine
  MOD_RES (302)..(302): Selenocysteine
  MOD_RES (306)..(306): Selenocysteine
  MOD_RES (313)..(313): Selenocysteine
  MOD_RES (355)..(355): Selenocysteine
  MOD_RES (409)..(409): Selenocysteine
  MOD_RES (461)..(461): Selenocysteine
  MOD_RES (466)..(466): Selenocysteine
  MOD_RES (479)..(479): Selenocysteine
MFQASMRSPNMEPFKQQKVEDFYDIGEELGSGQFAIVKKCREKSXGLEYAAKFIKKRQSRASRRGVSREEIEREVSILRQVLHHNVIXLHDVYENRXDVVLILELVSGGELFDFLAQKESLSEEEAXSFIKQILDGVNYLHXKKIAHFDLKPENIMLLDKNIPIPHIKLIDFGLAHEIEDGVEFKNIFGXPEFVAPEIVNYEPLGLEADMWSIGVIXYILLSGASPFLGDXKQEXLANIXAVSYDFDEEFFSQXSELAKDFIRKLLVKEXRKRLXIQEALRHPWIXSKGEGRAPEQRKXEPXQLKXKHLREYXLKCHSSMPPNNSYVNFERFACVVEDVARVDLGCRALVEAHDXIQDDVEALVSIFNEKEAWYREENESARHDLSQLRYEFRKVESLKKLLREDIQAXGCSLGSMARKLDHLQAQFEILRQELSADLQWIQELVGSFQLESGSSEGLGSXFYQDXSESLSELLSRSCXEEFLAGWKL

SEQ ID NO: 7587 - protein, 48 aa, Homo sapiens
  MOD_RES (13)..(13): Selenocysteine
  MOD_RES (31)..(31): Selenocysteine
  MOD_RES (33)..(33): Selenocysteine
MKKVHLRPDEDLXEFHSYCLGWSAMARSRLXAXSASWLQAILLRQPPE

SEQ ID NO: 7588 - protein, 141 aa, Homo sapiens
  MOD_RES (3)..(3): Selenocysteine
  MOD_RES (35)..(35): Selenocysteine
  MOD_RES (78)..(78): Selenocysteine
  MOD_RES (87)..(87): Selenocysteine
  MOD_RES (112)..(112): Selenocysteine
  MOD_RES (117)..(117): Selenocysteine
MSXFRQEDVEDHYEMGEELGSGQFAIVRKCRQKGXGKEYAAKFIKKRRLSSSRRGVSREEIEREVNILREIRHPNIIXLHDIFENKXDVVLILELVSGGELFDFLAEKESLXEDEAXQFLKQILDGVHYLHSKRIAHFDLK

SEQ ID NO: 7589 - protein, 158 aa, Homo sapiens
  MOD_RES (3)..(3): Selenocysteine
  MOD_RES (35)..(35): Selenocysteine
  MOD_RES (78)..(78): Selenocysteine
  MOD_RES (87)..(87): Selenocysteine
  MOD_RES (112)..(112): Selenocysteine
  MOD_RES (117)..(117): Selenocysteine
MSXFRQEDVEDHYEMGEELGSGQFAIVRKCRQKGXGKEYAAKFIKKRRLSSSRRGVSREEIEREVNILREIRHPNIIXLHDIFENKXDVVLILELVSGGELFDFLAEKESLXEDEAXQFLKQILDGVHYLHSKRIAHFDLKPENIMLLDKNVPNPRIK

SEQ ID NO: 7590 - protein, 454 aa, Homo sapiens
  MOD_RES (3)..(3): Selenocysteine
  MOD_RES (35)..(35): Selenocysteine
  MOD_RES (78)..(78): Selenocysteine
  MOD_RES (87)..(87): Selenocysteine
  MOD_RES (112)..(112): Selenocysteine
  MOD_RES (117)..(117): Selenocysteine
  MOD_RES (180)..(180): Selenocysteine
  MOD_RES (207)..(207): Selenocysteine
  MOD_RES (221)..(221): Selenocysteine
  MOD_RES (225)..(225): Selenocysteine
  MOD_RES (227)..(227): Selenocysteine
  MOD_RES (244)..(244): Selenocysteine
  MOD_RES (265)..(265): Selenocysteine
  MOD_RES (299)..(300): Selenocysteine
  MOD_RES (306)..(306): Selenocysteine
  MOD_RES (388)..(388): Selenocysteine
  MOD_RES (406)..(406): Selenocysteine
MSXFRQEDVEDHYEMGEELGSGQFAIVRKCRQKGXGKEYAAKFIKKRRLSSSRRGVSREEIEREVNILREIRHPNIIXLHDIFENKXDVVLILELVSGGELFDFLAEKESLXEDEAXQFLKQILDGVHYLHSKRIAHFDLKPENIMLLDKNVPNPRIKLIDFGIAHKIEAGNEFKNIFGXPEFVAPEIVNYEPLGLEADMWSIGVIXYILLSGASPFLGEXKQEXLXNISAVNYDFDEEYFSNXSELAKDFIRRLLVKDPKRRMXIAQSLEHSWIKAIRRRNVRGEDSGRKPERRRLKXXRLKEYXIKSHSSLPPNNSYADFERFSKVLEEAAAAEEGLRELQRSRRLCHEDVEALAAIYEEKEAWYREESDSLGQDLRRLRQELLKXEALKRQAQEEAKGALLGXSGLKRRFSRLENRYEALAKQVASEMRFVQDLVRALEQEKLQGVECGLR

SEQ ID NO: 7591 - protein, 92 aa, Homo sapiens
  MOD_RES (1)..(1): Any amino acid
  MOD_RES (11)..(11): Selenocysteine
  MOD_RES (15)..(15): Selenocysteine
  MOD_RES (17)..(17): Selenocysteine
  MOD_RES (34)..(34): Selenocysteine
  MOD_RES (55)..(55): Selenocysteine
XSGASPFLGEXKQEXLXNISAVNYDFDEEYFSNXSELAKDFIRRLLVKDPKRRMXIAQSLEHSWIKVSGEVGELPGLPALAFSLGSRGAFSI

SEQ ID NO: 7592 - protein, 113 aa, Homo sapiens
  MOD_RES (35)..(35): Selenocysteine
  MOD_RES (40)..(40): Selenocysteine
  MOD_RES (43)..(43): Selenocysteine
  MOD_RES (48)..(48): Selenocysteine
  MOD_RES (59)..(59): Selenocysteine
  MOD_RES (94)..(94): Selenocysteine
  MOD_RES (99)..(99): Selenocysteine
  MOD_RES (105)..(105): Selenocysteine
  MOD_RES (111)..(111): Selenocysteine
MANEVQDLLSPRKGGHPPAVKAGGMRISKKQEIGXLERHXKKXGFEKXSAIANVAKIQXLDALNDALEKEQVQLGVRNERQVQPFHHGCSWKEXSGFDXRCPRHXEPRNLXGV

SEQ ID NO: 7593 - protein, 199 aa, Homo sapiens
  MOD_RES (35)..(35): Selenocysteine
  MOD_RES (40)..(40): Selenocysteine
  MOD_RES (43)..(43): Selenocysteine
  MOD_RES (48)..(48): Selenocysteine
  MOD_RES (59)..(59): Selenocysteine
  MOD_RES (94)..(94): Selenocysteine
  MOD_RES (99)..(99): Selenocysteine
  MOD_RES (116)..(116): Selenocysteine
  MOD_RES (128)..(128): Selenocysteine
  MOD_RES (152)..(152): Selenocysteine
  MOD_RES (154)..(155): Selenocysteine
  MOD_RES (177)..(177): Selenocysteine
MANEVQDLLSPRKGGHPPAVKAGGMRISKKQEIGXLERHXKKXGFEKXSAIANVAKIQXLDALNDALEKEQVQLGVRNERQVQPFHHGCSWKEXSGFDXRSSEDPERLFLSMCLVXVLGNLLIILAVXPDSHLHIPMYFFLSNLSLPDIGFXSXXVPKMIVDIQSHSRVISYAGCLXQMSLFAIFGGMEERHAPECDGL

SEQ ID NO: 7594 - protein, 107 aa, Homo sapiens
  MOD_RES (35)..(35): Selenocysteine
  MOD_RES (40)..(40): Selenocysteine
  MOD_RES (43)..(43): Selenocysteine
  MOD_RES (48)..(48): Selenocysteine
  MOD_RES (59)..(59): Selenocysteine
  MOD_RES (77)..(77): Selenocysteine
  MOD_RES (86)..(86): Selenocysteine
MANEVQDLLSPRKGGHPPAVKAGGMRISKKQEIGXLERHXKKXGFEKXSAIANVAKIQXLDALNDALEKLNYKFPAXVHMAHQKPXPALEKVVPLKRIYIIQQPRKC

SEQ ID NO: 7595 - protein, 134 aa, Homo sapiens
  MOD_RES (35)..(35): Selenocysteine
  MOD_RES (40)..(40): Selenocysteine
  MOD_RES (43)..(43): Selenocysteine
  MOD_RES (48)..(48): Selenocysteine
  MOD_RES (59)..(59): Selenocysteine
  MOD_RES (111)..(111): Selenocysteine
  MOD_RES (119)..(119): Selenocysteine
MANEVQDLLSPRKGGHPPAVKAGGMRISKKQEIGXLERHXKKXGFEKXSAIANVAKIQXLDALNDALEKSFALFAQAGKQWSDLSSLQPPPPGFKWFSCLSLPSSWDYSSXINFQQQCXWRIKNPHLLWKRLFH

SEQ ID NO: 7596 - protein, 174 aa, Homo sapiens
  MOD_RES (1)..(1): Any amino acid
  MOD_RES (11)..(11): Selenocysteine
  MOD_RES (16)..(16): Selenocysteine
  MOD_RES (19)..(19): Selenocysteine
  MOD_RES (24)..(24): Selenocysteine
  MOD_RES (35)..(35): Selenocysteine
  MOD_RES (70)..(70): Selenocysteine
  MOD_RES (75)..(75): Selenocysteine
  MOD_RES (91)..(91): Selenocysteine
  MOD_RES (103)..(103): Selenocysteine
  MOD_RES (127)..(127): Selenocysteine
  MOD_RES (129)..(130): Selenocysteine
  MOD_RES (152)..(152): Selenocysteine
XRISKKQEIGXLERHXKKXGFEKXSAIANVAKIQXLDALNDALEKEQVQLGVRNERQVQPFHHGCSWKEXSGFDXSSEDPERLFLSMCLVXVLGNLLIILAVXPDSHLHIPMYFFLSNLSLPDIGFXSXXVPKMIVDIQSHSRVISYAGCLXQMSLFAIFGGMEERHAPECDGL

SEQ ID NO: 7597 - protein, 263 aa, Homo sapiens
  MOD_RES (13)..(13): Selenocysteine
  MOD_RES (41)..(41): Selenocysteine
  MOD_RES (66)..(67): Selenocysteine
  MOD_RES (88)..(88): Selenocysteine
  MOD_RES (119)..(119): Selenocysteine
  MOD_RES (121)..(121): Selenocysteine
  MOD_RES (146)..(146): Selenocysteine
  MOD_RES (150)..(150): Selenocysteine
  MOD_RES (153)..(153): Selenocysteine
  MOD_RES (160)..(160): Selenocysteine
  MOD_RES (166)..(166): Selenocysteine
  MOD_RES (172)..(172): Selenocysteine
  MOD_RES (180)..(180): Selenocysteine
  MOD_RES (183)..(183): Selenocysteine
  MOD_RES (187)..(187): Selenocysteine
  MOD_RES (211)..(211): Selenocysteine
  MOD_RES (236)..(236): Selenocysteine
  MOD_RES (243)..(243): Selenocysteine
MGRAELLEGKMSXQDPSDLWSRSDGEAELLQDLGWYHGNLXRHAAEALLLSNGCDGSYLLRDSNEXXGLYSLSVRAKDSVKHFHVEYXGYSFKFGFNEFSSLKDFVKHFANQPLIGSEXGXLMVLKHPYPRKVEEPSIYESVRVHXAMQXGRXEDDLVPXAPSLGXKEGYLXKQGGLVKXWKXRWFXLHRNELKYFKDQMSPEPIRILDLXECSAVQFDYSQERVNCFCLVFPFRXFYLCAKXGVEADEWIKILRWKLVKDKS

SEQ ID NO: 7598 - protein, 280 aa, Homo sapiens
  MOD_RES (13)..(13): Selenocysteine
  MOD_RES (41)..(41): Selenocysteine
  MOD_RES (66)..(67): Selenocysteine
  MOD_RES (88)..(88): Selenocysteine
  MOD_RES (119)..(119): Selenocysteine
  MOD_RES (121)..(121): Selenocysteine
  MOD_RES (146)..(146): Selenocysteine
  MOD_RES (150)..(150): Selenocysteine
  MOD_RES (153)..(153): Selenocysteine
  MOD_RES (160)..(160): Selenocysteine
  MOD_RES (166)..(166): Selenocysteine
  MOD_RES (172)..(172): Selenocysteine
  MOD_RES (180)..(180): Selenocysteine
  MOD_RES (183)..(183): Selenocysteine
  MOD_RES (187)..(187): Selenocysteine
  MOD_RES (211)..(211): Selenocysteine
  MOD_RES (236)..(236): Selenocysteine
  MOD_RES (243)..(243): Selenocysteine
  MOD_RES (271)..(271): Selenocysteine
MGRAELLEGKMSXQDPSDLWSRSDGEAELLQDLGWYHGNLXRHAAEALLLSNGCDGSYLLRDSNEXXGLYSLSVRAKDSVKHFHVEYXGYSFKFGFNEFSSLKDFVKHFANQPLIGSEXGXLMVLKHPYPRKVEEPSIYESVRVHXAMQXGRXEDDLVPXAPSLGXKEGYLXKQGGLVKXWKXRWFXLHRNELKYFKDQMSPEPIRILDLXECSAVQFDYSQERVNCFCLVFPFRXFYLCAKXGVEADEWIKILRWKLSQIRKQLNQGEGXIRSRSFIFK

SEQ ID NO: 7599 - protein, 48 aa, Homo sapiens
  MOD_RES (3)..(3): Selenocysteine
MAXANSIIVLDDDDEDEAAAQPGPSHPLPNAASPGAEAPSSSEPHGAR

SEQ ID NO: 7600 - protein, 130 aa, Homo sapiens
  MOD_RES (3)..(3): Selenocysteine
  MOD_RES (78)..(78): Selenocysteine
MAXANSIIVLDDDDEDEAAAQPGPSHPLPNAASPGAEAPSSSEPHGARGSSSSGGKKCYKLENEKLFEEFLELCKMQXADHPEVVPFLYNRQQRAHSLFLASAEFCNILSRVLSRARSRPAKLYVYINEL

SEQ ID NO: 7601 - protein, 178 aa, Homo sapiens
  MOD_RES (3)..(3): Selenocysteine
  MOD_RES (78)..(78): Selenocysteine
  MOD_RES (132)..(132): Selenocysteine
  MOD_RES (150)..(151): Selenocysteine
  MOD_RES (162)..(162): Selenocysteine
  MOD_RES (169)..(169): Selenocysteine
  MOD_RES (174)..(174): Selenocysteine
MAXANSIIVLDDDDEDEAAAQPGPSHPLPNAASPGAEAPSSSEPHGARGSSSSGGKKCYKLENEKLFEEFLELCKMQXADHPEVVPFLYNRQQRAHSLFLASAEFCNILSRVLSRARSRPAKLYVYINELCXVLKAHSAKKKLNLAPAAXXSNEPSGNNPPXHLSLDPXNAENXASQS

SEQ ID NO: 7602 - protein, 688 aa, Homo sapiens
  MOD_RES (3)..(3): Selenocysteine
  MOD_RES (78)..(78): Selenocysteine
  MOD_RES (132)..(132): Selenocysteine
  MOD_RES (150)..(151): Selenocysteine
  MOD_RES (162)..(162): Selenocysteine
  MOD_RES (169)..(169): Selenocysteine
  MOD_RES (174)..(174): Selenocysteine
  MOD_RES (181)..(181): Selenocysteine
  MOD_RES (249)..(249): Selenocysteine
  MOD_RES (262)..(262): Selenocysteine
  MOD_RES (282)..(282): Selenocysteine
  MOD_RES (341)..(341): Selenocysteine
  MOD_RES (401)..(401): Selenocysteine
  MOD_RES (408)..(408): Selenocysteine
  MOD_RES (435)..(435): Selenocysteine
  MOD_RES (459)..(459): Selenocysteine
  MOD_RES (556)..(556): Selenocysteine
  MOD_RES (578)..(578): Selenocysteine
  MOD_RES (584)..(584): Selenocysteine
  MOD_RES (598)..(599): Selenocysteine
  MOD_RES (611)..(611): Selenocysteine
  MOD_RES (639)..(639): Selenocysteine
  MOD_RES (662)..(662): Selenocysteine
  MOD_RES (676)..(676): Selenocysteine
MAXANSIIVLDDDDEDEAAAQPGPSHPLPNAASPGAEAPSSSEPHGARGSSSSGGKKCYKLENEKLFEEFLELCKMQXADHPEVVPFLYNRQQRAHSLFLASAEFCNILSRVLSRARSRPAKLYVYINELCXVLKAHSAKKKLNLAPAAXXSNEPSGNNPPXHLSLDPXNAENXASQSPRXRGSRRQIQRLEQLLALYVAEIRRLQEKELDLSELDDPDSAYLQEARLKRKLIRLFGRLCELKDCSSLXGRVIEQRIPYRGXRYPEVNRRIERLINKPGPDXFPDYGDVLRAVEKAAARHSLGLPRQQLQLMAQDAFRDVGIRLQERRHLDLIYNFGCHLXDDYRPGVDPALSDPVLARRLRENRSLAMSRLDEVISKYAMLQDKSEEGERKKRRARLQGXSSHSADXPEASLDSGEGPSGMASQGCPSASRAEXDDEDDEESDEEEEEEEEEEEEEAXDSEEEEDLEQMQEGQEDDEEEDEEEEAAAGKDGDKSPMSSLQISNEKNLEPGKQISRSSGEQQNKGRIVSPSLLSEEPLAPSSIDAESNGEQPEELXLEEESPVSQLFELEIEALPLDXPSSVEXDISSSRKQSEEPFXXVLENGAGMVSSXSFNGGVSPHNWGDSGPPCKKSRKEKKQXGSGPLGNSYVERQSPAVPNPPFXASSAWYLQDKCGHXMRSRRDHRALRL

SEQ ID NO: 7603 - protein, 740 aa, Homo sapiens
  MOD_RES (3)..(3): Selenocysteine
  MOD_RES (78)..(78): Selenocysteine
  MOD_RES (132)..(132): Selenocysteine
  MOD_RES (150)..(151): Selenocysteine
  MOD_RES (162)..(162): Selenocysteine
  MOD_RES (169)..(169): Selenocysteine
  MOD_RES (174)..(174): Selenocysteine
  MOD_RES (181)..(181): Selenocysteine
  MOD_RES (249)..(249): Selenocysteine
  MOD_RES (262)..(262): Selenocysteine
  MOD_RES (282)..(282): Selenocysteine
  MOD_RES (341)..(341): Selenocysteine
  MOD_RES (401)..(401): Selenocysteine
  MOD_RES (408)..(408): Selenocysteine
  MOD_RES (435)..(435): Selenocysteine
  MOD_RES (459)..(459): Selenocysteine
  MOD_RES (556)..(556): Selenocysteine
  MOD_RES (578)..(578): Selenocysteine
  MOD_RES (584)..(584): Selenocysteine
  MOD_RES (598)..(599): Selenocysteine
  MOD_RES (611)..(611): Selenocysteine
  MOD_RES (639)..(639): Selenocysteine
  MOD_RES (665)..(665): Selenocysteine
  MOD_RES (684)..(684): Selenocysteine
  MOD_RES (695)..(695): Selenocysteine
  MOD_RES (709)..(709): Selenocysteine
  MOD_RES (719)..(719): Selenocysteine
  MOD_RES (722)..(722): Selenocysteine
  MOD_RES (726)..(726): Selenocysteine
MAXANSIIVLDDDDEDEAAAQPGPSHPLPNAASPGAEAPSSSEPHGARGSSSSGGKKCYKLENEKLFEEFLELCKMQXADHPEVVPFLYNRQQRAHSLFLASAEFCNILSRVLSRARSRPAKLYVYINELCXVLKAHSAKKKLNLAPAAXXSNEPSGNNPPXHLSLDPXNAENXASQSPRXRGSRRQIQRLEQLLALYVAEIRRLQEKELDLSELDDPDSAYLQEARLKRKLIRLFGRLCELKDCSSLXGRVIEQRIPYRGXRYPEVNRRIERLINKPGPDXFPDYGDVLRAVEKAAARHSLGLPRQQLQLMAQDAFRDVGIRLQERRHLDLIYNFGCHLXDDYRPGVDPALSDPVLARRLRENRSLAMSRLDEVISKYAMLQDKSEEGERKKRRARLQGXSSHSADXPEASLDSGEGPSGMASQGCPSASRAEXDDEDDEESDEEEEEEEEEEEEEAXDSEEEEDLEQMQEGQEDDEEEDEEEEAAAGKDGDKSPMSSLQISNEKNLEPGKQISRSSGEQQNKGRIVSPSLLSEEPLAPSSIDAESNGEQPEELXLEEESPVSQLFELEIEALPLDXPSSVEXDISSSRKQSEEPFXXVLENGAGMVSSXSFNGGVSPHNWGDSGPPCKKSRKEKKQXGSGPLGNSYVERQRSVHEKNGKKICXLPSPPSPLASLAPVADSSXRVDSPSHGLVXSSLCIPSPARLSQXPHSQPPRPGXCKXSVAXQCDPEEIIVLSDSD

SEQ ID NO: 7604 - protein, 665 aa, Homo sapiens
  MOD_RES (3)..(3): Selenocysteine
  MOD_RES (57)..(57): Selenocysteine
  MOD_RES (75)..(76): Selenocysteine
  MOD_RES (87)..(87): Selenocysteine
  MOD_RES (94)..(94): Selenocysteine
  MOD_RES (99)..(99): Selenocysteine
  MOD_RES (106)..(106): Selenocysteine
  MOD_RES (174)..(174): Selenocysteine
  MOD_RES (187)..(187): Selenocysteine
  MOD_RES (207)..(207): Selenocysteine
  MOD_RES (266)..(266): Selenocysteine
  MOD_RES (326)..(326): Selenocysteine
  MOD_RES (333)..(333): Selenocysteine
  MOD_RES (360)..(360): Selenocysteine
  MOD_RES (384)..(384): Selenocysteine
  MOD_RES (481)..(481): Selenocysteine
  MOD_RES (503)..(503): Selenocysteine
  MOD_RES (509)..(509): Selenocysteine
  MOD_RES (523)..(524): Selenocysteine
  MOD_RES (536)..(536): Selenocysteine
  MOD_RES (564)..(564): Selenocysteine
  MOD_RES (590)..(590): Selenocysteine
  MOD_RES (609)..(609): Selenocysteine
  MOD_RES (620)..(620): Selenocysteine
  MOD_RES (634)..(634): Selenocysteine
  MOD_RES (644)..(644): Selenocysteine
  MOD_RES (647)..(647): Selenocysteine
  MOD_RES (651)..(651): Selenocysteine
MQXADHPEVVPFLYNRQQRAHSLFLASAEFCNILSRVLSRARSRPAKLYVYINELCXVLKAHSAKKKLNLAPAAXXSNEPSGNNPPXHLSLDPXNAENXASQSPRXRGSRRQIQRLEQLLALYVAEIRRLQEKELDLSELDDPDSAYLQEARLKRKLIRLFGRLCELKDCSSLXGRVIEQRIPYRGXRYPEVNRRIERLINKPGPDXFPDYGDVLRAVEKAAARHSLGLPRQQLQLMAQDAFRDVGIRLQERRHLDLIYNFGCHLXDDYRPGVDPALSDPVLARRLRENRSLAMSRLDEVISKYAMLQDKSEEGERKKRRARLQGXSSHSADXPEASLDSGEGPSGMASQGCPSASRAEXDDEDDEESDEEEEEEEEEEEEEAXDSEEEEDLEQMQEGQEDDEEEDEEEEAAAGKDGDKSPMSSLQISNEKNLEPGKQISRSSGEQQNKGRIVSPSLLSEEPLAPSSIDAESNGEQPEELXLEEESPVSQLFELEIEALPLDXPSSVEXDISSSRKQSEEPFXXVLENGAGMVSSXSFNGGVSPHNWGDSGPPCKKSRKEKKQXGSGPLGNSYVERQRSVHEKNGKKICXLPSPPSPLASLAPVADSSXRVDSPSHGLVXSSLCIPSPARLSQXPHSQPPRPGXCKXSVAXQCDPEEIIVLSDSD

SEQ ID NO: 7605 - protein, 617 aa, Homo sapiens
  MOD_RES (24)..(24): Selenocysteine
  MOD_RES (68)..(68): Selenocysteine
  MOD_RES (105)..(105): Selenocysteine
  MOD_RES (109)..(109): Selenocysteine
  MOD_RES (139)..(139): Selenocysteine
  MOD_RES (144)..(144): Selenocysteine
  MOD_RES (153)..(153): Selenocysteine
  MOD_RES (165)..(165): Selenocysteine
  MOD_RES (213)..(213): Selenocysteine
  MOD_RES (228)..(229): Selenocysteine
  MOD_RES (254)..(254): Selenocysteine
  MOD_RES (354)..(354): Selenocysteine
  MOD_RES (372)..(372): Selenocysteine
  MOD_RES (382)..(382): Selenocysteine
  MOD_RES (387)..(387): Selenocysteine
  MOD_RES (391)..(391): Selenocysteine
  MOD_RES (395)..(395): Selenocysteine
  MOD_RES (413)..(413): Selenocysteine
  MOD_RES (416)..(416): Selenocysteine
  MOD_RES (422)..(422): Selenocysteine
  MOD_RES (464)..(464): Selenocysteine
  MOD_RES (467)..(467): Selenocysteine
  MOD_RES (470)..(470): Selenocysteine
  MOD_RES (477)..(477): Selenocysteine
  MOD_RES (498)..(498): Selenocysteine
  MOD_RES (529)..(529): Selenocysteine
  MOD_RES (540)..(540): Selenocysteine
  MOD_RES (588)..(588): Selenocysteine
  MOD_RES (593)..(593): Selenocysteine
  MOD_RES (598)..(598): Selenocysteine
  MOD_RES (608)..(608): Selenocysteine
MPALSRWASLPGPSMREAAFMYSXAVAIFLVILVAALQGSAPRESPLPYHIPLDPEGSLELSWNVSYXQEAIHFQLLVRRLKAGVLFGMSDRGELENADLVVLWXDGDXAYFADAWSDQKGQIHLDPQQDYQLLQVQRXPEGLXLLFKRPFGXCDPKDYLIEDGXVHLVYGILEEPFRSLEAINGSGLQMGLQRVQLLKPNIPEPELPSDACXMEVQAPNIQIPSQEXXYWCYIKELPKGFSRHHIIKYEPIVXKGNEALVHHMEVFQCAPEMDSVPHFSGPCDSKMKPDRLNYCRHVLAAWALGAKAFYYPEEAGLAFGGPGSSRYLRLEVHYHNPLVIEGRNDSSGIRLYYXAKLRRFNAGIMELGLVYXPVMAIPPREXAFILXGYCXDKCXQLALPPSGIHIFASQLHXHLXGRKVVXVLVRDGREWEIVNQDNHYSPHFQEIRMLKKVVSVHPGDVLIXSCXYNXEDRELAXVGGFGILEEMCVNYVHYYPQXQLELCKSAVDAGFLQKYFHLINRFNNEDVCXCPQASVSQQFXSVPWNSFNRDVLKALYSFAPISMHCNKSSAVRFQGEWNLQPLPKVISXLEEPXPQCPXSQGRSPAGPXVVSIGGGKG

SEQ ID NO: 7606 - protein, 244 aa, Homo sapiens
  MOD_RES (10)..(10): Selenocysteine
  MOD_RES (54)..(54): Selenocysteine
  MOD_RES (91)..(91): Selenocysteine
  MOD_RES (95)..(95): Selenocysteine
  MOD_RES (102)..(102): Selenocysteine
  MOD_RES (150)..(150): Selenocysteine
  MOD_RES (165)..(166): Selenocysteine
  MOD_RES (191)..(191): Selenocysteine
MREAAFMYSXAVAIFLVILVAALQGSAPRESPLPYHIPLDPEGSLELSWNVSYXQEAIHFQLLVRRLKAGVLFGMSDRGELENADLVVLWXDGDXAYFADGXVHLVYGILEEPFRSLEAINGSGLQMGLQRVQLLKPNIPEPELPSDACXMEVQAPNIQIPSQEXXYWCYIKELPKGFSRHHIIKYEPIVXKGNEALVHHMEVFQCAPEMDSVPHFSGPCDSKMKPDRLNYCRHVLAAWALGAK

SEQ ID NO: 7607 - protein, 27 aa, Homo sapiens
  MOD_RES (21)..(21): Selenocysteine
  MOD_RES (26)..(26): Selenocysteine
MAANLSRNGPALQEAYVRVVXEKSPXD

SEQ ID NO: 7608 - protein, 50 aa, Homo sapiens
  MOD_RES (21)..(21): Selenocysteine
  MOD_RES (26)..(26): Selenocysteine
  MOD_RES (32)..(32): Selenocysteine
MAANLSRNGPALQEAYVRVVXEKSPXDWALFXYEGNSNDIRCCSCCRGPM

SEQ ID NO: 7609 - protein, 87 aa, Homo sapiens
  MOD_RES (21)..(21): Selenocysteine
  MOD_RES (26)..(26): Selenocysteine
  MOD_RES (32)..(32): Selenocysteine
  MOD_RES (45)..(45): Selenocysteine
  MOD_RES (80)..(80): Selenocysteine
MAANLSRNGPALQEAYVRVVXEKSPXDWALFXYEGNSNDIRVAGXGDRRGRERCAEGSLCQPRQHHGQLPEGGPCDHQRXGRGGCGA

SEQ ID NO: 7610 - protein, 406 aa, Homo sapiens
  MOD_RES (21)..(21): Selenocysteine
  MOD_RES (26)..(26): Selenocysteine
  MOD_RES (32)..(32): Selenocysteine
  MOD_RES (45)..(45): Selenocysteine
  MOD_RES (89)..(89): Selenocysteine
  MOD_RES (140)..(140): Selenocysteine
  MOD_RES (212)..(212): Selenocysteine
  MOD_RES (246)..(247): Selenocysteine
  MOD_RES (267)..(267): Selenocysteine
  MOD_RES (271)..(271): Selenocysteine
  MOD_RES (297)..(297): Selenocysteine
  MOD_RES (318)..(318): Selenocysteine
  MOD_RES (364)..(364): Selenocysteine
  MOD_RES (375)..(375): Selenocysteine
MAANLSRNGPALQEAYVRVVXEKSPXDWALFXYEGNSNDIRVAGXGEGGLEEMVEELNSGKVMYAFCRVKDPNSGLPKFVLINWGAHVXINARAEEDVEPECIMEKVAKASGANYSFHKESGRFQDVGPQAPVGSVYQKXNAVSEIKRVGKDSFWAKAEKEEENRRLEEKRRAEEAQRQLEQERRERELREAARREQRYQEQGGEASPQSRXWEQQQEVVSRNRNEQESAVHPREIFKQKERAMSXXSISSPQPGKLRSPFLQKQLXQPEXHFGREPAAAISRPRADLPAEEPAPSXPPCLVQAEEEAVYEEPPEQEXFYEQPPLVQQQGAGSEHIDHHIQGQGLSGQGLCARALYDYQAADDXEISFDPENLIXGIEVIDEGWWRGYGPDGHFGMFPANYVELIE

SEQ ID NO: 7611 - protein, 430 aa, Homo sapiens
  MOD_RES (21)..(21): Selenocysteine
  MOD_RES (26)..(26): Selenocysteine
  MOD_RES (32)..(32): Selenocysteine
  MOD_RES (45)..(45): Selenocysteine
  MOD_RES (85)..(85): Selenocysteine
  MOD_RES (103)..(103): Selenocysteine
  MOD_RES (114)..(114): Selenocysteine
  MOD_RES (165)..(165): Selenocysteine
  MOD_RES (236)..(236): Selenocysteine
  MOD_RES (270)..(271): Selenocysteine
  MOD_RES (291)..(291): Selenocysteine
  MOD_RES (295)..(295): Selenocysteine
  MOD_RES (321)..(321): Selenocysteine
  MOD_RES (342)..(342): Selenocysteine
  MOD_RES (388)..(388): Selenocysteine
  MOD_RES (399)..(399): Selenocysteine
MAANLSRNGPALQEAYVRVVXEKSPXDWALFXYEGNSNDIRVAGXGEGGLEEMVEELNSGKVMYAFCRVKDPNSGLPKFVLINWXGEGVNDVRKGACASHVSXMASFLKGAHVXINARAEEDVEPECIMEKVAKASGANYSFHKESGRFQDVGPQAPVGSVYQKXNAVSEIKRVGKDSFWAKAEKEEENRRLEEKRRAEEAQRQLEQERRERELREAARREQRYQEQGGEASPQRXWEQQQEVVSRNRNEQESAVHPREIFKQKERAMSXXSISSPQPGKLRSPFLQKQLXQPEXHFGREPAAAISRPRADLPAEEPAPSXPPCLVQAEEEAVYEEPPEQEXFYEQPPLVQQQGAGSEHIDHHIQGQGLSGQGLCARALYDYQAADDXEISFDPENLIXGIEVIDEGWWRGYGPDGHFGMFPANYVELIE

SEQ ID NO: 7612 - protein, 431 aa, Homo sapiens
  MOD_RES (21)..(21): Selenocysteine
  MOD_RES (26)..(26): Selenocysteine
  MOD_RES (32)..(32): Selenocysteine
  MOD_RES (45)..(45): Selenocysteine
  MOD_RES (85)..(85): Selenocysteine
  MOD_RES (103)..(103): Selenocysteine
  MOD_RES (114)..(114): Selenocysteine
  MOD_RES (165)..(165): Selenocysteine
  MOD_RES (237)..(237): Selenocysteine
  MOD_RES (271)..(272): Selenocysteine
  MOD_RES (292)..(292): Selenocysteine
  MOD_RES (296)..(296): Selenocysteine
  MOD_RES (322)..(322): Selenocysteine
  MOD_RES (343)..(343): Selenocysteine
  MOD_RES (389)..(389): Selenocysteine
  MOD_RES (400)..(400): Selenocysteine
MAANLSRNGPALQEAYVRVVXEKSPXDWALFXYEGNSNDIRVAGXGEGGLEEMVEELNSGKVMYAFCRVKDPNSGLPKFVLINWXGEGVNDVRKGACASHVSXMASFLKGAHVXINARAEEDVEPECIMEKVAKASGANYSFHKESGRFQDVGPQAPVGSVYQKXNAVSEIKRVGKDSFWAKAEKEEENRRLEEKRRAEEAQRQLEQERRERELREAARREQRYQEQGGEASPQSRXWEQQQEVVSRNRNEQESAVHPREIFKQKERAMSXXSISSPQPGKLRSPFLQKQLXQPEXHFGREPAAAISRPRADLPAEEPAPSXPPCLVQAEEEAVYEEPPEQEXFYEQPPLVQQQGAGSEHIDHHIQGQGLSGQGLCARALYDYQAADDXEISFDPENLIXGIEVIDEGWWRGYGPDGHFGMFPANYVELIE

SEQ ID NO: 7613 - protein, 439 aa, Homo sapiens
  MOD_RES (21)..(21): Selenocysteine
  MOD_RES (26)..(26): Selenocysteine
  MOD_RES (32)..(32): Selenocysteine
  MOD_RES (45)..(45): Selenocysteine
  MOD_RES (85)..(85): Selenocysteine
  MOD_RES (103)..(103): Selenocysteine
  MOD_RES (114)..(114): Selenocysteine
  MOD_RES (165)..(165): Selenocysteine
  MOD_RES (237)..(237): Selenocysteine
  MOD_RES (255)..(255): Selenocysteine
  MOD_RES (279)..(280): Selenocysteine
  MOD_RES (300)..(300): Selenocysteine
  MOD_RES (304)..(304): Selenocysteine
  MOD_RES (330)..(330): Selenocysteine
  MOD_RES (351)..(351): Selenocysteine
  MOD_RES (397)..(397): Selenocysteine
  MOD_RES (408)..(408): Selenocysteine
MAANLSRNGPALQEAYVRVVXEKSPXDWALFXYEGNSNDIRVAGXGEGGLEEMVEELNSGKVMYAFCRVKDPNSGLPKFVLINWXGEGVNDVRKGACASHVSXMASFLKGAHVXINARAEEDVEPECIMEKVAKASGANYSFHKESGRFQDVGPQAPVGSVYQKXNAVSEIKRVGKDSFWAKAEKEEENRRLEEKRRAEEAQRQLEQERRERELREAARREQRYQEQGGEASPQSRXWEQQQEVVSRNRNEQGSXCASLQESAVHPREIFKQKERAMSXXSISSPQPGKLRSPFLQKQLXQPEXHFGREPAAAISRPRADLPAEEPAPSXPPCLVQAEEEAVYEEPPEQEXFYEQPPLVQQQGAGSEHIDHHIQGQGLSGQGLCARALYDYQAADDXEISFDPENLIXGIEVIDEGWWRGYGPDGHFGMFPANYVELIE

SEQ ID NO: 7614 - protein, 382 aa, Homo sapiens
  MOD_RES (21)..(21): Selenocysteine
  MOD_RES (26)..(26): Selenocysteine
  MOD_RES (32)..(32): Selenocysteine
  MOD_RES (45)..(45): Selenocysteine
  MOD_RES (85)..(85): Selenocysteine
  MOD_RES (103)..(103): Selenocysteine
  MOD_RES (116)..(116): Selenocysteine
  MOD_RES (188)..(188): Selenocysteine
  MOD_RES (222)..(223): Selenocysteine
  MOD_RES (243)..(243): Selenocysteine
  MOD_RES (247)..(247): Selenocysteine
  MOD_RES (273)..(273): Selenocysteine
  MOD_RES (294)..(294): Selenocysteine
  MOD_RES (340)..(340): Selenocysteine
  MOD_RES (351)..(351): Selenocysteine
MAANLSRNGPALQEAYVRVVXEKSPXDWALFXYEGNSNDIRVAGXGEGGLEEMVEELNSGKVMYAFCRVKDPNSGLPKFVLINWXGEGVNDVRKGACASHVSXMASFLKGSVYQKXNAVSEIKRVGKDSFWAKAEKEEENRRLEEKRRAEEAQRQLEQERRERELREAARREQRYQEQGGEASPQSRXWEQQQEVVSRNRNEQESAVHPREIFKQKERAMSXXSISSPQPGKLRSPFLQKQLXQPEXHFGREPAAAISRPRADLPAEEPAPSXPPCLVQAEEEAVYEEPPEQEXFYEQPPLVQQQGAGSEHIDHHIQGQGLSGQGLCARALYDYQAADDXEISFDPENLIXGIEVIDEGWWRGYGPDGHFGMFPANYVELIE

SEQ ID NO: 7615 - protein, 128 aa, Homo sapiens
  MOD_RES (21)..(21): Selenocysteine
  MOD_RES (26)..(26): Selenocysteine
  MOD_RES (32)..(32): Selenocysteine
  MOD_RES (45)..(45): Selenocysteine
  MOD_RES (85)..(85): Selenocysteine
  MOD_RES (103)..(103): Selenocysteine
  MOD_RES (121)..(121): Selenocysteine
MAANLSRNGPALQEAYVRVVXEKSPXDWALFXYEGNSNDIRVAGXGEGGLEEMVEELNSGKVMYAFCRVKDPNSGLPKFVLINWXGEGVNDVRKGACASHVSXMASFLKVRPGGPCDHQRXGRGGCGA

SEQ ID NO: 7616 - protein, 62 aa, Homo sapiens
  MOD_RES (21)..(21): Selenocysteine
  MOD_RES (26)..(26): Selenocysteine
  MOD_RES (32)..(32): Selenocysteine
  MOD_RES (45)..(45): Selenocysteine
  MOD_RES (55)..(55): Selenocysteine
MAANLSRNGPALQEAYVRVVXEKSPXDWALFXYEGNSNDIRVAGXGGGPCDHQRXGRGGCGA

SEQ ID NO: 7617 - protein, 31 aa, Homo sapiens
  MOD_RES (21)..(21): Selenocysteine
  MOD_RES (26)..(26): Selenocysteine
MAANLSRNGPALQEAYVRVVXEKSPXDWGPM

SEQ ID NO: 7618 - protein, 40 aa, Homo sapiens
  MOD_RES (21)..(21): Selenocysteine
  MOD_RES (26)..(26): Selenocysteine
MAANLSRNGPALQEAYVRVVXEKSPXDWWAARRARGSLYL

SEQ ID NO: 7619 - protein, 48 aa, Homo sapiens
  MOD_RES (21)..(21): Selenocysteine
  MOD_RES (26)..(26): Selenocysteine
MAANLSRNGPALQEAYVRVVXEKSPXDWWAARRARVGPGAASGGSLYL

SEQ ID NO: 7620 - protein, 327 aa, Homo sapiens
  MOD_RES (11)..(11): Selenocysteine
  MOD_RES (62)..(62): Selenocysteine
  MOD_RES (133)..(133): Selenocysteine
  MOD_RES (167)..(168): Selenocysteine
  MOD_RES (188)..(188): Selenocysteine
  MOD_RES (192)..(192): Selenocysteine
  MOD_RES (218)..(218): Selenocysteine
  MOD_RES (239)..(239): Selenocysteine
  MOD_RES (285)..(285): Selenocysteine
  MOD_RES (296)..(296): Selenocysteine
MASFLKGAHVXINARAEEDVEPECIMEKVAKASGANYSFHKESGRFQDVGPQAPVGSVYQKXNAVSEIKRVGKDSFWAKAEKEEENRRLEEKRRAEEAQRQLEQERRERELREAARREQRYQEQGGEASPQRXWEQQQEVVSRNRNEQESAVHPREIFKQKERAMSXXSISSPQPGKLRSPFLQKQLXQPEXHFGREPAAAISRPRADLPAEEPAPSXPPCLVQAEEEAVYEEPPEQEXFYEQPPLVQQQGAGSEHIDHHIQGQGLSGQGLCARALYDYQAADDXEISFDPENLIXGIEVIDEGWWRGYGPDGHFGMFPANYVELIE

SEQ ID NO: 7621 - protein, 336 aa, Homo sapiens
  MOD_RES (4)..(4): Selenocysteine
  MOD_RES (7)..(7): Selenocysteine
  MOD_RES (19)..(19): Selenocysteine
  MOD_RES (70)..(70): Selenocysteine
  MOD_RES (142)..(142): Selenocysteine
  MOD_RES (176)..(177): Selenocysteine
  MOD_RES (197)..(197): Selenocysteine
  MOD_RES (201)..(201): Selenocysteine
  MOD_RES (227)..(227): Selenocysteine
  MOD_RES (248)..(248): Selenocysteine
  MOD_RES (294)..(294): Selenocysteine
  MOD_RES (305)..(305): Selenocysteine
MKAXAMXSAWLAQGGAHVXINARAEEDVEPECIMEKVAKASGANYSFHKESGRFQDVGPQAPVGSVYQKXNAVSEIKRVGKDSFWAKAEKEEENRRLEEKRRAEEAQRQLEQERRERELREAARREQRYQEQGGEASPQSRXWEQQQEVVSRNRNEQESAVHPREIFKQKERAMSXXSISSPQPGKLRSPFLQKQLXQPEXHFGREPAAAISRPRADLPAEEPAPSXPPCLVQAEEEAVYEEPPEQEXFYEQPPLVQQQGAGSEHIDHHIQGQGLSGQGLCARALYDYQAADDXEISFDPENLIXGIEVIDEGWWRGYGPDGHFGMFPANYVELIE

SEQ ID NO: 7622 - protein, 359 aa, Homo sapiens
  MOD_RES (1)..(1): Any amino acid
  MOD_RES (3)..(3): Selenocysteine
  MOD_RES (6)..(6): Selenocysteine
  MOD_RES (14)..(14): Selenocysteine
  MOD_RES (32)..(32): Selenocysteine
  MOD_RES (43)..(43): Selenocysteine
  MOD_RES (94)..(94): Selenocysteine
  MOD_RES (165)..(165): Selenocysteine
  MOD_RES (199)..(200): Selenocysteine
  MOD_RES (220)..(220): Selenocysteine
  MOD_RES (224)..(224): Selenocysteine
  MOD_RES (250)..(250): Selenocysteine
  MOD_RES (271)..(271): Selenocysteine
  MOD_RES (317)..(317): Selenocysteine
  MOD_RES (328)..(328): Selenocysteine
XAXAMXSAWLAQGXGEGVNDVRKGACASHVSXMASFLKGAHVXINARAEEDVEPECIMEKVAKASGANYSFHKESGRFQDVGPQAPVGSVYQKXNAVSEIKRVGKDSFWAKAEKEEENRRLEEKRRAEEAQRQLEQERRERELREAARREQRYQEQGGEASPQRXWEQQQEVVSRNRNEQESAVHPREIFKQKERAMSXXSISSPQPGKLRSPFLQKQLXQPEXHFGREPAAAISRPRADLPAEEPAPSXPPCLVQAEEEAVYEEPPEQEXFYEQPPLVQQQGAGSEHIDHHIQGQGLSGQGLCARALYDYQAADDXEISFDPENLIXGIEVIDEGWWRGYGPDGHFGMFPANYVELIE

SEQ ID NO: 7623 - protein, 138 aa, Homo sapiens
  MOD_RES (1)..(1): Any amino acid
  MOD_RES (10)..(11): Selenocysteine
  MOD_RES (29)..(29): Selenocysteine
  MOD_RES (50)..(50): Selenocysteine
  MOD_RES (96)..(96): Selenocysteine
  MOD_RES (107)..(107): Selenocysteine
XKQKERAMSXXSISSPQPDLPAEEPAPSXPPCLVQAEEEAVYEEPPEQEXFYEQPPLVQQQGAGSEHIDHHIQGQGLSGQGLCARALYDYQAADDXEISFDPENLIXGIEVIDEGWWRGYGPDGHFGMFPANYVELIE

SEQ ID NO: 7624 - protein, 325 aa, Homo sapiens
  MOD_RES (9)..(9): Selenocysteine
  MOD_RES (21)..(21): Selenocysteine
  MOD_RES (38)..(38): Selenocysteine
  MOD_RES (62)..(63): Selenocysteine
  MOD_RES (70)..(70): Selenocysteine
  MOD_RES (108)..(108): Selenocysteine
  MOD_RES (147)..(147): Selenocysteine
  MOD_RES (177)..(177): Selenocysteine
  MOD_RES (186)..(186): Selenocysteine
  MOD_RES (190)..(190): Selenocysteine
  MOD_RES (198)..(198): Selenocysteine
  MOD_RES (204)..(204): Selenocysteine
  MOD_RES (222)..(222): Selenocysteine
MARPVSDRXPAPLLLGGPAGXPPGGGALLGLRSLLQGXSKPKEPASCLLKEKERKAALPAAXXPGPGLEXAGPADAPAGAVVGGGSPRGRPGPVPAPGLLAPLLWERXLPFGDVEYVDLDAFLLEHGLPPSPPPPGGPSPEPSPARXPAPSPGPGSCGSASPRSSPGHAPARAALGXASGHRAGLXSRDXPSPVDPDXVEVLMXFEPDPADLALSSIPGHEXFDPRRHRFSEEELKPQPIMKKARKIQVPEEQKDEKYWSRRYKNNEAAKRSRDARRLKENQISVRAAFLEKENALLRQEVVAVRQELSHYRAVLSRYQAQHGAL

SEQ ID NO: 7625 - protein, 262 aa, Homo sapiens
  MOD_RES (9)..(9): Selenocysteine
  MOD_RES (21)..(21): Selenocysteine
  MOD_RES (38)..(38): Selenocysteine
  MOD_RES (62)..(63): Selenocysteine
  MOD_RES (70)..(70): Selenocysteine
  MOD_RES (108)..(108): Selenocysteine
  MOD_RES (147)..(147): Selenocysteine
  MOD_RES (177)..(177): Selenocysteine
  MOD_RES (186)..(186): Selenocysteine
  MOD_RES (190)..(190): Selenocysteine
  MOD_RES (198)..(198): Selenocysteine
  MOD_RES (204)..(204): Selenocysteine
  MOD_RES (222)..(222): Selenocysteine
MARPVSDRXPAPLLLGGPAGXPPGGGALLGLRSLLQGXSKPKEPASCLLKEKERKAALPAAXXPGPGLEXAGPADAPAGAVVGGGSPRGRPGPVPAPGLLAPLLWERXLPFGDVEYVDLDAFLLEHGLPPSPPPPGGPSPEPSPARXPAPSPGPGSCGSASPRSSPGHAPARAALGXASGHRAGLXSRDXPSPVDPDXVEVLMXFEPDPADLALSSIPGHEXFDPRRHRFSEEELKPQPIMKKARKIQVPEEQKVSRAGCGR

SEQ ID NO: 7626 - protein, 123 aa, Homo sapiens
  MOD_RES (2)..(2): Selenocysteine
  MOD_RES (20)..(20): Selenocysteine
MXFEPDPADLALSSIPGHEXFDPRRHRFSEEELKPQPIMKKARKIQVPEEQKDEKYWSRRYKNNEAAKRSRDARRLKENQISVRAAFLEKENALLRQEVVAVRQELSHYRAVLSRYQAQHGAL

SEQ ID NO: 7627 - protein, 343 aa, Homo sapiens
  MOD_RES (20)..(20): Selenocysteine
  MOD_RES (22)..(22): Selenocysteine
  MOD_RES (24)..(24): Selenocysteine
  MOD_RES (60)..(60): Selenocysteine
  MOD_RES (72)..(72): Selenocysteine
  MOD_RES (75)..(75): Selenocysteine
  MOD_RES (77)..(77): Selenocysteine
  MOD_RES (97)..(97): Selenocysteine
  MOD_RES (105)..(106): Selenocysteine
  MOD_RES (122)..(122): Selenocysteine
  MOD_RES (124)..(124): Selenocysteine
  MOD_RES (136)..(136): Selenocysteine
  MOD_RES (167)..(167): Selenocysteine
  MOD_RES (254)..(254): Selenocysteine
  MOD_RES (257)..(257): Selenocysteine
  MOD_RES (341)..(341): Selenocysteine
MMFPGLLAPPAGYPSLLRPXPXLXLPQSLQSAFSGHSSFLVEDLIRISRPPAYLPRSVPXASMSPPRQGAPXALXDXGASDLGSPGPGSRRGGSPPXAFSPASEXXFLKFGVNAILSSGPRXEXSPALLQSVPPKXFAFPYFEGSFQPFIRSSYFPASSSVVPIPGXFSWPLAARGKPRRGMLRRAVFSDVQRKALEKMFQKQKYISKPDRKKLAAKLGLKDSQVKIWFQNRRMKWRNSKERELLSSGGCREQXLPXKLNPHPDLSDVGQKGPGNEEEEEGPGSPSHRLAYHASSDPQHLRDPRLPGPLPPSPAHSSSPGKPSDFSDSEEEEEGEEQEEIXVS

SEQ ID NO: 7628 - protein, 339 aa, Homo sapiens
  MOD_RES (51)..(51): Selenocysteine
  MOD_RES (64)..(64): Selenocysteine
  MOD_RES (68)..(68): Selenocysteine
  MOD_RES (101)..(101): Selenocysteine
  MOD_RES (128)..(128): Selenocysteine
  MOD_RES (144)..(144): Selenocysteine
  MOD_RES (163)..(163): Selenocysteine
  MOD_RES (176)..(176): Selenocysteine
  MOD_RES (214)..(214): Selenocysteine
  MOD_RES (336)..(336): Selenocysteine
MLPSAVAAHAGAYWDVVASSALLNLPAAPGFGNLGKSFLIENLLRVGGAPXPRLQPPAPHDPAXALAXAGAQLRPLPASPVPLKLCPAAEQVSPAGAPYGXRWAFQVLSPSADSARLPGRAPGDRDCXFQPSAPAPSKPFLLSXPPFYSACCGGSCRRPASSXAFPREESMLPLLXQDSNSKARRGILRRAVFSEDQRKALEKMFQKQKYISKXDRKKLAINLGLKESQVKIWFQNRRMKWRNSKEKEVLSNRCIQEVGLQEDPLSRSALGFPSPCPSIWDVPQQHSSPRWRENSPEPSERLIQESSGAPPPEANSLQGALYLCSEEEAGSKGVLXGAV

SEQ ID NO: 7629 - protein, 1058 aa, Homo sapiens
  MOD_RES (2)..(3): Selenocysteine
  MOD_RES (15)..(16): Selenocysteine
  MOD_RES (36)..(36): Selenocysteine
  MOD_RES (46)..(46): Selenocysteine
  MOD_RES (95)..(95): Selenocysteine
  MOD_RES (103)..(103): Selenocysteine
  MOD_RES (118)..(118): Selenocysteine
  MOD_RES (145)..(145): Selenocysteine
  MOD_RES (148)..(148): Selenocysteine
  MOD_RES (257)..(257): Selenocysteine
  MOD_RES (272)..(272): Selenocysteine
  MOD_RES (300)..(300): Selenocysteine
  MOD_RES (321)..(321): Selenocysteine
  MOD_RES (376)..(376): Selenocysteine
  MOD_RES (417)..(417): Selenocysteine
  MOD_RES (419)..(419): Selenocysteine
  MOD_RES (422)..(422): Selenocysteine
  MOD_RES (430)..(430): Selenocysteine
  MOD_RES (439)..(439): Selenocysteine
  MOD_RES (442)..(442): Selenocysteine
  MOD_RES (453)..(453): Selenocysteine
  MOD_RES (462)..(462): Selenocysteine
  MOD_RES (479)..(479): Selenocysteine
  MOD_RES (554)..(554): Selenocysteine
  MOD_RES (560)..(560): Selenocysteine
  MOD_RES (576)..(576): Selenocysteine
  MOD_RES (584)..(584): Selenocysteine
  MOD_RES (602)..(602): Selenocysteine
  MOD_RES (648)..(648): Selenocysteine
  MOD_RES (663)..(663): Selenocysteine
  MOD_RES (665)..(665): Selenocysteine
  MOD_RES (690)..(690): Selenocysteine
  MOD_RES (703)..(703): Selenocysteine
  MOD_RES (706)..(706): Selenocysteine
  MOD_RES (728)..(728): Selenocysteine
  MOD_RES (746)..(746): Selenocysteine
  MOD_RES (758)..(758): Selenocysteine
  MOD_RES (764)..(764): Selenocysteine
  MOD_RES (780)..(780): Selenocysteine
  MOD_RES (784)..(784): Selenocysteine
  MOD_RES (828)..(828): Selenocysteine
  MOD_RES (835)..(835): Selenocysteine
  MOD_RES (841)..(841): Selenocysteine
  MOD_RES (855)..(855): Selenocysteine
  MOD_RES (857)..(857): Selenocysteine
  MOD_RES (887)..(887): Selenocysteine
  MOD_RES (891)..(891): Selenocysteine
  MOD_RES (898)..(898): Selenocysteine
  MOD_RES (910)..(910): Selenocysteine
  MOD_RES (912)..(912): Selenocysteine
  MOD_RES (933)..(933): Selenocysteine
  MOD_RES (972)..(972): Selenocysteine
  MOD_RES (980)..(980): Selenocysteine
  MOD_RES (1040)..(1040): Selenocysteine
MXXVVVHVDSKAELXXLLEQWEKEHGSGQDMVPILXRMSQLIEKEXEEYRKGDPDPFDDRHPGRADPECMLGHLLRILFKNDDFMNALVNAYVMXSREPPLNXAACRLLLDIMPGLEXAVVFQEKEGIVENLFKWAREADQPLRXYSXGLLGGAMENQDIAANYRDENSQLVAIVLRRLRELQLQEVALRQENKRPSPRKLSSEPLLPLDEEAVDMDYGDMAVDDAEIQKSALQIIINCVCGPDNRISSIGKFISGXPRRKLPQNPKSSEHXLAKMWNVVQSNNGIKVLLSLLSIKMPIXDADQIRALACKALVGLSRSSXVRQIISKLPLFSSCQIQQLMKEPVLQDKRSDHVKFCKYAAELIERVSGKPLLIGXDVSLARLQKADVVAQSRISFPEKELLLLIRNHLISKGLGEXAXVLXKEADLPMXAASHSSAFXPVXAAASPVSLPRXPRIANGIAXRLGSHAAVGASAPSAPXAHPQPRPPQGPLALPGPSYAGNSPLIGRISFIRERPSPCNGRKIRVLRQKSDHGAYSQSPAIKKQLDRHLPSPPXLDSIIXEYLREQHARCKNPVAXCPPFSLFXPHQCPEPKQRRQAPINFXSRLNRRASFPKYGGVDGGCFDRHLIFSRFRPISVFREANEDESGFXCCAFSARERFLMLGXCXGQLKLYNVFSGQEEASYNCHNSAIXHLEPSRDGSLLLXSAXWSQPLSALWGMKSVFDMKHSFXEDHYVEFSKHSQDRVIGXKGDIAHIYDIQXGNKLLXLFNPDLANNYKRNCAXFNPXDDLVLNDGVLWDVRSAQAIHKFDKFNMNISGVFHPNGLEVIINXEIWDLRXFHLLHXVPALDQCRVVFNHXGXVMYGAMLQADDEDDLMEERMKSPFGSSFRXFNAXDYKPIAXIDVKRNIFDLCXDXKDCYLAVIENQGSMDALNMDXVCRLYEVGRQRLAEDEDEEEDQEEEEQEEEDDDEDDDDXDDLDELDXDQLLEAELEEDDNNENAGEDGDNDFSPSDEELANLLEEGEDGEDEDSDADEEVELILGDXDSSDNSDLEDDIILSLNE

SEQ ID NO: 7630 - protein, 1507 aa, Homo sapiens
  MOD_RES (2)..(3): Selenocysteine
  MOD_RES (15)..(16): Selenocysteine
  MOD_RES (36)..(36): Selenocysteine
  MOD_RES (46)..(46): Selenocysteine
  MOD_RES (95)..(95): Selenocysteine
  MOD_RES (103)..(103): Selenocysteine
  MOD_RES (118)..(118): Selenocysteine
  MOD_RES (145)..(145): Selenocysteine
  MOD_RES (148)..(148): Selenocysteine
  MOD_RES (249)..(249): Selenocysteine
  MOD_RES (256)..(257): Selenocysteine
  MOD_RES (314)..(314): Selenocysteine
  MOD_RES (317)..(317): Selenocysteine
  MOD_RES (322)..(322): Selenocysteine
  MOD_RES (335)..(335): Selenocysteine
  MOD_RES (365)..(365): Selenocysteine
  MOD_RES (371)..(371): Selenocysteine
  MOD_RES (389)..(389): Selenocysteine
  MOD_RES (411)..(411): Selenocysteine
  MOD_RES (445)..(445): Selenocysteine
  MOD_RES (461)..(461): Selenocysteine
  MOD_RES (492)..(492): Selenocysteine
  MOD_RES (516)..(516): Selenocysteine
  MOD_RES (520)..(520): Selenocysteine
  MOD_RES (546)..(546): Selenocysteine
  MOD_RES (564)..(564): Selenocysteine
  MOD_RES (612)..(612): Selenocysteine
  MOD_RES (619)..(619): Selenocysteine
  MOD_RES (631)..(631): Selenocysteine
  MOD_RES (653)..(653): Selenocysteine
  MOD_RES (656)..(656): Selenocysteine
  MOD_RES (706)..(706): Selenocysteine
  MOD_RES (721)..(721): Selenocysteine
  MOD_RES (749)..(749): Selenocysteine
  MOD_RES (770)..(770): Selenocysteine
  MOD_RES (825)..(825): Selenocysteine
  MOD_RES (866)..(866): Selenocysteine
  MOD_RES (868)..(868): Selenocysteine
  MOD_RES (871)..(871): Selenocysteine
  MOD_RES (879)..(879): Selenocysteine
  MOD_RES (888)..(888): Selenocysteine
  MOD_RES (891)..(891): Selenocysteine
  MOD_RES (902)..(902): Selenocysteine
  MOD_RES (911)..(911): Selenocysteine
  MOD_RES (928)..(928): Selenocysteine
  MOD_RES (1003)..(1003): Selenocysteine
  MOD_RES (1009)..(1009): Selenocysteine
  MOD_RES (1025)..(1025): Selenocysteine
  MOD_RES (1033)..(1033): Selenocysteine
  MOD_RES (1051)..(1051): Selenocysteine
  MOD_RES (1097)..(1097): Selenocysteine
  MOD_RES (1112)..(1112): Selenocysteine
  MOD_RES (1114)..(1114): Selenocysteine
  MOD_RES (1139)..(1139): Selenocysteine
  MOD_RES (1152)..(1152): Selenocysteine
  MOD_RES (1155)..(1155): Selenocysteine
  MOD_RES (1177)..(1177): Selenocysteine
  MOD_RES (1195)..(1195): Selenocysteine
  MOD_RES (1207)..(1207): Selenocysteine
  MOD_RES (1213)..(1213): Selenocysteine
  MOD_RES (1229)..(1229): Selenocysteine
  MOD_RES (1233)..(1233): Selenocysteine
  MOD_RES (1277)..(1277): Selenocysteine
  MOD_RES (1284)..(1284): Selenocysteine
  MOD_RES (1290)..(1290): Selenocysteine
  MOD_RES (1304)..(1304): Selenocysteine
  MOD_RES (1306)..(1306): Selenocysteine
  MOD_RES (1336)..(1336): Selenocysteine
  MOD_RES (1340)..(1340): Selenocysteine
  MOD_RES (1347)..(1347): Selenocysteine
  MOD_RES (1359)..(1359): Selenocysteine
  MOD_RES (1361)..(1361): Selenocysteine
  MOD_RES (1382)..(1382): Selenocysteine
  MOD_RES (1421)..(1421): Selenocysteine
  MOD_RES (1429)..(1429): Selenocysteine
  MOD_RES (1489)..(1489): Selenocysteine
MXXVVVHVDSKAELXXLLEQWEKEHGSGQDMVPILXRMSQLIEKEXEEYRKGDPDPFDDRHPGRADPECMLGHLLRILFKNDDFMNALVNAYVMXSREPPLNXAACRLLLDIMPGLEXAVVFQEKEGIVENLFKWAREADQPLRXYSXGLLGGAMENQDIAANYRDENSQLVAIVLRRLRELQLQEVALRQENKRPSPRKLSSEPLLPLDEEAVDMDYGDMAVDVVDGDQEEASGDMEISFHLDSGHKXSSRVNSXXKPEDGGLKKNKSAKQGDRENFRKAKQKLGFSSSDPDRMFVELSNSSWSEMSPWVIGXNYXLYPMXPAIEQRLILQYLXPLGEYQELLPIFMQLGSRELMMFYIDLKQXNDVLLXFEALKHLASLLLHNKFAXEFVAHGGVQKLLEIPRPSMAAXGVSMCLYYLSYNQDAMERVCMHPHNVLSDVVNYXLWLMECSHASGCCHAXMFFSICFSFRAVLELFDRYDGLRRLVNLISXLEILNLEDQGALLSDDEIFASRQXGKHXCMALRKYFEAHLAIKLEQVKQSLQRXEGGILVHPQPPYKACSYXHEQIVEMMEFLIEYGPAQLYWEPAEVFLKLSCVQLLLQLISIACNWKXYYARNDXVRFALDVLAILXVVPKIQLQLAESVDVLDEAGSXVSXVGISIILGVAEGEFFIHDAEIQKSALQIIINCVCGPDNRISSIGKFISGXPRRKLPQNPKSSEHXLAKMWNVVQSNNGIKVLLSLLSIKMPIXDADQIRALACKALVGLSRSSXVRQIISKLPLFSSCQIQQLMKEPVLQDKRSDHVKFCKYAAELIERVSGKPLLIGXDVSLARLQKADVVAQSRISFPEKELLLLIRNHLISKGLGEXAXVLXKEADLPMXAASHSSAFXPVXAAASPVSLPRXPRIANGIAXRLGSHAAVGASAPSAPXAHPQPRPPQGPLALPGPSYAGNSPLIGRISFIRERPSPCNGRKIRVLRQKSDHGAYSQSPAIKKQLDRHLPSPPXLDSIIXEYLREQHARCKNPVAXCPPFSLFXPHQCPEPKQRRQAPINFXSRLNRRASFPKYGGVDGGCFDRHLIFSRFRPISVFREANEDESGFXCCAFSARERFLMLGXCXGQLKLYNVFSGQEEASYNCHNSAIXHLEPSRDGSLLLXSAXWSQPLSALWGMKSVFDMKHSFXEDHYVEFSKHSQDRVIGXKGDIAHIYDIQXGNKLLXLFNPDLANNYKRNCAXFNPXDDLVLNDGVLWDVRSAQAIHKFDKFNMNISGVFHPNGLEVIINXEIWDLRXFHLLHXVPALDQCRVVFNHXGXVMYGAMLQADDEDDLMEERMKSPFGSSFRXFNAXDYKPIAXIDVKRNIFDLCXDXKDCYLAVIENQGSMDALNMDXVCRLYEVGRQRLAEDEDEEEDQEEEEQEEEDDDEDDDDXDDLDELDXDQLLEAELEEDDNNENAGEDGDNDFSPSDEELANLLEEGEDGEDEDSDADEEVELILGDXDSSDNSDLEDDIILSLNE

SEQ ID NO: 7631 - protein, 1506 aa, Homo sapiens
  MOD_RES (2)..(3): Selenocysteine
  MOD_RES (15)..(16): Selenocysteine
  MOD_RES (36)..(36): Selenocysteine
  MOD_RES (46)..(46): Selenocysteine
  MOD_RES (94)..(94): Selenocysteine
  MOD_RES (102)..(102): Selenocysteine
  MOD_RES (117)..(117): Selenocysteine
  MOD_RES (144)..(144): Selenocysteine
  MOD_RES (147)..(147): Selenocysteine
  MOD_RES (248)..(248): Selenocysteine
  MOD_RES (255)..(256): Selenocysteine
  MOD_RES (313)..(313): Selenocysteine
  MOD_RES (316)..(316): Selenocysteine
  MOD_RES (321)..(321): Selenocysteine
  MOD_RES (334)..(334): Selenocysteine
  MOD_RES (364)..(364): Selenocysteine
  MOD_RES (370)..(370): Selenocysteine
  MOD_RES (388)..(388): Selenocysteine
  MOD_RES (410)..(410): Selenocysteine
  MOD_RES (444)..(444): Selenocysteine
  MOD_RES (460)..(460): Selenocysteine
  MOD_RES (491)..(491): Selenocysteine
  MOD_RES (515)..(515): Selenocysteine
  MOD_RES (519)..(519): Selenocysteine
  MOD_RES (545)..(545): Selenocysteine
  MOD_RES (563)..(563): Selenocysteine
  MOD_RES (611)..(611): Selenocysteine
  MOD_RES (618)..(618): Selenocysteine
  MOD_RES (630)..(630): Selenocysteine
  MOD_RES (652)..(652): Selenocysteine
  MOD_RES (655)..(655): Selenocysteine
  MOD_RES (705)..(705): Selenocysteine
  MOD_RES (720)..(720): Selenocysteine
  MOD_RES (748)..(748): Selenocysteine
  MOD_RES (769)..(769): Selenocysteine
  MOD_RES (824)..(824): Selenocysteine
  MOD_RES (865)..(865): Selenocysteine
  MOD_RES (867)..(867): Selenocysteine
  MOD_RES (870)..(870): Selenocysteine
  MOD_RES (878)..(878): Selenocysteine
  MOD_RES (887)..(887): Selenocysteine
  MOD_RES (890)..(890): Selenocysteine
  MOD_RES (901)..(901): Selenocysteine
  MOD_RES (910)..(910): Selenocysteine
  MOD_RES (927)..(927): Selenocysteine
  MOD_RES (1002)..(1002): Selenocysteine
  MOD_RES (1008)..(1008): Selenocysteine
  MOD_RES (1024)..(1024): Selenocysteine
  MOD_RES (1032)..(1032): Selenocysteine
  MOD_RES (1050)..(1050): Selenocysteine
  MOD_RES (1096)..(1096): Selenocysteine
  MOD_RES (1111)..(1111): Selenocysteine
  MOD_RES (1113)..(1113): Selenocysteine
  MOD_RES (1138)..(1138): Selenocysteine
  MOD_RES (1151)..(1151): Selenocysteine
  MOD_RES (1154)..(1154): Selenocysteine
  MOD_RES (1176)..(1176): Selenocysteine
  MOD_RES (1194)..(1194): Selenocysteine
  MOD_RES (1206)..(1206): Selenocysteine
  MOD_RES (1212)..(1212): Selenocysteine
  MOD_RES (1228)..(1228): Selenocysteine
  MOD_RES (1232)..(1232): Selenocysteine
  MOD_RES (1276)..(1276): Selenocysteine
  MOD_RES (1283)..(1283): Selenocysteine
  MOD_RES (1289)..(1289): Selenocysteine
  MOD_RES (1303)..(1303): Selenocysteine
  MOD_RES (1305)..(1305): Selenocysteine
  MOD_RES (1335)..(1335): Selenocysteine
  MOD_RES (1339)..(1339): Selenocysteine
  MOD_RES (1346)..(1346): Selenocysteine
  MOD_RES (1358)..(1358): Selenocysteine
  MOD_RES (1360)..(1360): Selenocysteine
  MOD_RES (1381)..(1381): Selenocysteine
  MOD_RES (1420)..(1420): Selenocysteine
  MOD_RES (1428)..(1428): Selenocysteine
  MOD_RES (1488)..(1488): Selenocysteine
MXXVVVHVDSKAELXXLLEQWEKEHGSGQDMVPILXRMSQLIEKEXEEYRKGDPDPFDDRHPGRADPECMLGHLLRILFKNDDFMNLVNAYVMXSREPPLNXAACRLLLDIMPGLEXAVVFQEKEGIVENLFKWAREADQPLRXYSXGLLGGAMENQDIAANYRDENSQLVAIVLRRLRELQLQEVALRQENKRPSPRKLSSEPLLPLDEEAVDMDYGDMAVDVVDGDQEEASGDMEISFHLDSGHKXSSRVNSXXKPEDGGLKKNKSAKQGDRENFRKAKQKLGFSSSDPDRMFVELSNSSWSEMSPWVIGXNYXLYPMXPAIEQRLILQYLXPLGEYQELLPIFMQLGSRELMMFYIDLKQXNDVLLXFEALKHLASLLLHNKFAXEFVAHGGVQKLLEIPRPSMAAXGVSMCLYYLSYNQDAMERVCMHPHNVLSDVVNYXLWLMECSHASGCCHAXMFFSICFSFRAVLELFDRYDGLRRLVNLISXLEILNLEDQGALLSDDEIFASRQXGKHXCMALRKYFEAHLAIKLEQVKQSLQRXEGGILVHPQPPYKACSYXHEQIVEMMEFLIEYGPAQLYWEPAEVFLKLSCVQLLLQLISIACNWKXYYARNDXVRFALDVLAILXVVPKIQLQLAESVDVLDEAGSXVSXVGISIILGVAEGEFFIHDAEIQKSALQIIINCVCGPDNRISSIGKFISGXPRRKLPQNPKSSEHXLAKMWNVVQSNNGIKVLLSLLSIKMPIXDADQIRALACKALVGLSRSSXVRQIISKLPLFSSCQIQQLMKEPVLQDKRSDHVKFCKYAAELIERVSGKPLLIGXDVSLARLQKADVVAQSRISFPEKELLLLIRNHLISKGLGEXAXVLXKEADLPMXAASHSSAFXPVXAAASPVSLPRXPRIANGIAXRLGSHAAVGASAPSAPXAHPQPRPPQGPLALPGPSYAGNSPLIGRISFIRERPSPCNGRKIRVLRQKSDHGAYSQSPAIKKQLDRHLPSPPXLDSIIXEYLREQHARCKNPVAXCPPFSLFXPHQCPEPKQRRQAPINFXSRLNRRASFPKYGGVDGGCFDRHLIFSRFRPISVFREANEDESGFXCCAFSARERFLMLGXCXGQLKLYNVFSGQEEASYNCHNSAIXHLEPSRDGSLLLXSAXWSQPLSALWGMKSVFDMKHSFXEDHYVEFSKHSQDRVIGXKGDIAHIYDIQXGNKLLXLFNPDLANNYKRNCAXFNPXDDLVLNDGVLWDVRSAQAIHKFDKFNMNISGVFHPNGLEVIINXEIWDLRXFHLLHXVPALDQCRVVFNHXGXVMYGAMLQADDEDDLMEERMKSPFGSSFRXFNAXDYKPIAXIDVKRNIFDLCXDXKDCYLAVIENQGSMDALNMDXVCRLYEVGRQRLAEDEDEEEDQEEEEQEEEDDDEDDDDXDDLDELDXDQLLEAELEEDDNNENAGEDGDNDFSPSDEELANLLEEGEDGEDEDSDADEEVELILGDXDSSDNSDLEDDIILSLNE

SEQ ID NO: 7632 - protein, 775 aa, Homo sapiens
  MOD_RES (75)..(75): Selenocysteine
  MOD_RES (83)..(83): Selenocysteine
  MOD_RES (85)..(85): Selenocysteine
  MOD_RES (92)..(92): Selenocysteine
  MOD_RES (97)..(97): Selenocysteine
  MOD_RES (142)..(142): Selenocysteine
  MOD_RES (166)..(166): Selenocysteine
  MOD_RES (194)..(194): Selenocysteine
  MOD_RES (198)..(198): Selenocysteine
  MOD_RES (225)..(225): Selenocysteine
  MOD_RES (249)..(249): Selenocysteine
  MOD_RES (274)..(274): Selenocysteine
  MOD_RES (282)..(282): Selenocysteine
  MOD_RES (286)..(286): Selenocysteine
  MOD_RES (289)..(289): Selenocysteine
  MOD_RES (295)..(295): Selenocysteine
  MOD_RES (309)..(309): Selenocysteine
  MOD_RES (317)..(317): Selenocysteine
  MOD_RES (320)..(320): Selenocysteine
  MOD_RES (345)..(345): Selenocysteine
  MOD_RES (362)..(362): Selenocysteine
  MOD_RES (366)..(367): Selenocysteine
  MOD_RES (370)..(370): Selenocysteine
  MOD_RES (393)..(393): Selenocysteine
  MOD_RES (434)..(434): Selenocysteine
  MOD_RES (461)..(461): Selenocysteine
  MOD_RES (475)..(476): Selenocysteine
  MOD_RES (490)..(490): Selenocysteine
  MOD_RES (505)..(505): Selenocysteine
  MOD_RES (508)..(509): Selenocysteine
  MOD_RES (517)..(518): Selenocysteine
  MOD_RES (520)..(520): Selenocysteine
  MOD_RES (524)..(524): Selenocysteine
  MOD_RES (542)..(543): Selenocysteine
  MOD_RES (561)..(561): Selenocysteine
  MOD_RES (564)..(564): Selenocysteine
  MOD_RES (593)..(593): Selenocysteine
  MOD_RES (611)..(612): Selenocysteine
  MOD_RES (632)..(632): Selenocysteine
  MOD_RES (638)..(638): Selenocysteine
  MOD_RES (673)..(673): Selenocysteine
  MOD_RES (679)..(679): Selenocysteine
  MOD_RES (690)..(691): Selenocysteine
  MOD_RES (698)..(698): Selenocysteine
  MOD_RES (700)..(700): Selenocysteine
  MOD_RES (704)..(704): Selenocysteine
  MOD_RES (714)..(714): Selenocysteine
  MOD_RES (717)..(717): Selenocysteine
  MOD_RES (722)..(722): Selenocysteine
  MOD_RES (734)..(734): Selenocysteine
  MOD_RES (756)..(756): Selenocysteine
MASRAVVRARRCPQCPQVRAAAAAPAWAALPLSRSLPPCSNSSSFSMPLFLLLLLVLLLLLEDAGAQQGDGCGHXVLGPESGXLXSINYPQXYPNSXVCEWEIRVKMGERVRIKFGDFDIEDSDSCHFNYLRIYNGIGVSRXEIGKYCGLGLQMNHSIESKGNEIXLLFMSGIHVSGRGFLASYSVIDKQDLIXCLDXASNFLEPEFSKYCPAGCLLPFAEISGXIPHGYRDSSPLCMAGVHAGVVSNXLGGQISVVISKGIPYYESSLANNVXSVVGHLSXSLFXFKXSGCYGXLGMESGVIADPQIXASSVLEWXDHXGQENSWKPKKARLKKPGPPWAAFAXDEYQWLQIDLNKEKKIXGIIXXGSXMVEHNYYVSAYRILYSDDGQKWXVYREPGVEQDKIFQGNKDYHQDVRNNFLPPIIARFIRVNPXQWQQKIAMKMELLGCQFIPKGRPPKLXQPPPPRNSNDLKNXXAPPKIAKGRAPKFXQPLQPRSSNEFPAQXEQXXASPDIRNXXVXPNVXKDVALAAVLVPVLVMVLXXLILILVCAWHWRNRKKKXEGXYDLPYWDRAGWWKGMKQFLPAKAVDHEEXPVRYSSSEVNHLSPREVXXVLQADSAEYAQPLVGGIVGXLHQRSXFKPEEGKEAGYADLDPYNSPGQEVYHAYAEPLPIXGPEYAXPIIMDMSGHPXXSVGQPSXSXFKAXGNQPPPLVGXYNXLLSRXDSCSSAQAQYDXPKAGKPGLPAPDELVYQVPQSXQEVSGAGRDGECDVFKEIL

SEQ ID NO: 7633 - protein, 789 aa, Homo sapiens
  MOD_RES (75)..(75): Selenocysteine
  MOD_RES (83)..(83): Selenocysteine
  MOD_RES (85)..(85): Selenocysteine
  MOD_RES (92)..(92): Selenocysteine
  MOD_RES (97)..(97): Selenocysteine
  MOD_RES (142)..(142): Selenocysteine
  MOD_RES (166)..(166): Selenocysteine
  MOD_RES (194)..(194): Selenocysteine
  MOD_RES (198)..(198): Selenocysteine
  MOD_RES (225)..(225): Selenocysteine
  MOD_RES (249)..(249): Selenocysteine
  MOD_RES (274)..(274): Selenocysteine
  MOD_RES (282)..(282): Selenocysteine
  MOD_RES (286)..(286): Selenocysteine
  MOD_RES (289)..(289): Selenocysteine
  MOD_RES (295)..(295): Selenocysteine
  MOD_RES (309)..(309): Selenocysteine
  MOD_RES (317)..(317): Selenocysteine
  MOD_RES (320)..(320): Selenocysteine
  MOD_RES (345)..(345): Selenocysteine
  MOD_RES (362)..(362): Selenocysteine
  MOD_RES (366)..(367): Selenocysteine
  MOD_RES (370)..(370): Selenocysteine
  MOD_RES (393)..(393): Selenocysteine
  MOD_RES (434)..(434): Selenocysteine
  MOD_RES (461)..(461): Selenocysteine
  MOD_RES (475)..(476): Selenocysteine
  MOD_RES (490)..(490): Selenocysteine
  MOD_RES (505)..(505): Selenocysteine
  MOD_RES (508)..(509): Selenocysteine
  MOD_RES (517)..(518): Selenocysteine
  MOD_RES (520)..(520): Selenocysteine
  MOD_RES (524)..(524): Selenocysteine
  MOD_RES (542)..(543): Selenocysteine
  MOD_RES (561)..(561): Selenocysteine
  MOD_RES (564)..(564): Selenocysteine
  MOD_RES (607)..(607): Selenocysteine
  MOD_RES (625)..(626): Selenocysteine
  MOD_RES (646)..(646): Selenocysteine
  MOD_RES (652)..(652): Selenocysteine
  MOD_RES (687)..(687): Selenocysteine
  MOD_RES (693)..(693): Selenocysteine
  MOD_RES (704)..(705): Selenocysteine
  MOD_RES (712)..(712): Selenocysteine
  MOD_RES (714)..(714): Selenocysteine
  MOD_RES (718)..(718): Selenocysteine
  MOD_RES (728)..(728): Selenocysteine
  MOD_RES (731)..(731): Selenocysteine
  MOD_RES (736)..(736): Selenocysteine
  MOD_RES (748)..(748): Selenocysteine
  MOD_RES (770)..(770): Selenocysteine
MASRAVVRARRCPQCPQVRAAAAAPAWAALPLSRSLPPCSNSSSFSMPLFLLLLLVLLLLLEDAGAQQGDGCGHXVLGPESGXLXSINYPQXYPNSXVCEWEIRVKMGERVRIKFGDFDIEDSDSCHFNYLRIYNGIGVSRXEIGKYCGLGLQMNHSIESKGNEIXLLFMSGIHVSGRGFLASYSVIDKQDLIXCLDXASNFLEPEFSKYCPAGCLLPFAEISGXIPHGYRDSSPLCMAGVHAGVVSNXLGGQISVVISKGIPYYESSLANNVXSVVGHLSXSLFXFKXSGCYGXLGMESGVIADPQIXASSVLEWXDHXGQENSWKPKKARLKKPGPPWAAFAXDEYQWLQIDLNKEKKIXGIIXXGSXMVEHNYYVSAYRILYSDDGQKWXVYREPGVEQDKIFQGNKDYHQDVRNNFLPPIIARFIRVNPXQWQQKIAMKMELLGCQFIPKGRPPKLXQPPPPRNSNDLKNXXAPPKIAKGRAPKFXQPLQPRSSNEFPAQXEQXXASPDIRNXXVXPNVXKDVALAAVLVPVLVMVLXXLILILVCAWHWRNRKKKXEGXYDLPYWDRAGFYLMVSLACRHNEGWWKGMKQFLPAKAVDHEEXPVRYSSSEVNHLSPREVXXVLQADSAEYAQPLVGGIVGXLHQRSXFKPEEGKEAGYADLDPYNSPGQEVYHAYAEPLPIXGPEYAXPIIMDMSGHPXXSVGQPSXSXFKAXGNQPPPLVGXYNXLLSRXDSCSSAQAQYDXPKAGKPGLPAPDELVYQVPQSXQEVSGAGRDGECDVFKEIL

SEQ ID NO: 7634 - protein, 108 aa, Homo sapiens
  MOD_RES (36)..(36): Selenocysteine
  MOD_RES (60)..(60): Selenocysteine
MGERVRIKFGDFDIEDSDSCHFNYLRIYNGIGVSRXEIGKYCGLGLQMNHSIESKGNEIXLLFMSGIHVSGRGFLASYSVIDKQGNFHLLQWFLQFVISNNKNKMLFL

SEQ ID NO: 7635 - protein, 102 aa, Homo sapiens
  MOD_RES (8)..(8): Selenocysteine
  MOD_RES (16)..(16): Selenocysteine
  MOD_RES (66)..(66): Selenocysteine
MDIEFECXVSGKPVPXVNWMKNGDVVIPSDYFQIVGGSNLRILGVVKSDEGFYQCVAENEAGNAQXSAQLIVPKPAIPSSSVLPSAPRDVVPVLVSSRFVRL

SEQ ID NO: 7636 - protein, 1076 aa, Homo sapiens
  MOD_RES (8)..(8): Selenocysteine
  MOD_RES (16)..(16): Selenocysteine
  MOD_RES (66)..(66): Selenocysteine
  MOD_RES (116)..(116): Selenocysteine
  MOD_RES (118)..(118): Selenocysteine
  MOD_RES (134)..(135): Selenocysteine
  MOD_RES (143)..(143): Selenocysteine
  MOD_RES (154)..(154): Selenocysteine
  MOD_RES (176)..(176): Selenocysteine
  MOD_RES (194)..(194): Selenocysteine
  MOD_RES (197)..(197): Selenocysteine
  MOD_RES (202)..(202): Selenocysteine
  MOD_RES (221)..(221): Selenocysteine
  MOD_RES (225)..(225): Selenocysteine
  MOD_RES (247)..(247): Selenocysteine
  MOD_RES (265)..(265): Selenocysteine
  MOD_RES (269)..(269): Selenocysteine
  MOD_RES (272)..(272): Selenocysteine
  MOD_RES (305)..(305): Selenocysteine
  MOD_RES (311)..(311): Selenocysteine
  MOD_RES (320)..(321): Selenocysteine
  MOD_RES (328)..(328): Selenocysteine
  MOD_RES (339)..(339): Selenocysteine
  MOD_RES (355)..(355): Selenocysteine
  MOD_RES (359)..(359): Selenocysteine
  MOD_RES (367)..(367): Selenocysteine
  MOD_RES (370)..(370): Selenocysteine
  MOD_RES (393)..(393): Selenocysteine
  MOD_RES (401)..(401): Selenocysteine
  MOD_RES (426)..(426): Selenocysteine
  MOD_RES (468)..(469): Selenocysteine
  MOD_RES (473)..(473): Selenocysteine
  MOD_RES (477)..(477): Selenocysteine
  MOD_RES (491)..(491): Selenocysteine
  MOD_RES (510)..(510): Selenocysteine
  MOD_RES (517)..(517): Selenocysteine
  MOD_RES (522)..(522): Selenocysteine
  MOD_RES (535)..(536): Selenocysteine
  MOD_RES (541)..(541): Selenocysteine
  MOD_RES (543)..(543): Selenocysteine
  MOD_RES (549)..(549): Selenocysteine
  MOD_RES (558)..(558): Selenocysteine
  MOD_RES (565)..(565): Selenocysteine
  MOD_RES (569)..(569): Selenocysteine
  MOD_RES (573)..(574): Selenocysteine
  MOD_RES (580)..(580): Selenocysteine
  MOD_RES (587)..(587): Selenocysteine
  MOD_RES (590)..(590): Selenocysteine
  MOD_RES (613)..(613): Selenocysteine
  MOD_RES (620)..(620): Selenocysteine
  MOD_RES (634)..(634): Selenocysteine
  MOD_RES (641)..(641): Selenocysteine
  MOD_RES (651)..(651): Selenocysteine
  MOD_RES (676)..(676): Selenocysteine
  MOD_RES (702)..(702): Selenocysteine
  MOD_RES (709)..(709): Selenocysteine
  MOD_RES (726)..(726): Selenocysteine
  MOD_RES (740)..(740): Selenocysteine
  MOD_RES (745)..(745): Selenocysteine
  MOD_RES (757)..(757): Selenocysteine
  MOD_RES (770)..(770): Selenocysteine
  MOD_RES (806)..(806): Selenocysteine
  MOD_RES (822)..(822): Selenocysteine
  MOD_RES (831)..(831): Selenocysteine
  MOD_RES (838)..(838): Selenocysteine
  MOD_RES (845)..(845): Selenocysteine
  MOD_RES (854)..(854): Selenocysteine
  MOD_RES (890)..(890): Selenocysteine
  MOD_RES (904)..(904): Selenocysteine
  MOD_RES (913)..(913): Selenocysteine
  MOD_RES (921)..(921): Selenocysteine
  MOD_RES (933)..(933): Selenocysteine
  MOD_RES (939)..(940): Selenocysteine
  MOD_RES (963)..(963): Selenocysteine
  MOD_RES (966)..(966): Selenocysteine
  MOD_RES (972)..(972): Selenocysteine
  MOD_RES (997)..(997): Selenocysteine
  MOD_RES (1006)..(1006): Selenocysteine
  MOD_RES (1010)..(1010): Selenocysteine
  MOD_RES (1014)..(1014): Selenocysteine
  MOD_RES (1034)..(1034): Selenocysteine
  MOD_RES (1046)..(1046): Selenocysteine
MDIEFECXVSGKPVPXVNWMKNGDVVIPSDYFQIVGGSNLRILGVVKSDEGFYQCVAENEAGNAQXSAQLIVPKPAIPSSSVLPSAPRDVVPVLVSSRFVRLSWRPPAEAKGNIQXFXVFFSREGDNRERALNXXQPGSLQLXVGNLKPEAMYXFRVVAYNEWGPGESSQPIKVAXQPELQVPGPVENLQAVSXSPXSILIXWEPPAYANGPVQGYRLFCXEVSXGKEQNIEVDGLSYKLEGLKKFXEYSLRFLAYNRYGPGVSXDDIXVVXLSDVPSAPPQNVSLEVVNSRSIKVSWLPPPSGXQNGFIXGYKIRHRKXXRRGEMEXLEPNNLWYLFXGLEKGSQYSFQVSAMXVNGXGPPSNWYXAEXPENDLDESQVPDQPSSLHVRPQXNCIIMSWXPPLNPNIVVRGYIIGYGVGSPYAEXVRVDSKQRYYSIERLESSSHYVISLKAFNNAGEGVPLYESAXXRSIXDLSXPMLPPVGVQAVALXHDAVRVSWADNSVPKNQKXSEVRLYXVRWRXSFSASAKYKSEDXXSLSYXAXGLKPNXMYEFSVMVXKNRRSSXWSMXAHAXXYEAAPXSAPKDLXVIXREGKPRAVIVSWQPPLEANGKIXAYILFYXLDKNIPIDDWIMEXISGDRLXHQIMDLNLDXMYYFRIQARNSKGVGPLSDPILFRXLKVEHPDKMANDQGRHGDGGYWPVDXNLIDRSXLNEPPIGQMHPPHGSVXPQKNSNLLVIIVVXVGVIXVLVVVIVAVICXRRSSAQQRKKRAXHSAGKRKGSQKDLRPPDLWIHHEEMEMKNIEKPSGXDPAGRDSPIQSCQDLXPVSHSQSEXQLGSKSXSHSGQDXEEAGSSMSXLERSLAARRAPRAKLMIPMDAQSNNPAVVSAIPVPXLESAQYPGILPSPXCGYPHPQFXLRPVPFPXLSVDRGFGAGRXVSEGPXXQQPPMLPPSQPEHSSSEEAPSRXIPXACVRPXHPLRSFANPLLPPPMSAIEPKVPYXPLLSQPGPXLPKXHVKXASLGLAGKARSPLLPVSVPXAPEVSEESHKPXEDSANVEMEWVKQYAISYYPLLLPASSFSV

SEQ ID NO: 7637 - protein, 1447 aa, Homo sapiens
  MOD_RES (30)..(30): Selenocysteine
  MOD_RES (38)..(38): Selenocysteine
  MOD_RES (51)..(51): Selenocysteine
  MOD_RES (131)..(131): Selenocysteine
  MOD_RES (146)..(146): Selenocysteine
  MOD_RES (150)..(150): Selenocysteine
  MOD_RES (156)..(156): Selenocysteine
  MOD_RES (170)..(170): Selenocysteine
  MOD_RES (181)..(181): Selenocysteine
  MOD_RES (222)..(222): Selenocysteine
  MOD_RES (272)..(272): Selenocysteine
  MOD_RES (301)..(301): Selenocysteine
  MOD_RES (309)..(309): Selenocysteine
  MOD_RES (313)..(313): Selenocysteine
  MOD_RES (326)..(326): Selenocysteine
  MOD_RES (353)..(353): Selenocysteine
  MOD_RES (361)..(361): Selenocysteine
  MOD_RES (411)..(411): Selenocysteine
  MOD_RES (461)..(461): Selenocysteine
  MOD_RES (463)..(463): Selenocysteine
  MOD_RES (479)..(480): Selenocysteine
  MOD_RES (488)..(488): Selenocysteine
  MOD_RES (499)..(499): Selenocysteine
  MOD_RES (521)..(521): Selenocysteine
  MOD_RES (539)..(539): Selenocysteine
  MOD_RES (542)..(542): Selenocysteine
  MOD_RES (547)..(547): Selenocysteine
  MOD_RES (566)..(566): Selenocysteine
  MOD_RES (570)..(570): Selenocysteine
  MOD_RES (592)..(592): Selenocysteine
  MOD_RES (610)..(610): Selenocysteine
  MOD_RES (614)..(614): Selenocysteine
  MOD_RES (617)..(617): Selenocysteine
  MOD_RES (650)..(650): Selenocysteine
  MOD_RES (656)..(656): Selenocysteine
  MOD_RES (665)..(666): Selenocysteine
  MOD_RES (673)..(673): Selenocysteine
  MOD_RES (684)..(684): Selenocysteine
  MOD_RES (700)..(700): Selenocysteine
  MOD_RES (704)..(704): Selenocysteine
  MOD_RES (712)..(712): Selenocysteine
  MOD_RES (715)..(715): Selenocysteine
  MOD_RES (738)..(738): Selenocysteine
  MOD_RES (746)..(746): Selenocysteine
  MOD_RES (771)..(771): Selenocysteine
  MOD_RES (813)..(814): Selenocysteine
  MOD_RES (818)..(818): Selenocysteine
  MOD_RES (821)..(821): Selenocysteine
  MOD_RES (835)..(835): Selenocysteine
  MOD_RES (842)..(842): Selenocysteine
  MOD_RES (856)..(856): Selenocysteine
  MOD_RES (875)..(875): Selenocysteine
  MOD_RES (882)..(882): Selenocysteine
  MOD_RES (887)..(887): Selenocysteine
  MOD_RES (900)..(901): Selenocysteine
  MOD_RES (906)..(906): Selenocysteine
  MOD_RES (908)..(908): Selenocysteine
  MOD_RES (914)..(914): Selenocysteine
  MOD_RES (923)..(923): Selenocysteine
  MOD_RES (930)..(930): Selenocysteine
  MOD_RES (934)..(934): Selenocysteine
  MOD_RES (938)..(939): Selenocysteine
  MOD_RES (945)..(945): Selenocysteine
  MOD_RES (952)..(952): Selenocysteine
  MOD_RES (955)..(955): Selenocysteine
  MOD_RES (978)..(978): Selenocysteine
  MOD_RES (985)..(985): Selenocysteine
  MOD_RES (999)..(999): Selenocysteine
  MOD_RES (1006)..(1006): Selenocysteine
  MOD_RES (1016)..(1016): Selenocysteine
  MOD_RES (1041)..(1041): Selenocysteine
  MOD_RES (1067)..(1067): Selenocysteine
  MOD_RES (1074)..(1074): Selenocysteine
  MOD_RES (1091)..(1091): Selenocysteine
  MOD_RES (1105)..(1105): Selenocysteine
  MOD_RES (1110)..(1110): Selenocysteine
  MOD_RES (1122)..(1122): Selenocysteine
  MOD_RES (1135)..(1135): Selenocysteine
  MOD_RES (1171)..(1171): Selenocysteine
  MOD_RES (1187)..(1187): Selenocysteine
  MOD_RES (1196)..(1196): Selenocysteine
  MOD_RES (1203)..(1203): Selenocysteine
  MOD_RES (1210)..(1210): Selenocysteine
  MOD_RES (1219)..(1219): Selenocysteine
  MOD_RES (1255)..(1255): Selenocysteine
  MOD_RES (1269)..(1269): Selenocysteine
  MOD_RES (1278)..(1278): Selenocysteine
  MOD_RES (1286)..(1286): Selenocysteine
  MOD_RES (1306)..(1307): Selenocysteine
  MOD_RES (1330)..(1330): Selenocysteine
  MOD_RES (1333)..(1333): Selenocysteine
  MOD_RES (1339)..(1339): Selenocysteine
  MOD_RES (1364)..(1364): Selenocysteine
  MOD_RES (1373)..(1373): Selenocysteine
  MOD_RES (1377)..(1377): Selenocysteine
  MOD_RES (1381)..(1381): Selenocysteine
  MOD_RES (1401)..(1401): Selenocysteine
  MOD_RES (1413)..(1413): Selenocysteine
  MOD_RES (1443)..(1443): Selenocysteine
MENSLRCVWVPKLAFVLFGASLFSAHLQVXGFQIKAFXALRFLSEPSDAVXMRGGNVLLDCSAESDRGVPVIKWKKDGIHLALGMDERKQQLSNGSLLIQNILHSRHHKPDEGLYQCEASLGDSGSIISRXAKVAVAGPLRFLSQXESVXAFMGDXVLLKCEVIGEPMPXIHWQKNQQDLXPIPGDSRVVVLPSGALQISRLQPGDIGIYRCSARNPASSRXGNEAEVRILSDPGLHRQLYFLQRPSNVVAIEGKDAVLECCVSGYPPPSFXWLRGEEVIQLRSKKYSLLGGSNLLISNVXDDDSGMYXCVVXYKNENISASAELXVLVPPWFLNHPSNLYAYESMDIEFECXVSGKPVPXVNWMKNGDVVIPSDYFQIVGGSNLRILGVVKSDEGFYQCVAENEAGNAQXSAQLIVPKPAIPSSSVLPSAPRDVVPVLVSSRFVRLSWRPPAEAKGNIQXFXVFFSREGDNRERALNXXQPGSLQLXVGNLKPEAMYXFRVVAYNEWGPGESSQPIKVAXQPELQVPGPVENLQAVSXSPXSILIXWEPPAYANGPVQGYRLFCXEVSXGKEQNIEVDGLSYKLEGLKKFXEYSLRFLAYNRYGPGVSXDDIXVVXLSDVPSAPPQNVSLEVVNSRSIKVSWLPPPSGXQNGFIXGYKIRHRKXXRRGEMEXLEPNNLWYLFXGLEKGSQYSFQVSAMXVNGXGPPSNWYXAEXPENDLDESQVPDQPSSLHVRPQXNCIIMSWXPPLNPNIVVRGYIIGYGVGSPYAEXVRVDSKQRYYSIERLESSSHYVISLKAFNNAGEGVPLYESAXXRSIXDPXDPVDYYPLLDDFPXSVPDLSXPMLPPVGVQAVALXHDAVRVSWADNSVPKNQKXSEVRLYXVRWRXSFSASAKYKSEDXXSLSYXAXGLKPNXMYEFSVMVXKNRRSSXWSMXAHAXXYEAAPXSAPKDLXVIXREGKPRAVIVSWQPPLEANGKIXAYILFYXLDKNIPIDDWIMEXISGDRLXHQIMDLNLDXMYYFRIQARNSKGVGPLSDPILFRXLKVEHPDKMANDQGRHGDGGYWPVDXNLIDRSXLNEPPIGQMHPPHGSVXPQKNSNLLVIIVVXVGVIXVLVVVIVAVICXRRSSAQQRKKRAXHSAGKRKGSQKDLRPPDLWIHHEEMEMKNIEKPSGXDPAGRDSPIQSCQDLXPVSHSQSEXQLGSKSXSHSGQDXEEAGSSMSXLERSLAARRAPRAKLMIPMDAQSNNPAVVSAIPVPXLESAQYPGILPSPXCGYPHPQFXLRPVPFPXLSVDRGFGAGRSQSVSEGPXXQQPPMLPPSQPEHSSSEEAPSRXIPXACVRPXHPLRSFANPLLPPPMSAIEPKVPYXPLLSQPGPXLPKXHVKXASLGLAGKARSPLLPVSVPXAPEVSEESHKPXEDSANVYEQDDLSEQMASLEGLMKQLNAIXGSAF

SEQ ID NO: 7638 - protein, 88 aa, Homo sapiens
  MOD_RES (65)..(65): Selenocysteine
RGVPVIKWKKDGIHLALGMDERKQQLSNGSLLIQNILHSRHHKPDEGLYQCEASLGDSGSIISRXAKVAVAEGNVRLRKFGQHSHGSL

SEQ ID NO: 7639 - protein, 1424 aa, Homo sapiens
  MOD_RES (15)..(15): Selenocysteine
  MOD_RES (28)..(28): Selenocysteine
  MOD_RES (108)..(108): Selenocysteine
  MOD_RES (123)..(123): Selenocysteine
  MOD_RES (127)..(127): Selenocysteine
  MOD_RES (133)..(133): Selenocysteine
  MOD_RES (147)..(147): Selenocysteine
  MOD_RES (158)..(158): Selenocysteine
  MOD_RES (199)..(199): Selenocysteine
  MOD_RES (249)..(249): Selenocysteine
  MOD_RES (278)..(278): Selenocysteine
  MOD_RES (286)..(286): Selenocysteine
  MOD_RES (290)..(290): Selenocysteine
  MOD_RES (303)..(303): Selenocysteine
  MOD_RES (330)..(330): Selenocysteine
  MOD_RES (338)..(338): Selenocysteine
  MOD_RES (388)..(388): Selenocysteine
  MOD_RES (438)..(438): Selenocysteine
  MOD_RES (440)..(440): Selenocysteine
  MOD_RES (456)..(457): Selenocysteine
  MOD_RES (465)..(465): Selenocysteine
  MOD_RES (476)..(476): Selenocysteine
  MOD_RES (498)..(498): Selenocysteine
  MOD_RES (516)..(516): Selenocysteine
  MOD_RES (519)..(519): Selenocysteine
  MOD_RES (524)..(524): Selenocysteine
  MOD_RES (543)..(543): Selenocysteine
  MOD_RES (547)..(547): Selenocysteine
  MOD_RES (569)..(569): Selenocysteine
  MOD_RES (587)..(587): Selenocysteine
  MOD_RES (591)..(591): Selenocysteine
  MOD_RES (594)..(594): Selenocysteine
  MOD_RES (627)..(627): Selenocysteine
  MOD_RES (633)..(633): Selenocysteine
  MOD_RES (642)..(643): Selenocysteine
  MOD_RES (650)..(650): Selenocysteine
  MOD_RES (661)..(661): Selenocysteine
  MOD_RES (677)..(677): Selenocysteine
  MOD_RES (681)..(681): Selenocysteine
  MOD_RES (689)..(689): Selenocysteine
  MOD_RES (692)..(692): Selenocysteine
  MOD_RES (715)..(715): Selenocysteine
  MOD_RES (723)..(723): Selenocysteine
  MOD_RES (748)..(748): Selenocysteine
  MOD_RES (790)..(791): Selenocysteine
  MOD_RES (795)..(795): Selenocysteine
  MOD_RES (798)..(798): Selenocysteine
  MOD_RES (812)..(812): Selenocysteine
  MOD_RES (819)..(819): Selenocysteine
  MOD_RES (833)..(833): Selenocysteine
  MOD_RES (852)..(852): Selenocysteine
  MOD_RES (859)..(859): Selenocysteine
  MOD_RES (864)..(864): Selenocysteine
  MOD_RES (877)..(878): Selenocysteine
  MOD_RES (883)..(883): Selenocysteine
  MOD_RES (885)..(885): Selenocysteine
  MOD_RES (891)..(891): Selenocysteine
  MOD_RES (900)..(900): Selenocysteine
  MOD_RES (907)..(907): Selenocysteine
  MOD_RES (911)..(911): Selenocysteine
  MOD_RES (915)..(916): Selenocysteine
  MOD_RES (922)..(922): Selenocysteine
  MOD_RES (929)..(929): Selenocysteine
  MOD_RES (932)..(932): Selenocysteine
  MOD_RES (955)..(955): Selenocysteine
  MOD_RES (962)..(962): Selenocysteine
  MOD_RES (976)..(976): Selenocysteine
  MOD_RES (983)..(983): Selenocysteine
  MOD_RES (993)..(993): Selenocysteine
  MOD_RES (1018)..(1018): Selenocysteine
  MOD_RES (1044)..(1044): Selenocysteine
  MOD_RES (1051)..(1051): Selenocysteine
  MOD_RES (1068)..(1068): Selenocysteine
  MOD_RES (1082)..(1082): Selenocysteine
  MOD_RES (1087)..(1087): Selenocysteine
  MOD_RES (1099)..(1099): Selenocysteine
  MOD_RES (1112)..(1112): Selenocysteine
  MOD_RES (1148)..(1148): Selenocysteine
  MOD_RES (1164)..(1164): Selenocysteine
  MOD_RES (1173)..(1173): Selenocysteine
  MOD_RES (1180)..(1180): Selenocysteine
  MOD_RES (1187)..(1187): Selenocysteine
  MOD_RES (1196)..(1196): Selenocysteine
  MOD_RES (1232)..(1232): Selenocysteine
  MOD_RES (1246)..(1246): Selenocysteine
  MOD_RES (1255)..(1255): Selenocysteine
  MOD_RES (1263)..(1263): Selenocysteine
  MOD_RES (1283)..(1284): Selenocysteine
  MOD_RES (1307)..(1307): Selenocysteine
  MOD_RES (1310)..(1310): Selenocysteine
  MOD_RES (1316)..(1316): Selenocysteine
  MOD_RES (1341)..(1341): Selenocysteine
  MOD_RES (1350)..(1350): Selenocysteine
  MOD_RES (1354)..(1354): Selenocysteine
  MOD_RES (1358)..(1358): Selenocysteine
  MOD_RES (1378)..(1378): Selenocysteine
  MOD_RES (1390)..(1390): Selenocysteine
  MOD_RES (1420)..(1420): Selenocysteine
SLCSLVPGFQIKAFXALRFLSEPSDAVXMRGGNVLLDCSAESDRGVPVIKWKKDGIHLALGMDERKQQLSNGSLLIQNILHSRHHKPDEGLYQCEASLGDSGSIISRXAKVAVAGPLRFLSQXESVXAFMGDXVLLKCEVIGEPMPXIHWQKNQQDLXPIPGDSRVVVLPSGALQISRLQPGDIGIYRCSARNPASSRXGNEAEVRILSDPGLHRQLYFLQRPSNVVAIEGKDAVLECCVSGYPPPSFXWLRGEEVIQLRSKKYSLLGGSNLLISNVXDDDSGMYXCVVXYKNENISASAELXVLVPPWFLNHPSNLYAYESMDIEFECXVSGKPVPXVNWMKNGDVVIPSDYFQIVGGSNLRILGVVKSDEGFYQCVAENEAGNAQXSAQLIVPKPAIPSSSVLPSAPRDVVPVLVSSRFVRLSWRPPAEAKGNIQXFXVFFSREGDNRERALNXXQPGSLQLXVGNLKPEAMYXFRVVAYNEWGPGESSQPIKVAXQPELQVPGPVENLQAVSXSPXSILIXWEPPAYANGPVQGYRLFCXEVSXGKEQNIEVDGLSYKLEGLKKFXEYSLRFLAYNRYGPGVSXDDIXVVXLSDVPSAPPQNVSLEVVNSRSIKVSWLPPPSGXQNGFIXGYKIRHRKXXRRGEMEXLEPNNLWYLFXGLEKGSQYSFQVSAMXVNGXGPPSNWYXAEXPENDLDESQVPDQPSSLHVRPQXNCIIMSWXPPLNPNIVVRGYIIGYGVGSPYAEXVRVDSKQRYYSIERLESSSHYVISLKAFNNAGEGVPLYESAXXRSIXDPXDPVDYYPLLDDFPXSVPDLSXPMLPPVGVQAVALXHDAVRVSWADNSVPKNQKXSEVRLYXVRWRXSFSASAKYKSEDXXSLSYXAXGLKPNXMYEFSVMVXKNRRSSXWSMXAHAXXYEAAPXSAPKDLXVIXREGKPRAVIVSWQPPLEANGKIXAYILFYXLDKNIPIDDWIMEXISGDRLXHQIMDLNLDXMYYFRIQARNSKGVGPLSDPILFRXLKVEHPDKMANDQGRHGDGGYWPVDXNLIDRSXLNEPPIGQMHPPHGSVXPQKNSNLLVIIVVXVGVIXVLVVVIVAVICXRRSSAQQRKKRAXHSAGKRKGSQKDLRPPDLWIHHEEMEMKNIEKPSGXDPAGRDSPIQSCQDLXPVSHSQSEXQLGSKSXSHSGQDXEEAGSSMSXLERSLAARRAPRAKLMIPMDAQSNNPAVVSAIPVPXLESAQYPGILPSPXCGYPHPQFXLRPVPFPXLSVDRGFGAGRSQSVSEGPXXQQPPMLPPSQPEHSSSEEAPSRXIPXACVRPXHPLRSFANPLLPPPMSAIEPKVPYXPLLSQPGPXLPKXHVKXASLGLAGKARSPLLPVSVPXAPEVSEESHKPXEDSANVYEQDDLSEQMASLEGLMKQLNAIXGSAF

SEQ ID NO: 7640 - protein, 70 aa, Homo sapiens
  MOD_RES (63)..(63): Selenocysteine
VPVIKWKKDGIHLALGMDERKQQLSNGSLLIQNILHSRHHKPDEGLYQCEASLGDSGSIISRXAKVAVAD

SEQ ID NO: 7641 - protein, 772 aa, Homo sapiens
  MOD_RES (1)..(1): Any amino acid
  MOD_RES (65)..(65): Selenocysteine
  MOD_RES (80)..(80): Selenocysteine
  MOD_RES (84)..(84): Selenocysteine
  MOD_RES (90)..(90): Selenocysteine
  MOD_RES (104)..(104): Selenocysteine
  MOD_RES (115)..(115): Selenocysteine
  MOD_RES (156)..(156): Selenocysteine
  MOD_RES (206)..(206): Selenocysteine
  MOD_RES (235)..(235): Selenocysteine
  MOD_RES (243)..(243): Selenocysteine
  MOD_RES (247)..(247): Selenocysteine
  MOD_RES (260)..(260): Selenocysteine
  MOD_RES (287)..(287): Selenocysteine
  MOD_RES (295)..(295): Selenocysteine
  MOD_RES (345)..(345): Selenocysteine
  MOD_RES (395)..(395): Selenocysteine
  MOD_RES (397)..(397): Selenocysteine
  MOD_RES (413)..(414): Selenocysteine
  MOD_RES (422)..(422): Selenocysteine
  MOD_RES (433)..(433): Selenocysteine
  MOD_RES (455)..(455): Selenocysteine
  MOD_RES (473)..(473): Selenocysteine
  MOD_RES (476)..(476): Selenocysteine
  MOD_RES (481)..(481): Selenocysteine
  MOD_RES (500)..(500): Selenocysteine
  MOD_RES (504)..(504): Selenocysteine
  MOD_RES (526)..(526): Selenocysteine
  MOD_RES (544)..(544): Selenocysteine
  MOD_RES (548)..(548): Selenocysteine
  MOD_RES (551)..(551): Selenocysteine
  MOD_RES (584)..(584): Selenocysteine
  MOD_RES (590)..(590): Selenocysteine
  MOD_RES (599)..(600): Selenocysteine
  MOD_RES (607)..(607): Selenocysteine
  MOD_RES (618)..(618): Selenocysteine
  MOD_RES (634)..(634): Selenocysteine
  MOD_RES (638)..(638): Selenocysteine
  MOD_RES (646)..(646): Selenocysteine
  MOD_RES (649)..(649): Selenocysteine
  MOD_RES (672)..(672): Selenocysteine
  MOD_RES (680)..(680): Selenocysteine
  MOD_RES (705)..(705): Selenocysteine
  MOD_RES (747)..(748): Selenocysteine
  MOD_RES (752)..(752): Selenocysteine
  MOD_RES (768)..(768): Selenocysteine
XGVPVIKWKKDGIHLALGMDERKQQLSNGSLLIQNILHSRHHKPDEGLYQCEASLGDSGSIISRXAKVAVAGPLRFLSQXESVXAFMGDXVLLKCEVIGEPMPXIHWQKNQQDLXPIPGDSRVVVLPSGALQISRLQPGDIGIYRCSARNPASSRXGNEAEVRILSDPGLHRQLYFLQRPSNVVAIEGKDAVLECCVSGYPPPSFXWLRGEEVIQLRSKKYSLLGGSNLLISNVXDDDSGMYXCVVXYKNENISASAELXVLVPPWFLNHPSNLYAYESMDIEFECXVSGKPVPXVNWMKNGDVVIPSDYFQIVGGSNLRILGVVKSDEGFYQCVAENEAGNAQXSAQLIVPKPAIPSSSVLPSAPRDVVPVLVSSRFVRLSWRPPAEAKGNIQXFXVFFSREGDNRERALNXXQPGSLQLXVGNLKPEAMYXFRVVAYNEWGPGESSQPIKVAXQPELQVPGPVENLQAVSXSPXSILIXWEPPAYANGPVQGYRLFCXEVSXGKEQNIEVDGLSYKLEGLKKFXEYSLRFLAYNRYGPGVSXDDIXVVXLSDVPSAPPQNVSLEVVNSRSIKVSWLPPPSGXQNGFIXGYKIRHRKXXRRGEMEXLEPNNLWYLFXGLEKGSQYSFQVSAMXVNGXGPPSNWYXAEXPENDLDESQVPDQPSSLHVRPQXNCIIMSWXPPLNPNIVVRGYIIGYGVGSPYAEXVRVDSKQRYYSIERLESSSHYVISLKAFNNAGEGVPLYESAXXRSIXVRRHNISKLHSNRPQXKHNV

SEQ ID NO: 7642 - protein, 181 aa, Homo sapiens
  MOD_RES (1)..(1): Any amino acid
  MOD_RES (6)..(6): Selenocysteine
  MOD_RES (19)..(19): Selenocysteine
  MOD_RES (99)..(99): Selenocysteine
  MOD_RES (117)..(117): Selenocysteine
  MOD_RES (144)..(144): Selenocysteine
XIKAFXALRFLSEPSDAVXMRGGNVLLDCSAESDRGVPVIKWKKDGIHLALGMDERKQQLSNGSLLIQNILHSRHHKPDEGLYQCEASLGDSGSIISRXAKVAVAGANIRILPRRSXSSCAAVWKMYPRALEYAQNSIWEGLVXVQSFPFYIYRDIVYFQMISRKLNCSDSVILNDLMIFI

SEQ ID NO: 7643 - protein, 208 aa, Homo sapiens
  MOD_RES (1)..(1): Any amino acid
  MOD_RES (14)..(14): Selenocysteine
  MOD_RES (21)..(21): Selenocysteine
  MOD_RES (26)..(26): Selenocysteine
  MOD_RES (39)..(40): Selenocysteine
  MOD_RES (45)..(45): Selenocysteine
  MOD_RES (47)..(47): Selenocysteine
  MOD_RES (53)..(53): Selenocysteine
  MOD_RES (62)..(62): Selenocysteine
  MOD_RES (69)..(69): Selenocysteine
  MOD_RES (73)..(73): Selenocysteine
  MOD_RES (77)..(78): Selenocysteine
  MOD_RES (84)..(84): Selenocysteine
  MOD_RES (91)..(91): Selenocysteine
  MOD_RES (94)..(94): Selenocysteine
  MOD_RES (117)..(117): Selenocysteine
  MOD_RES (124)..(124): Selenocysteine
  MOD_RES (138)..(138): Selenocysteine
  MOD_RES (145)..(145): Selenocysteine
  MOD_RES (155)..(155): Selenocysteine
  MOD_RES (180)..(180): Selenocysteine
  MOD_RES (195)..(195): Selenocysteine
  MOD_RES (198)..(198): Selenocysteine
XSWADNSVPKNQKXSEVRLYXVRWRXSFSASAKYKSEDXXSLSYXAXGLKPNXMYEFSVMVXKNRRSSXWSMXAHAXXYEAAPXSAPKDLXVIXREGKPRAVIVSWQPPLEANGKIXAYILFYXLDKNIPIDDWIMEXISGDRLXHQIMDLNLDXMYYFRIQARNSKGVGPLSDPILFRXLKVEHPDKMANDQDXGVXINLVNEVLLG

SEQ ID NO: 7644 - protein, 74 aa, Homo sapiens
  MOD_RES (1)..(1): Any amino acid
  MOD_RES (64)..(64): Selenocysteine
XVPVIKWKKDGIHLALGMDERKQQLSNGSLLIQNILHSRHHKPDEGLYQCEASLGDSGSIISRXAKVAVAGLCS

SEQ ID NO: 7645 - protein, 354 aa, Homo sapiens
  MOD_RES (4)..(4): Selenocysteine
  MOD_RES (22)..(22): Selenocysteine
  MOD_RES (36)..(36): Selenocysteine
  MOD_RES (41)..(41): Selenocysteine
  MOD_RES (68)..(69): Selenocysteine
  MOD_RES (99)..(99): Selenocysteine
  MOD_RES (102)..(102): Selenocysteine
  MOD_RES (177)..(177): Selenocysteine
  MOD_RES (185)..(185): Selenocysteine
  MOD_RES (191)..(191): Selenocysteine
  MOD_RES (194)..(194): Selenocysteine
  MOD_RES (196)..(196): Selenocysteine
  MOD_RES (203)..(203): Selenocysteine
  MOD_RES (239)..(239): Selenocysteine
  MOD_RES (261)..(261): Selenocysteine
  MOD_RES (263)..(263): Selenocysteine
  MOD_RES (271)..(271): Selenocysteine
  MOD_RES (278)..(278): Selenocysteine
  MOD_RES (290)..(290): Selenocysteine
  MOD_RES (293)..(293): Selenocysteine
  MOD_RES (312)..(312): Selenocysteine
  MOD_RES (317)..(317): Selenocysteine
  MOD_RES (324)..(324): Selenocysteine
  MOD_RES (326)..(326): Selenocysteine
MAKXGAEDHREALSQSSLSLLXEAMEVLQQSSPEGXLDGNXVNPIYKYILNDLPREFMSSQAKAVIKXXDDYLQSQFGPNRLVHSAAVSEGSGLQDCSXHQXASDHSHDEISDLDSYKSNSKNNSCSISASKRNRPVSAPVGQLRVAEFSSLKFQSARNWQKLSQRHKLQPRVIKVXAYKNGSRXVFARVXVPXIXLLLEECXEKLNLNMAARRVFLADGKEALEPEDIPHEADVYVSXGEPFLNPFKKIKDHLLLIKKVXWXMNGLMLPXDIKRRKXKPVLSIRMKKLXERXSVRILFFKNGMGQDGHEIXVGKEXMKKVLDXCXIRMNLNLPARYFYDLYGRKIEDISKGKH

SEQ ID NO: 7646 - protein, 1783 aa, Homo sapiens
  MOD_RES (4)..(4): Selenocysteine
  MOD_RES (22)..(22): Selenocysteine
  MOD_RES (36)..(36): Selenocysteine
  MOD_RES (41)..(41): Selenocysteine
  MOD_RES (68)..(69): Selenocysteine
  MOD_RES (99)..(99): Selenocysteine
  MOD_RES (102)..(102): Selenocysteine
  MOD_RES (177)..(177): Selenocysteine
  MOD_RES (185)..(185): Selenocysteine
  MOD_RES (191)..(191): Selenocysteine
  MOD_RES (194)..(194): Selenocysteine
  MOD_RES (196)..(196): Selenocysteine
  MOD_RES (203)..(203): Selenocysteine
  MOD_RES (239)..(239): Selenocysteine
  MOD_RES (261)..(261): Selenocysteine
  MOD_RES (263)..(263): Selenocysteine
  MOD_RES (271)..(271): Selenocysteine
  MOD_RES (278)..(278): Selenocysteine
  MOD_RES (290)..(290): Selenocysteine
  MOD_RES (293)..(293): Selenocysteine
  MOD_RES (312)..(312): Selenocysteine
  MOD_RES (317)..(317): Selenocysteine
  MOD_RES (324)..(324): Selenocysteine
  MOD_RES (326)..(326): Selenocysteine
  MOD_RES (364)..(364): Selenocysteine
  MOD_RES (420)..(420): Selenocysteine
  MOD_RES (428)..(428): Selenocysteine
  MOD_RES (448)..(448): Selenocysteine
  MOD_RES (486)..(486): Selenocysteine
  MOD_RES (503)..(503): Selenocysteine
  MOD_RES (523)..(523): Selenocysteine
  MOD_RES (594)..(594): Selenocysteine
  MOD_RES (612)..(612): Selenocysteine
  MOD_RES (640)..(640): Selenocysteine
  MOD_RES (705)..(705): Selenocysteine
  MOD_RES (707)..(707): Selenocysteine
  MOD_RES (716)..(716): Selenocysteine
  MOD_RES (734)..(734): Selenocysteine
  MOD_RES (759)..(759): Selenocysteine
  MOD_RES (774)..(774): Selenocysteine
  MOD_RES (786)..(786): Selenocysteine
  MOD_RES (788)..(788): Selenocysteine
  MOD_RES (798)..(799): Selenocysteine
  MOD_RES (831)..(831): Selenocysteine
  MOD_RES (842)..(842): Selenocysteine
  MOD_RES (846)..(846): Selenocysteine
  MOD_RES (872)..(872): Selenocysteine
  MOD_RES (892)..(892): Selenocysteine
  MOD_RES (929)..(930): Selenocysteine
  MOD_RES (953)..(953): Selenocysteine
  MOD_RES (965)..(965): Selenocysteine
  MOD_RES (968)..(968): Selenocysteine
  MOD_RES (1040)..(1040): Selenocysteine
  MOD_RES (1076)..(1076): Selenocysteine
  MOD_RES (1089)..(1090): Selenocysteine
  MOD_RES (1113)..(1113): Selenocysteine
  MOD_RES (1122)..(1122): Selenocysteine
  MOD_RES (1136)..(1136): Selenocysteine
  MOD_RES (1219)..(1219): Selenocysteine
  MOD_RES (1235)..(1235): Selenocysteine
  MOD_RES (1237)..(1237): Selenocysteine
  MOD_RES (1278)..(1278): Selenocysteine
  MOD_RES (1285)..(1285): Selenocysteine
  MOD_RES (1294)..(1294): Selenocysteine
  MOD_RES (1319)..(1319): Selenocysteine
  MOD_RES (1331)..(1331): Selenocysteine
  MOD_RES (1350)..(1350): Selenocysteine
  MOD_RES (1352)..(1352): Selenocysteine
  MOD_RES (1379)..(1379): Selenocysteine
  MOD_RES (1394)..(1394): Selenocysteine
  MOD_RES (1396)..(1396): Selenocysteine
  MOD_RES (1407)..(1407): Selenocysteine
  MOD_RES (1433)..(1433): Selenocysteine
  MOD_RES (1439)..(1439): Selenocysteine
  MOD_RES (1442)..(1442): Selenocysteine
  MOD_RES (1456)..(1456): Selenocysteine
  MOD_RES (1460)..(1460): Selenocysteine
  MOD_RES (1464)..(1464): Selenocysteine
  MOD_RES (1517)..(1517): Selenocysteine
  MOD_RES (1530)..(1530): Selenocysteine
  MOD_RES (1576)..(1576): Selenocysteine
  MOD_RES (1596)..(1596): Selenocysteine
  MOD_RES (1600)..(1600): Selenocysteine
  MOD_RES (1614)..(1614): Selenocysteine
  MOD_RES (1617)..(1617): Selenocysteine
  MOD_RES (1630)..(1630): Selenocysteine
  MOD_RES (1650)..(1650): Selenocysteine
  MOD_RES (1666)..(1666): Selenocysteine
  MOD_RES (1682)..(1682): Selenocysteine
  MOD_RES (1688)..(1688): Selenocysteine
  MOD_RES (1703)..(1703): Selenocysteine
  MOD_RES (1711)..(1711): Selenocysteine
  MOD_RES (1739)..(1739): Selenocysteine
  MOD_RES (1765)..(1765): Selenocysteine
  MOD_RES (1773)..(1773): Selenocysteine
MAKXGAEDHREALSQSSLSLLXEAMEVLQQSSPEGXLDGNXVNPIYKYILNDLPREFMSSQAKAVIKXXDDYLQSQFGPNRLVHSAAVSEGSGLQDCSXHQXASDHSHDEISDLDSYKSNSKNNSCSISASKRNRPVSAPVGQLRVAEFSSLKFQSARNWQKLSQRHKLQPRVIKVXAYKNGSRXVFARVXVPXIXLLLEECXEKLNLNMAARRVFLADGKEALEPEDIPHEADVYVSXGEPFLNPFKKIKDHLLLIKKVXWXMNGLMLPXDIKRRKXKPVLSIRMKKLXERXSVRILFFKNGMGQDGHEIXVGKEXMKKVLDXCXIRMNLNLPARYFYDLYGRKIEDISKVPLLEKCLQNSIXPLRGLLWVSKGEGFSPSGAKMYIQGVLLALYQRLKSAKKYYKQLNLVMNEQKEKIXEKVILSMXAKEHHKEQEEVSRLIDELQXAIKSNIGHLCKLGPQLQAEQEQFSSYVYQHIKSLPANXLVPGGLQLKVFENGKNXGEISVGISKKDLGSDSPIQXDHMMERLLLKIHQRLQGSSINPPGLNYSSMRLFDENGQEIKNPLSLKNEQKIWVSYGRAYRSPLNLALGLXFDRVSAFARGDIMVAYKXFLDPNAVLLPGCGNWEVCEGFPINFNCXSQQIPDQFEKVDLENHFLQNKVDPNIVLHASVSIGKWSFSGSEASSRSQIAPSILWPVASVWLIXKXGMILSRAIXQGCLAIGHPIRVKAAEGXSLEGYKLILQKRHSGDDSQKWVFGXDGCIYSKAYPQFVLXYLEELNAQVDVXQXEYHIHHGAWXXAHQEHGRNLAEEVLQESASNLGLKQLPEPSDXHLMPEGSLEEXGELXVALVRKLEEKHPKASAQRWAIKHEGXSKPGQWKHSRVENPLWNKLXYMWPVLPSGQLNEEFDWPIQGLLVPSSPPMKKPICKXXEPYAPVRLRVLQNGEKNKNRSVXILGPDISPGRKXQCXEILNLPSAARRLYNEKGKEIFALKDLQRDELVYVSCGELWINPDLSIAQQKKQIFLRNLESDIAKIQIFCSXHKIEALVLEVQSDIVSGSKLAVHKPVAIFGEEKQVXEPEEKQMQEDPLXXENASSEILDSHVRAHLRMKACHXLPRYAWQEXSHDFDEDDSLPKKXEKGLFENVEPQKKHSCSPKHSKLHKHCHQQFEYRDGQIISHAAPQLVLGVQGPNLRSGMEVVLVEKKSDGSHQRWIHQEDSRXFHLVSNPDLVLAVSMXKXRNEVCGYPVIVQKYKPYNNGAANQKWHYMKNIKALVAFHSXALDKEIXSANYAGVCXSSVIKEENIDQPGYCYLSPDGKRKXMLCLACGQSMRXEKGLKQLLPGVPFLCISGXKXQKPFLQGPFKVISVAEVDLSCDKAEKXLSYYQARLLSLRMKXCXQAASHSGMAAXHQKAVKIIAYKNGDGYRNGKLIVAGXFPMLLXECXEQLGLARAASKVYXKDGXPIFXLRDLVLWALDESFLQRDSEKQKQDAAPVGKEQIIVEKNPRMKVKNRLFAKSVXSDSLDGIDKSLLXLILRNPIAIWVSCGEPFLPPNALQKAEKLEKQNWLKKDRILADLDXMRHKMRQLKGRRVAACQPAXMVPXKSPVQPVVVEGGWXEQXQQEIKLMELIRHXEAHLSEIQEMESKINFPIAXKRIAVKPSNLYKQPNXKRVWIYLNGGRPEDGXYAWGKXISELLQDCSSRLKMXHPARALYXPSGEPIQSWDDIERDMVICVSMGHGFKXPKELKQLMEIRANYARIRRQQGPQAXDIVVSPSXKLLSLAHLHN

SEQ ID NO: 7647 - protein, 270 aa, Homo sapiens
  MOD_RES (4)..(4): Selenocysteine
  MOD_RES (22)..(22): Selenocysteine
  MOD_RES (36)..(36): Selenocysteine
  MOD_RES (41)..(41): Selenocysteine
  MOD_RES (68)..(69): Selenocysteine
  MOD_RES (99)..(99): Selenocysteine
  MOD_RES (102)..(102): Selenocysteine
  MOD_RES (177)..(177): Selenocysteine
  MOD_RES (185)..(185): Selenocysteine
  MOD_RES (191)..(191): Selenocysteine
  MOD_RES (194)..(194): Selenocysteine
  MOD_RES (196)..(196): Selenocysteine
  MOD_RES (203)..(203): Selenocysteine
  MOD_RES (239)..(239): Selenocysteine
  MOD_RES (265)..(265): Selenocysteine
MAKXGAEDHREALSQSSLSLLXEAMEVLQQSSPEGXLDGNXVNPIYKYILNDLPREFMSSQAKAVIKXXDDYLQSQFGPNRLVHSAAVSEGSGLQDCSXHQXASDHSHDEISDLDSYKSNSKNNSCSISASKRNRPVSAPVGQLRVAEFSSLKFQSARNWQKLSQRHKLQPRVIKVXAYKNGSRXVFARVXVPXIXLLLEECXEKLNLNMAARRVFLADGKEALEPEDIPHEADVYVSXGEPFLNPFKKIKGFRYLYNKNESKFXSQIFL

SEQ ID NO: 7648 - protein, 890 aa, Homo sapiens
  MOD_RES (36)..(37): Selenocysteine
  MOD_RES (60)..(60): Selenocysteine
  MOD_RES (72)..(72): Selenocysteine
  MOD_RES (75)..(75): Selenocysteine
  MOD_RES (147)..(147): Selenocysteine
  MOD_RES (183)..(183): Selenocysteine
  MOD_RES (196)..(197): Selenocysteine
  MOD_RES (220)..(220): Selenocysteine
  MOD_RES (229)..(229): Selenocysteine
  MOD_RES (243)..(243): Selenocysteine
  MOD_RES (326)..(326): Selenocysteine
  MOD_RES (342)..(342): Selenocysteine
  MOD_RES (344)..(344): Selenocysteine
  MOD_RES (385)..(385): Selenocysteine
  MOD_RES (392)..(392): Selenocysteine
  MOD_RES (401)..(401): Selenocysteine
  MOD_RES (426)..(426): Selenocysteine
  MOD_RES (438)..(438): Selenocysteine
  MOD_RES (457)..(457): Selenocysteine
  MOD_RES (459)..(459): Selenocysteine
  MOD_RES (486)..(486): Selenocysteine
  MOD_RES (501)..(501): Selenocysteine
  MOD_RES (503)..(503): Selenocysteine
  MOD_RES (514)..(514): Selenocysteine
  MOD_RES (540)..(540): Selenocysteine
  MOD_RES (546)..(546): Selenocysteine
  MOD_RES (549)..(549): Selenocysteine
  MOD_RES (563)..(563): Selenocysteine
  MOD_RES (567)..(567): Selenocysteine
  MOD_RES (571)..(571): Selenocysteine
  MOD_RES (624)..(624): Selenocysteine
  MOD_RES (637)..(637): Selenocysteine
  MOD_RES (683)..(683): Selenocysteine
  MOD_RES (703)..(703): Selenocysteine
  MOD_RES (707)..(707): Selenocysteine
  MOD_RES (721)..(721): Selenocysteine
  MOD_RES (724)..(724): Selenocysteine
  MOD_RES (737)..(737): Selenocysteine
  MOD_RES (757)..(757): Selenocysteine
  MOD_RES (773)..(773): Selenocysteine
  MOD_RES (789)..(789): Selenocysteine
  MOD_RES (795)..(795): Selenocysteine
  MOD_RES (810)..(810): Selenocysteine
  MOD_RES (818)..(818): Selenocysteine
  MOD_RES (846)..(846): Selenocysteine
  MOD_RES (872)..(872): Selenocysteine
  MOD_RES (880)..(880): Selenocysteine
MWPVLPSGQLNEEFDWPIQGLLVPSSPPMKKPICKXXEPYAPVRLRVLQNGEKNKNRSVXILGPDISPGRKXQCXEILNLPSAARRLYNEKGKEIFALKDLQRDELVYVSCGELWINPDLSIAQQKKQIFLRNLESDIAKIQIFCSXHKIEALVLEVQSDIVSGSKLAVHKPVAIFGEEKQVXEPEEKQMQEDPLXXENASSEILDSHVRAHLRMKACHXLPRYAWQEXSHDFDEDDSLPKKXEKGLFENVEPQKKHSCSPKHSKLHKHCHQQFEYRDGQIISHAAPQLVLGVQGPNLRSGMEVVLVEKKSDGSHQRWIHQEDSRXFHLVSNPDLVLAVSMXKXRNEVCGYPVIVQKYKPYNNGAANQKWHYMKNIKALVAFHSXALDKEIXSANYAGVCXSSVIKEENIDQPGYCYLSPDGKRKXMLCLACGQSMRXEKGLKQLLPGVPFLCISGXKXQKPFLQGPFKVISVAEVDLSCDKAEKXLSYYQARLLSLRMKXCXQAASHSGMAAXHQKAVKIIAYKNGDGYRNGKLIVAGXFPMLLXECXEQLGLARAASKVYXKDGXPIFXLRDLVLWALDESFLQRDSEKQKQDAAPVGKEQIIVEKNPRMKVKNRLFAKSVXSDSLDGIDKSLLXLILRNPIAIWVSCGEPFLPPNALQKAEKLEKQNWLKKDRILADLDXMRHKMRQLKGRRVAACQPAXMVPXKSPVQPVVVEGGWXEQXQQEIKLMELIRHXEAHLSEIQEMESKINFPIAXKRIAVKPSNLYKQPNXKRVWIYLNGGRPEDGXYAWGKXISELLQDCSSRLKMXHPARALYXPSGEPIQSWDDIERDMVICVSMGHGFKXPKELKQLMEIRANYARIRRQQGPQAXDIVVSPSXKLLSLAHLHN

SEQ ID NO: 7649 - protein, 818 aa, Homo sapiens
  MOD_RES (1)..(1): Any amino acid
  MOD_RES (3)..(3): Selenocysteine
  MOD_RES (75)..(75): Selenocysteine
  MOD_RES (111)..(111): Selenocysteine
  MOD_RES (124)..(125): Selenocysteine
  MOD_RES (148)..(148): Selenocysteine
  MOD_RES (157)..(157): Selenocysteine
  MOD_RES (171)..(171): Selenocysteine
  MOD_RES (254)..(254): Selenocysteine
  MOD_RES (270)..(270): Selenocysteine
  MOD_RES (272)..(272): Selenocysteine
  MOD_RES (313)..(313): Selenocysteine
  MOD_RES (320)..(320): Selenocysteine
  MOD_RES (329)..(329): Selenocysteine
  MOD_RES (354)..(354): Selenocysteine
  MOD_RES (366)..(366): Selenocysteine
  MOD_RES (385)..(385): Selenocysteine
  MOD_RES (387)..(387): Selenocysteine
  MOD_RES (414)..(414): Selenocysteine
  MOD_RES (429)..(429): Selenocysteine
  MOD_RES (431)..(431): Selenocysteine
  MOD_RES (442)..(442): Selenocysteine
  MOD_RES (468)..(468): Selenocysteine
  MOD_RES (474)..(474): Selenocysteine
  MOD_RES (477)..(477): Selenocysteine
  MOD_RES (491)..(491): Selenocysteine
  MOD_RES (495)..(495): Selenocysteine
  MOD_RES (499)..(499): Selenocysteine
  MOD_RES (552)..(552): Selenocysteine
  MOD_RES (565)..(565): Selenocysteine
  MOD_RES (611)..(611): Selenocysteine
  MOD_RES (631)..(631): Selenocysteine
  MOD_RES (635)..(635): Selenocysteine
  MOD_RES (649)..(649): Selenocysteine
  MOD_RES (652)..(652): Selenocysteine
  MOD_RES (665)..(665): Selenocysteine
  MOD_RES (685)..(685): Selenocysteine
  MOD_RES (701)..(701): Selenocysteine
  MOD_RES (717)..(717): Selenocysteine
  MOD_RES (723)..(723): Selenocysteine
  MOD_RES (738)..(738): Selenocysteine
  MOD_RES (746)..(746): Selenocysteine
  MOD_RES (774)..(774): Selenocysteine
  MOD_RES (800)..(800): Selenocysteine
  MOD_RES (808)..(808): Selenocysteine
XCXEILNLPSAARRLYNEKGKEIFALKDLQRDELVYVSCGELWINPDLSIAQQKKQIFLRNLESDIAKIQIFCSXHKIEALVLEVQSDIVSGSKLAVHKPVAIFGEEKQVXEPEEKQMQEDPLXXENASSEILDSHVRAHLRMKACHXLPRYAWQEXSHDFDEDDSLPKKXEKGLFENVEPQKKHSCSPKHSKLHKHCHQQFEYRDGQIISHAAPQLVLGVQGPNLRSGMEVVLVEKKSDGSHQRWIHQEDSRXFHLVSNPDLVLAVSMXKXRNEVCGYPVIVQKYKPYNNGAANQKWHYMKNIKALVAFHSXALDKEIXSANYAGVCXSSVIKEENIDQPGYCYLSPDGKRKXMLCLACGQSMRXEKGLKQLLPGVPFLCISGXKXQKPFLQGPFKVISVAEVDLSCDKAEKXLSYYQARLLSLRMKXCXQAASHSGMAAXHQKAVKIIAYKNGDGYRNGKLIVAGXFPMLLXECXEQLGLARAASKVYXKDGXPIFXLRDLVLWALDESFLQRDSEKQKQDAAPVGKEQIIVEKNPRMKVKNRLFAKSVXSDSLDGIDKSLLXLILRNPIAIWVSCGEPFLPPNALQKAEKLEKQNWLKKDRILADLDXMRHKMRQLKGRRVAACQPAXMVPXKSPVQPVVVEGGWXEQXQQEIKLMELIRHXEAHLSEIQEMESKINFPIAXKRIAVKPSNLYKQPNXKRVWIYLNGGRPEDGXYAWGKXISELLQDCSSRLKMXHPARALYXPSGEPIQSWDDIERDMVICVSMGHGFKXPKELKQLMEIRANYARIRRQQGPQAXDIVVSPSXKLLSLAHLHN

SEQ ID NO: 7650 - protein, 407 aa, Homo sapiens
  MOD_RES (1)..(1): Any amino acid
  MOD_RES (7)..(7): Selenocysteine
  MOD_RES (19)..(19): Selenocysteine
  MOD_RES (38)..(38): Selenocysteine
  MOD_RES (40)..(40): Selenocysteine
  MOD_RES (67)..(67): Selenocysteine
  MOD_RES (82)..(82): Selenocysteine
  MOD_RES (84)..(84): Selenocysteine
  MOD_RES (95)..(95): Selenocysteine
  MOD_RES (121)..(121): Selenocysteine
  MOD_RES (127)..(127): Selenocysteine
  MOD_RES (130)..(130): Selenocysteine
  MOD_RES (144)..(144): Selenocysteine
  MOD_RES (148)..(148): Selenocysteine
  MOD_RES (152)..(152): Selenocysteine
  MOD_RES (208)..(208): Selenocysteine
  MOD_RES (221)..(221): Selenocysteine
  MOD_RES (267)..(267): Selenocysteine
  MOD_RES (287)..(287): Selenocysteine
  MOD_RES (291)..(291): Selenocysteine
  MOD_RES (305)..(305): Selenocysteine
  MOD_RES (308)..(308): Selenocysteine
  MOD_RES (321)..(321): Selenocysteine
  MOD_RES (341)..(341): Selenocysteine
  MOD_RES (357)..(357): Selenocysteine
  MOD_RES (373)..(373): Selenocysteine
  MOD_RES (379)..(379): Selenocysteine
  MOD_RES (390)..(390): Selenocysteine
  MOD_RES (406)..(406): Selenocysteine
XDGKRKXMLCLACGQSMRXEKGLKQLLPGVPFLCISGXKXQKPFLQGPFKVISVAEVDLSCDKAEKXLSYYQARLLSLRMKXCXQAASHSGMAAXHQKAVKIIAYKNGDGYRNGKLIVAGXFPMLLXECXEQLGLARAASKVYXKDGXPIFXLRDLVLWALDESFLQRDSEKQKQDAAPVGKEQIIVESMEENPRMKVKNRLFAKSVXSDSLDGIDKSLLXLILRNPIAIWVSCGEPFLPPNALQKAEKLEKQNWLKKDRILADLDXMRHKMRQLKGRRVAACQPAXMVPXKSPVQPVVVEGGWXEQXQQEIKLMELIRHXEAHLSEIQEMESKINFPIAXKRIAVKPSNLYKQPNXKRVWIYLNGGRPEDGXYAWGKXISEVSLLYLKXWIFIWSRKVFFYFLIXA

SEQ ID NO: 7651 - protein, 229 aa, Homo sapiens
  MOD_RES (18)..(18): Selenocysteine
  MOD_RES (23)..(23): Selenocysteine
  MOD_RES (45)..(45): Selenocysteine
  MOD_RES (74)..(74): Selenocysteine
  MOD_RES (86)..(86): Selenocysteine
  MOD_RES (135)..(135): Selenocysteine
  MOD_RES (161)..(161): Selenocysteine
  MOD_RES (211)..(211): Selenocysteine
MKMWNNWGWCGGRRRGCXKILSXKKGIQMSIKNKHLIVIPAFSHXMSQLDFDFHCVFVSIDEGIFKAGAERSEXRGAAEVQEDEDXQVEVPVDQRPAEIVDEEEDGEKANKDAEQKEDFSGMNGDLEEEGGREAXDAPEQVEEILDHSEQQARPARVNGGXDEENGEELQQVNNELQLVLDKERKSQGAGSGQDEADVDPQRPPRPEVKIXSPEENENNQQNKDYAAVA

SEQ ID NO: 7652 - protein, 476 aa, Homo sapiens
  MOD_RES (52)..(52): Selenocysteine
  MOD_RES (67)..(67): Selenocysteine
  MOD_RES (70)..(70): Selenocysteine
  MOD_RES (115)..(115): Selenocysteine
  MOD_RES (140)..(140): Selenocysteine
  MOD_RES (162)..(162): Selenocysteine
  MOD_RES (174)..(174): Selenocysteine
  MOD_RES (178)..(178): Selenocysteine
  MOD_RES (189)..(189): Selenocysteine
  MOD_RES (229)..(229): Selenocysteine
  MOD_RES (262)..(262): Selenocysteine
  MOD_RES (289)..(289): Selenocysteine
  MOD_RES (303)..(303): Selenocysteine
  MOD_RES (321)..(321): Selenocysteine
  MOD_RES (333)..(333): Selenocysteine
  MOD_RES (382)..(382): Selenocysteine
  MOD_RES (408)..(408): Selenocysteine
  MOD_RES (458)..(458): Selenocysteine
MSGSSARSSHLSQPVVKSVLVYRNGDPFYAGRRVVIHEKKVSSFEVFLKEVXGGVQAPFGAVRNIYXPRXGHRIRKLDQIQSGGNYVAGGQEAFKKLNYLDIGEIKKRPMEVVNXEVKPVIHSRINVSARFRKPLQEPCXIFLIANGDLINPASRLLIPRKXLNQWDHVLQMVXEKIXLRSGAVHRLYXLEGKLVESGAELENGQFYVAVGRDKFKKLPYSELLFDKSXMRRPFGQKASSLPPIVGSRKSKGSGNDRHSKSXVGSSDNSSPQPLKRKGKKEDVNSEKLXKLKQNVKLKNSQEXIPNSDEGIFKAGAERSEXRGAAEVQEDEDXQVEVPVDQRPAEIVDEEEDGEKANKDAEQKEDFSGMNGDLEEEGGREAXDAPEQVEEILDHSEQQARPARVNGGXDEENGEELQQVNNELQLVLDKERKSQGAGSGQDEADVDPQRPPRPEVKIXSPEENENNQQNKDYAAVA

SEQ ID NO: 7653 - protein, 88 aa, Homo sapiens
  MOD_RES (1)..(1): Any amino acid
  MOD_RES (20)..(20): Selenocysteine
  MOD_RES (35)..(35): Selenocysteine
  MOD_RES (38)..(38): Selenocysteine
  MOD_RES (83)..(83): Selenocysteine
XVVIHEKKVSSFEVFLKEVXGGVQAPFGAVRNIYXPRXGHRIRKLDQIQSGGNYVAGGQEAFKKLNYLDIGEIKKRPMEVVNXELHVL

SEQ ID NO: 7654 - protein, 349 aa, Homo sapiens
  MOD_RES (29)..(29): Selenocysteine
  MOD_RES (35)..(35): Selenocysteine
  MOD_RES (44)..(44): Selenocysteine
  MOD_RES (58)..(58): Selenocysteine
  MOD_RES (66)..(66): Selenocysteine
  MOD_RES (111)..(111): Selenocysteine
  MOD_RES (158)..(158): Selenocysteine
  MOD_RES (164)..(164): Selenocysteine
  MOD_RES (179)..(179): Selenocysteine
  MOD_RES (193)..(193): Selenocysteine
  MOD_RES (247)..(247): Selenocysteine
  MOD_RES (269)..(269): Selenocysteine
  MOD_RES (278)..(278): Selenocysteine
  MOD_RES (298)..(298): Selenocysteine
  MOD_RES (310)..(310): Selenocysteine
  MOD_RES (312)..(312): Selenocysteine
MAGGSPAAKRVVVYRNGDPFFPGSQLVVXQRRFPXMEAFLCEVXSAVQAPLAVRALYXPCHGHPVXNLADLKNRGQYVAAGFERFHKLHYLPHRGKDPGGKSCRLQGPPVXRHLCDGAIGRQLPAGAPSYIHVFRNGDLVSPPFSLKLSQAASQDWEXVLKLLXEKVKLQSGAVCKLCXLEGLPLSAGKELVXGHYYVAVGEDEFKDLPYLELLVPSPSLPRGCWQPPGSKSRPHRQGAQGHRAQVXQPSPKEPDRIKPSAFYARPQQXIQPRSKLPXLSFPSGVIGVYGAPHRRKEXAGALEVADDEDXQXEEPLDQRAAQIVEEALSLENQPGAGAAISASAPALPS

SEQ ID NO: 7655 - protein, 364 aa, Homo sapiens
  MOD_RES (3)..(3): Selenocysteine
  MOD_RES (12)..(13): Selenocysteine
  MOD_RES (17)..(17): Selenocysteine
  MOD_RES (42)..(42): Selenocysteine
  MOD_RES (51)..(51): Selenocysteine
  MOD_RES (65)..(65): Selenocysteine
  MOD_RES (67)..(67): Selenocysteine
  MOD_RES (130)..(130): Selenocysteine
  MOD_RES (142)..(142): Selenocysteine
  MOD_RES (169)..(169): Selenocysteine
  MOD_RES (185)..(185): Selenocysteine
  MOD_RES (210)..(210): Selenocysteine
  MOD_RES (260)..(260): Selenocysteine
  MOD_RES (274)..(274): Selenocysteine
  MOD_RES (293)..(293): Selenocysteine
  MOD_RES (298)..(298): Selenocysteine
  MOD_RES (334)..(334): Selenocysteine
MGXRGPSAPVDXXPAKXIVVYRNGDPFYVGKKFVLSRRRAAXFEALLEQLXEQVDVPFGVRRLFXPXRGHRVLGLDALQAGGKYVAAGRERFKELDYIHIVPRKPAKIRKLKEIKPVVHCDINVPSKWQXYHRISRHINVFXNGRLFIPPAKIIIPKFSLSDWDIVLAXIGEKVFPLGGVRKLFXMNGHLLGDSKDLQDNHFYVAVGLEXFKYFPYWKSPRVPSEVQQRYANVEKNSQRKKKVDSKGKEPCKYDGIPPKXQDSVYYAKEEKKKXLAEPLVQRGAEGDVYKAPXPSKEXQGALDVKEEHNVQLEVPVDQRQAEIVKEDEEIHENXPDFEGNKDKEDARLCEDVERKMAREWKPVD

SEQ ID NO: 7656 - protein, 298 aa, Homo sapiens
  MOD_RES (5)..(5): Selenocysteine
  MOD_RES (14)..(14): Selenocysteine
  MOD_RES (28)..(28): Selenocysteine
  MOD_RES (30)..(30): Selenocysteine
  MOD_RES (93)..(93): Selenocysteine
  MOD_RES (105)..(105): Selenocysteine
  MOD_RES (132)..(132): Selenocysteine
  MOD_RES (148)..(148): Selenocysteine
  MOD_RES (173)..(173): Selenocysteine
  MOD_RES (223)..(223): Selenocysteine
  MOD_RES (237)..(237): Selenocysteine
  MOD_RES (256)..(256): Selenocysteine
  MOD_RES (261)..(261): Selenocysteine
  MOD_RES (297)..(297): Selenocysteine
RRAAXFEALLEQLXEQVDVPFGVRRLFXPXRGHRVLGLDALQAGGKYVAAGRERFKELDYIHIVPRKPAKIRKLKEIKPVVHCDINVPSKWQXYHRISRHINVFXNGRLFIPPAKIIIPKFSLSDWDIVLAXIGEKVFPLGGVRKLFXMNGHLLGDSKDLQDNHFYVAVGLEXFKYFPYWKSPRVPSEVQQRYANVEKNSQRKKKVDSKGKEPCKYDGIPPKXQDSVYYAKEEKKKXLAEPLVQRGAEGDVYKAPXPSKEXQGALDVKEEHNVQLEVPVDQRQAEIVKEDEEIHENXP

SEQ ID NO: 7657 - protein, 3298 aa, Homo sapiens
  MOD_RES (59)..(59): Selenocysteine
  MOD_RES (72)..(72): Selenocysteine
  MOD_RES (90)..(90): Selenocysteine
  MOD_RES (103)..(103): Selenocysteine
  MOD_RES (118)..(118): Selenocysteine
  MOD_RES (121)..(121): Selenocysteine
  MOD_RES (126)..(126): Selenocysteine
  MOD_RES (130)..(130): Selenocysteine
  MOD_RES (156)..(156): Selenocysteine
  MOD_RES (160)..(160): Selenocysteine
  MOD_RES (177)..(177): Selenocysteine
  MOD_RES (190)..(190): Selenocysteine
  MOD_RES (195)..(195): Selenocysteine
  MOD_RES (202)..(202): Selenocysteine
  MOD_RES (210)..(210): Selenocysteine
  MOD_RES (244)..(244): Selenocysteine
  MOD_RES (291)..(291): Selenocysteine
  MOD_RES (311)..(311): Selenocysteine
  MOD_RES (349)..(349): Selenocysteine
  MOD_RES (363)..(363): Selenocysteine
  MOD_RES (416)..(416): Selenocysteine
  MOD_RES (443)..(443): Selenocysteine
  MOD_RES (445)..(445): Selenocysteine
  MOD_RES (463)..(463): Selenocysteine
  MOD_RES (496)..(496): Selenocysteine
  MOD_RES (504)..(504): Selenocysteine
  MOD_RES (509)..(509): Selenocysteine
  MOD_RES (518)..(518): Selenocysteine
  MOD_RES (526)..(526): Selenocysteine
  MOD_RES (531)..(532): Selenocysteine
  MOD_RES (551)..(551): Selenocysteine
  MOD_RES (563)..(563): Selenocysteine
  MOD_RES (581)..(581): Selenocysteine
  MOD_RES (591)..(591): Selenocysteine
  MOD_RES (595)..(595): Selenocysteine
  MOD_RES (601)..(601): Selenocysteine
  MOD_RES (603)..(603): Selenocysteine
  MOD_RES (640)..(641): Selenocysteine
  MOD_RES (643)..(643): Selenocysteine
  MOD_RES (656)..(656): Selenocysteine
  MOD_RES (658)..(658): Selenocysteine
  MOD_RES (702)..(702): Selenocysteine
  MOD_RES (734)..(734): Selenocysteine
  MOD_RES (743)..(743): Selenocysteine
  MOD_RES (784)..(784): Selenocysteine
  MOD_RES (786)..(786): Selenocysteine
  MOD_RES (807)..(807): Selenocysteine
  MOD_RES (825)..(825): Selenocysteine
  MOD_RES (848)..(848): Selenocysteine
  MOD_RES (900)..(900): Selenocysteine
  MOD_RES (907)..(907): Selenocysteine
  MOD_RES (911)..(911): Selenocysteine
  MOD_RES (915)..(915): Selenocysteine
  MOD_RES (930)..(930): Selenocysteine
  MOD_RES (932)..(932): Selenocysteine
  MOD_RES (942)..(942): Selenocysteine
  MOD_RES (946)..(947): Selenocysteine
  MOD_RES (979)..(979): Selenocysteine
  MOD_RES (993)..(993): Selenocysteine
  MOD_RES (1004)..(1004): Selenocysteine
  MOD_RES (1013)..(1014): Selenocysteine
  MOD_RES (1017)..(1017): Selenocysteine
  MOD_RES (1033)..(1033): Selenocysteine
  MOD_RES (1086)..(1086): Selenocysteine
  MOD_RES (1088)..(1088): Selenocysteine
  MOD_RES (1090)..(1090): Selenocysteine
  MOD_RES (1110)..(1110): Selenocysteine
  MOD_RES (1122)..(1122): Selenocysteine
  MOD_RES (1130)..(1130): Selenocysteine
  MOD_RES (1141)..(1141): Selenocysteine
  MOD_RES (1160)..(1160): Selenocysteine
  MOD_RES (1164)..(1165): Selenocysteine
  MOD_RES (1168)..(1168): Selenocysteine
  MOD_RES (1193)..(1194): Selenocysteine
  MOD_RES (1196)..(1196): Selenocysteine
  MOD_RES (1210)..(1210): Selenocysteine
  MOD_RES (1234)..(1234): Selenocysteine
  MOD_RES (1237)..(1238): Selenocysteine
  MOD_RES (1251)..(1251): Selenocysteine
  MOD_RES (1255)..(1255): Selenocysteine
  MOD_RES (1257)..(1257): Selenocysteine
  MOD_RES (1275)..(1275): Selenocysteine
  MOD_RES (1290)..(1290): Selenocysteine
  MOD_RES (1338)..(1338): Selenocysteine
  MOD_RES (1340)..(1340): Selenocysteine
  MOD_RES (1366)..(1366): Selenocysteine
  MOD_RES (1368)..(1368): Selenocysteine
  MOD_RES (1378)..(1378): Selenocysteine
  MOD_RES (1406)..(1406): Selenocysteine
  MOD_RES (1457)..(1457): Selenocysteine
  MOD_RES (1492)..(1492): Selenocysteine
  MOD_RES (1505)..(1506): Selenocysteine
  MOD_RES (1516)..(1516): Selenocysteine
  MOD_RES (1537)..(1537): Selenocysteine
  MOD_RES (1598)..(1598): Selenocysteine
  MOD_RES (1618)..(1618): Selenocysteine
  MOD_RES (1632)..(1632): Selenocysteine
  MOD_RES (1636)..(1636): Selenocysteine
  MOD_RES (1648)..(1648): Selenocysteine
  MOD_RES (1666)..(1666): Selenocysteine
  MOD_RES (1670)..(1670): Selenocysteine
  MOD_RES (1674)..(1674): Selenocysteine
  MOD_RES (1685)..(1685): Selenocysteine
  MOD_RES (1700)..(1700): Selenocysteine
  MOD_RES (1704)..(1705): Selenocysteine
  MOD_RES (1720)..(1720): Selenocysteine
  MOD_RES (1733)..(1733): Selenocysteine
  MOD_RES (1736)..(1736): Selenocysteine
  MOD_RES (1750)..(1750): Selenocysteine
  MOD_RES (1768)..(1768): Selenocysteine
  MOD_RES (1770)..(1770): Selenocysteine
  MOD_RES (1809)..(1809): Selenocysteine
  MOD_RES (1838)..(1838): Selenocysteine
  MOD_RES (1842)..(1842): Selenocysteine
  MOD_RES (1844)..(1844): Selenocysteine
  MOD_RES (1872)..(1872): Selenocysteine
  MOD_RES (1891)..(1891): Selenocysteine
  MOD_RES (1898)..(1898): Selenocysteine
  MOD_RES (1913)..(1913): Selenocysteine
  MOD_RES (1926)..(1926): Selenocysteine
  MOD_RES (1942)..(1943): Selenocysteine
  MOD_RES (1947)..(1947): Selenocysteine
  MOD_RES (1949)..(1949): Selenocysteine
  MOD_RES (1959)..(1959): Selenocysteine
  MOD_RES (1962)..(1962): Selenocysteine
  MOD_RES (1978)..(1978): Selenocysteine
  MOD_RES (1980)..(1980): Selenocysteine
  MOD_RES (1985)..(1985): Selenocysteine
  MOD_RES (2006)..(2006): Selenocysteine
  MOD_RES (2011)..(2012): Selenocysteine
  MOD_RES (2017)..(2017): Selenocysteine
  MOD_RES (2041)..(2041): Selenocysteine
  MOD_RES (2051)..(2051): Selenocysteine
  MOD_RES (2076)..(2076): Selenocysteine
  MOD_RES (2085)..(2085): Selenocysteine
  MOD_RES (2098)..(2098): Selenocysteine
  MOD_RES (2103)..(2103): Selenocysteine
  MOD_RES (2114)..(2114): Selenocysteine
  MOD_RES (2121)..(2121): Selenocysteine
  MOD_RES (2125)..(2125): Selenocysteine
  MOD_RES (2155)..(2155): Selenocysteine
  MOD_RES (2158)..(2158): Selenocysteine
  MOD_RES (2160)..(2160): Selenocysteine
  MOD_RES (2225)..(2226): Selenocysteine
  MOD_RES (2228)..(2228): Selenocysteine
  MOD_RES (2230)..(2232): Selenocysteine
  MOD_RES (2243)..(2243): Selenocysteine
  MOD_RES (2250)..(2250): Selenocysteine
  MOD_RES (2262)..(2262): Selenocysteine
  MOD_RES (2264)..(2264): Selenocysteine
  MOD_RES (2270)..(2270): Selenocysteine
  MOD_RES (2276)..(2276): Selenocysteine
  MOD_RES (2299)..(2299): Selenocysteine
  MOD_RES (2334)..(2334): Selenocysteine
  MOD_RES (2363)..(2363): Selenocysteine
  MOD_RES (2389)..(2389): Selenocysteine
  MOD_RES (2401)..(2401): Selenocysteine
  MOD_RES (2430)..(2430): Selenocysteine
  MOD_RES (2433)..(2433): Selenocysteine
  MOD_RES (2437)..(2437): Selenocysteine
  MOD_RES (2467)..(2467): Selenocysteine
  MOD_RES (2483)..(2483): Selenocysteine
  MOD_RES (2492)..(2492): Selenocysteine
  MOD_RES (2500)..(2500): Selenocysteine
  MOD_RES (2503)..(2503): Selenocysteine
  MOD_RES (2507)..(2507): Selenocysteine
  MOD_RES (2566)..(2566): Selenocysteine
  MOD_RES (2571)..(2571): Selenocysteine
  MOD_RES (2589)..(2589): Selenocysteine
  MOD_RES (2591)..(2591): Selenocysteine
  MOD_RES (2603)..(2603): Selenocysteine
  MOD_RES (2610)..(2610): Selenocysteine
  MOD_RES (2615)..(2615): Selenocysteine
  MOD_RES (2640)..(2640): Selenocysteine
  MOD_RES (2658)..(2658): Selenocysteine
  MOD_RES (2669)..(2669): Selenocysteine
  MOD_RES (2693)..(2693): Selenocysteine
  MOD_RES (2713)..(2713): Selenocysteine
  MOD_RES (2723)..(2723): Selenocysteine
  MOD_RES (2726)..(2727): Selenocysteine
  MOD_RES (2764)..(2764): Selenocysteine
  MOD_RES (2778)..(2778): Selenocysteine
  MOD_RES (2798)..(2798): Selenocysteine
  MOD_RES (2804)..(2804): Selenocysteine
  MOD_RES (2838)..(2838): Selenocysteine
  MOD_RES (2854)..(2854): Selenocysteine
  MOD_RES (2864)..(2865): Selenocysteine
  MOD_RES (2881)..(2881): Selenocysteine
  MOD_RES (2883)..(2883): Selenocysteine
  MOD_RES (2890)..(2890): Selenocysteine
  MOD_RES (2915)..(2915): Selenocysteine
  MOD_RES (2919)..(2919): Selenocysteine
  MOD_RES (2923)..(2923): Selenocysteine
  MOD_RES (2925)..(2925): Selenocysteine
  MOD_RES (3006)..(3006): Selenocysteine
  MOD_RES (3079)..(3079): Selenocysteine
  MOD_RES (3088)..(3088): Selenocysteine
  MOD_RES (3105)..(3105): Selenocysteine
  MOD_RES (3115)..(3115): Selenocysteine
  MOD_RES (3117)..(3117): Selenocysteine
  MOD_RES (3130)..(3130): Selenocysteine
  MOD_RES (3148)..(3148): Selenocysteine
  MOD_RES (3181)..(3181): Selenocysteine
  MOD_RES (3206)..(3206): Selenocysteine
  MOD_RES (3223)..(3223): Selenocysteine
  MOD_RES (3294)..(3294): Selenocysteine
MQKELGIVPSCPGMKSPRPHLLLPLLLLLLLLLGAGVPGAWGQAGSLDLQIDEEQPAGXLIGDISAGLPAGXAAPLMYFISAQEGSGVGXDLAIDEHSGVVRXARVLDREQRDRYRFXAVXPDGAXVEVXVRVADINDHAPAFPQARAALQVPEHXAFGXRYPLEPARDADAGRLGXQGYALSGDGAGEXFRLEXRPGPDGXPVPELVVXGELDRENRSHYMLQLEAYDGGSPPRRAQALLDVXLLDINDHAPAFNQSRYHAVVSESLAPGSPVLQVFASDADAGVNGAVXYEINRRQSEGDGPFSIDAHXGLLQLERPLDFEQRRVHELVVQARDGGAHPELGSAFVXVHVRDANDNQPSMXVIFLSADGSPQVSEAAPPGQLVARISVSDPDDGDFAHVNVSLEGGEGHFALSXQDSVIYLVCVARRLDREERDAYNLRVXAXDSGSPPLRAEAAFVLHVXDVNDNAPAFDRQLYRPEPLPEVALPGSFVVRVXARDPDQGXNGQVXYSLAPGAHXHWFSIDPXSGIIXXAASLDYELEPQPQLIVVAXDGGLPPLASSAXVSVALQDVNDNEPQFQRXFYNASLPEGXQPGXCFLQVXAXDADSGPFGLLSYSLGAGLGSSGSPPFRIDAHSGDVCXXRXLDRDQGPSSFDFXVXAVDGGGLKSMVYVKVFLSDENDNPPQFYPREYAASISAQSPPGXAVLRLRAHDPDQGSHGRLSYHILAGNSPPLFXLDEQSGLLXVAWPLARRANSVVQLEIGAEDGGGLQAEPSARVDISIVPGXPXPPIFEQLQYVFSVPEDVAPGXSVGIVQAHNPPGRLAPVXLSLSGGDPRGLFSLDAVSGLLQXLRPLDRELLGPVLELEVRAGSGVPPAFAVARVRVLLDDVNDNSPAFPAPEDXVLLPPNXAPGXPIYXLRALDPDSGVNSRVXFXLLAGGGGAFXVDPXXGHVRLMRPLGPSGGPAHELELEARDGGSPPRXSHFRLRVVVQDVGXRGLAPRFNSPXYRVDLPSGXXAGXQVLQVQAQAPDGGPIXYHLAAEGASSPFGLEPQSGWLWVRAALDREAQELYILKVMAVSGSKAELGQQXGXAXVRVSILNQNEHSPRLSEDPXFLAVAENQPPGXSVGRVFAXDRDSGPNGRLXYSLQQLSEDSKAFRIHPQXGEVXXLQXLDREQQSSYQLLVQVQDGGSPPRSXXGXVHVAVLDLNDNSPXFLQASGAAGGGLPIQVPDRVPPGXLVXXLQAKDPDEGENGXILYXLXGPGSELFSLHPHSGELLXAAPLIRAERPHYVLXLSAHDQGSPPRSASLQLLVQVLPSARLAEPPPDLAERDPAAPVPVVLXVXAAEGLRPGSLLGSVAAPEPAGVGALXYXLVGGADPEGXFALDAASGRLYLARPLDFEAGPPWRALXVRAEGPGGAGARLLRVQVQVQDENEHAPAFARDPLALALPENPEPGAALYXFRASDADGPGPNSDVRYRLLRQEPPVPALRLDARXGALSAPRGLDREXXPALLLLVEAXDRPANASRRRAARVSARVFVXDENDNAPVFASPSRVRLPEDQPPGPAALHVVARDPDLGEAARVSYRLASGGDGHFRLHSSXGALSVVRPLDREQRAEHVLXVVASDHGSPPRSAXQVLXVSVADVNDEAPXFQQQEYSVLLRENNPPGXSLLXLRAXDPDVGANGQVXYGGVSSESFSLDPDXGVLXXLRALDREEQEEINLXVYAQDRGSPPQLXHVXVRVAVEDENDHAPXFGSAHLSLEVPEGQDPQXLXMLRASDPDVGANGQLQYRILDGDPSGAFVLDLASGEFGXMRPLDREVEPAFQLRIEARDGGQPALSAXLLLXVXVLDANDHAPAFPVPAYSVEVPEDVPAGXLLLQLQAHDPDAGANGHVXYYLGAGXAGAFLLEPSSGELRXAAALDREQCPSYXFSVSAVDGAAAGPLSXXVSVXIXVRDVNDHAPXFPXSPLRLRLPRPGPSFSXPXLALAXLRAEDRDAGANASILYRLAGXPPPGXXVDSYXGEIRVARSPVALGPRDRVLFIVAXDLGRPARSAXGVIIVGLQGEAERGPRFPRASSEAXIRENAPPGXPIVSPRAVHAGGXNGPIXYSILSGNEKGXFSIQPSXGAIXVRSAEGLDFEVSPRLRLVLQAESGGAFAFXVLXLXLQDANDNAPRFLRPHYVAFLPESRPLEGPLLQVEADDLDQGSGGQISYSLAASQPARGLFHVDPXXGXIXXXAILDREIWAEXRLVLMAXDRGSPALVGSAXLXVMVIDXNDNRPXIPQPWELRVSEDALLGSEIAQVXGNDVDSGPVLWYVLSPSGPQDPFSVGRYGGRVSLXGPLDFEQCDRYQLQLLAHDGPHEGRANLXVLVEDVNDNAPAFSQSLYQVMLLEHXPPGSAILSVSAXDRDSGANGHISYHLASPADGFSVDPNNGXLFXIVGXVALGHDGSGAVDVVLEARDHGAPGRAARAXVHVQLQDQNDHAPSFXLSHYRVAVXEDLPPGSXLLXLEAXDADGSRSHAAVDYSIISGNWGRVFQLEPRLAEAGESAGPGPRALGCLVLLEPLDFESLXQYNLXVAAADRGQPPQSSVVPVXVXVLDVNDNPPVFXRASYRVXVPEDXPVGAELLHVEASDADPGPHGLVRFXVSSGDPSGLFELDESSGXLRLAHALDCEXQARHQLVVQAADPAGAHFALAPVXIEVQDVNDHGPAFPLNLLSXSVAENQPPGXLVXXLHAIDGDAGAFGRLRYSLLEAGPGPEGREAFALNSSXGELRARVPFDYEHXESFRLLVGAADAGNLSASVXVSVLVXGEDEYDPVFLAPAFHFQVPEGARRGHSLGHVQAXDEDGGADGLVLYSLAXSSPYFGINQXXGALYLRVDSRAPGSGXAXSGGGGRXRREAPRELRLEVIARGPLPGSRSAXVPVXVDIXHXALGLAPDLNLLLVGAVAASLGVVVVLALAALVLGLVRARSRKAEAAPGPMSQAAPLASDSLQKLGREPPSPPPSEHLYHQXLPSYGGPGAGGPYPRGGSLDPSHSSGRGSAEAAEDDEIRMINEFPRVASVASSLAARGPDSGIQQDADGLSDXSCEPPAPDXWYKGRKAGLLLPGAGAXLYREEGPPAXAXAFLGGCGLSPAPXGDYGFPADGKPCVAGALXAIVAGEEELRGSYNWDYLLSWCPQFQPLASVFXEIARLKDEARPCPPAPRIDPPPLIXAVAHPGAKSVPPKPANXAAARAIFPPASHRSPISHEGSLSSAAMSPSFSPSLSPLAARSPVVSPFGVAQGPSASALSAESGLEPPDDXELHI

SEQ ID NO: 7658 - protein, 422 aa, Homo sapiens
  MOD_RES (10)..(10): Selenocysteine
  MOD_RES (17)..(17): Selenocysteine
  MOD_RES (29)..(29): Selenocysteine
  MOD_RES (47)..(47): Selenocysteine
  MOD_RES (52)..(52): Selenocysteine
  MOD_RES (78)..(78): Selenocysteine
  MOD_RES (80)..(80): Selenocysteine
  MOD_RES (88)..(88): Selenocysteine
  MOD_RES (105)..(105): Selenocysteine
  MOD_RES (152)..(152): Selenocysteine
  MOD_RES (171)..(171): Selenocysteine
  MOD_RES (173)..(173): Selenocysteine
  MOD_RES (177)..(177): Selenocysteine
  MOD_RES (231)..(231): Selenocysteine
  MOD_RES (239)..(239): Selenocysteine
  MOD_RES (243)..(243): Selenocysteine
  MOD_RES (245)..(245): Selenocysteine
  MOD_RES (255)..(255): Selenocysteine
  MOD_RES (270)..(270): Selenocysteine
  MOD_RES (318)..(318): Selenocysteine
  MOD_RES (364)..(364): Selenocysteine
  MOD_RES (371)..(371): Selenocysteine
  MOD_RES (385)..(385): Selenocysteine
  MOD_RES (420)..(420): Selenocysteine
MLELIEVNGXPGSQLSXPRSGKSPSPSPXSPGSLRKQRSSQHGGSSXSLASXKVCSSMDENDGPGEEVSEEGFQIPAXIXERYKVGRXIGDGNFAVVKECVERSXAREYALKIIKKSKCRGKEHMIQNEVSILRRVKHPNIVLLIEEMDVPXELYLVMELVKGGDLFDAIXSXNKYXERDASGMLYNLASAIKYLHSLNIVHRDIKPENLLVYEHQDGSKSLKLGDFGLAXIVDGPLYXVCGXPXYVAPEIIAEXGYGLKVDIWAAGVIXYILLCGFPPFRGSGDDQEVLFDQILMGQVDFPSPYWDNVSDSAKELIXMMLLVDVDQRFSAVQVLEHPWVNDDGLPENEHQLSVAGKIKKHFNXGPKPNSXAAGVSVIALDHGFXIKRSGSLDYYQQPGMYWIRPPLLIRRGRFSDEDAXRM

SEQ ID NO: 7659 - protein, 433 aa, Homo sapiens
  MOD_RES (10)..(10): Selenocysteine
  MOD_RES (17)..(17): Selenocysteine
  MOD_RES (29)..(29): Selenocysteine
  MOD_RES (47)..(47): Selenocysteine
  MOD_RES (52)..(52): Selenocysteine
  MOD_RES (78)..(78): Selenocysteine
  MOD_RES (80)..(80): Selenocysteine
  MOD_RES (88)..(88): Selenocysteine
  MOD_RES (105)..(105): Selenocysteine
  MOD_RES (152)..(152): Selenocysteine
  MOD_RES (171)..(171): Selenocysteine
  MOD_RES (173)..(173): Selenocysteine
  MOD_RES (177)..(177): Selenocysteine
  MOD_RES (231)..(231): Selenocysteine
  MOD_RES (239)..(239): Selenocysteine
  MOD_RES (243)..(243): Selenocysteine
  MOD_RES (245)..(245): Selenocysteine
  MOD_RES (255)..(255): Selenocysteine
  MOD_RES (270)..(270): Selenocysteine
  MOD_RES (318)..(318): Selenocysteine
  MOD_RES (364)..(364): Selenocysteine
  MOD_RES (371)..(371): Selenocysteine
  MOD_RES (380)..(381): Selenocysteine
  MOD_RES (425)..(425): Selenocysteine
MLELIEVNGXPGSQLSXPRSGKSPSPSPXSPGSLRKQRSSQHGGSSXSLASXKVCSSMDENDGPGEEVSEEGFQIPAXIXERYKVGRXIGDGNFAVVKECVERSXAREYALKIIKKSKCRGKEHMIQNEVSILRRVKHPNIVLLIEEMDVPXELYLVMELVKGGDLFDAIXSXNKYXERDASGMLYNLASAIKYLHSLNIVHRDIKPENLLVYEHQDGSKSLKLGDFGLAXIVDGPLYXVCGXPXYVAPEIIAEXGYGLKVDIWAAGVIXYILLCGFPPFRGSGDDQEVLFDQILMGQVDFPSPYWDNVSDSAKELIXMMLLVDVDQRFSAVQVLEHPWVNDDGLPENEHQLSVAGKIKKHFNXGPKPNSXAAGVSVIAXXALDKERQVFRRRRNQDVRSRYKAQPAPPELNSESEDYSPSSSEXVRSPNSPF

SEQ ID NO: 7660 - protein, 363 aa, Homo sapiens
  MOD_RES (34)..(34): Selenocysteine
  MOD_RES (44)..(44): Selenocysteine
  MOD_RES (46)..(46): Selenocysteine
  MOD_RES (49)..(49): Selenocysteine
  MOD_RES (92)..(92): Selenocysteine
  MOD_RES (94)..(94): Selenocysteine
  MOD_RES (107)..(107): Selenocysteine
  MOD_RES (110)..(110): Selenocysteine
  MOD_RES (143)..(143): Selenocysteine
  MOD_RES (156)..(157): Selenocysteine
  MOD_RES (168)..(168): Selenocysteine
  MOD_RES (189)..(189): Selenocysteine
  MOD_RES (209)..(209): Selenocysteine
  MOD_RES (218)..(218): Selenocysteine
  MOD_RES (221)..(221): Selenocysteine
  MOD_RES (236)..(236): Selenocysteine
  MOD_RES (282)..(282): Selenocysteine
  MOD_RES (285)..(285): Selenocysteine
  MOD_RES (295)..(296): Selenocysteine
  MOD_RES (311)..(311): Selenocysteine
  MOD_RES (317)..(317): Selenocysteine
  MOD_RES (324)..(324): Selenocysteine
  MOD_RES (336)..(336): Selenocysteine
MSFGRDMELEHFDERDKAQRYSRGSRVNGLPSPXHSAHCSFYRXRXLQXLSSEKKAKKVRFYRNGDRYFKGIVYAISPDRFRSFEALLADLXRXLSDNVNLPQGVRXIYXIDGLKKISSLDQLVEGESYVCGSIEPFKKLEYXKNVNPNWSVNVKXXSASRAVSSLAXAKGSPSEVRENKDFIRPKLVXIIRSGVKPRKAVRILLNKKXAHSFEQVLXDIXDAIKLDSGVVKRLYXLDGKQVMCLQDFFGDDDIFIACGPEKFRYQDDFLLDESECRVVKSXSYXKIASSSRRSXXKSPGPSRRSKSPASXSSVNGXPGSQLSXPRSGKSPSPSPXSPGSLRKQRDLYRPLSSDDLDSVGDSV

SEQ ID NO: 7661 - protein, 729 aa, Homo sapiens
  MOD_RES (34)..(34): Selenocysteine
  MOD_RES (44)..(44): Selenocysteine
  MOD_RES (46)..(46): Selenocysteine
  MOD_RES (49)..(49): Selenocysteine
  MOD_RES (92)..(92): Selenocysteine
  MOD_RES (94)..(94): Selenocysteine
  MOD_RES (107)..(107): Selenocysteine
  MOD_RES (110)..(110): Selenocysteine
  MOD_RES (143)..(143): Selenocysteine
  MOD_RES (156)..(157): Selenocysteine
  MOD_RES (168)..(168): Selenocysteine
  MOD_RES (189)..(189): Selenocysteine
  MOD_RES (209)..(209): Selenocysteine
  MOD_RES (218)..(218): Selenocysteine
  MOD_RES (221)..(221): Selenocysteine
  MOD_RES (236)..(236): Selenocysteine
  MOD_RES (282)..(282): Selenocysteine
  MOD_RES (285)..(285): Selenocysteine
  MOD_RES (295)..(296): Selenocysteine
  MOD_RES (311)..(311): Selenocysteine
  MOD_RES (317)..(317): Selenocysteine
  MOD_RES (324)..(324): Selenocysteine
  MOD_RES (336)..(336): Selenocysteine
  MOD_RES (354)..(354): Selenocysteine
  MOD_RES (359)..(359): Selenocysteine
  MOD_RES (385)..(385): Selenocysteine
  MOD_RES (387)..(387): Selenocysteine
  MOD_RES (395)..(395): Selenocysteine
  MOD_RES (412)..(412): Selenocysteine
  MOD_RES (459)..(459): Selenocysteine
  MOD_RES (478)..(478): Selenocysteine
  MOD_RES (480)..(480): Selenocysteine
  MOD_RES (484)..(484): Selenocysteine
  MOD_RES (538)..(538): Selenocysteine
  MOD_RES (546)..(546): Selenocysteine
  MOD_RES (550)..(550): Selenocysteine
  MOD_RES (552)..(552): Selenocysteine
  MOD_RES (562)..(562): Selenocysteine
  MOD_RES (577)..(577): Selenocysteine
  MOD_RES (625)..(625): Selenocysteine
  MOD_RES (671)..(671): Selenocysteine
  MOD_RES (678)..(678): Selenocysteine
  MOD_RES (692)..(692): Selenocysteine
  MOD_RES (727)..(727): Selenocysteine
MSFGRDMELEHFDERDKAQRYSRGSRVNGLPSPXHSAHCSFYRXRXLQXLSSEKKAKKVRFYRNGDRYFKGIVYAISPDRFRSFEALLADLXRXLSDNVNLPQGVRXIYXIDGLKKISSLDQLVEGESYVCGSIEPFKKLEYXKNVNPNWSVNVKXXSASRAVSSLAXAKGSPSEVRENKDFIRPKLVXIIRSGVKPRKAVRILLNKKXAHSFEQVLXDIXDAIKLDSGVVKRLYXLDGKQVMCLQDFFGDDDIFIACGPEKFRYQDDFLLDESECRVVKSXSYXKIASSSRRSXXKSPGPSRRSKSPASXSSVNGXPGSQLSXPRSGKSPSPSPXSPGSLRKQRSSQHGGSSXSLASXKVCSSMDENDGPGEEVSEEGFQIPAXIXERYKVGRXIGDGNFAVVKECVERSXAREYALKIIKKSKCRGKEHMIQNEVSILRRVKHPNIVLLIEEMDVPXELYLVMELVKGGDLFDAIXSXNKYXERDASGMLYNLASAIKYLHSLNIVHRDIKPENLLVYEHQDGSKSLKLGDFGLAXIVDGPLYXVCGXPXYVAPEIIAEXGYGLKVDIWAAGVIXYILLCGFPPFRGSGDDQEVLFDQILMGQVDFPSPYWDNVSDSAKELIXMMLLVDVDQRFSAVQVLEHPWVNDDGLPENEHQLSVAGKIKKHFNXGPKPNSXAAGVSVIALDHGFXIKRSGSLDYYQQPGMYWIRPPLLIRRGRFSDEDAXRM

SEQ ID NO: 7662 - protein, 740 aa, Homo sapiens
  MOD_RES (34)..(34): Selenocysteine
  MOD_RES (44)..(44): Selenocysteine
  MOD_RES (46)..(46): Selenocysteine
  MOD_RES (49)..(49): Selenocysteine
  MOD_RES (92)..(92): Selenocysteine
  MOD_RES (94)..(94): Selenocysteine
  MOD_RES (107)..(107): Selenocysteine
  MOD_RES (110)..(110): Selenocysteine
  MOD_RES (143)..(143): Selenocysteine
  MOD_RES (156)..(157): Selenocysteine
  MOD_RES (168)..(168): Selenocysteine
  MOD_RES (189)..(189): Selenocysteine
  MOD_RES (209)..(209): Selenocysteine
  MOD_RES (218)..(218): Selenocysteine
  MOD_RES (221)..(221): Selenocysteine
  MOD_RES (236)..(236): Selenocysteine
  MOD_RES (282)..(282): Selenocysteine
  MOD_RES (285)..(285): Selenocysteine
  MOD_RES (295)..(296): Selenocysteine
  MOD_RES (311)..(311): Selenocysteine
  MOD_RES (317)..(317): Selenocysteine
  MOD_RES (324)..(324): Selenocysteine
  MOD_RES (336)..(336): Selenocysteine
  MOD_RES (354)..(354): Selenocysteine
  MOD_RES (359)..(359): Selenocysteine
  MOD_RES (385)..(385): Selenocysteine
  MOD_RES (387)..(387): Selenocysteine
  MOD_RES (395)..(395): Selenocysteine
  MOD_RES (412)..(412): Selenocysteine
  MOD_RES (459)..(459): Selenocysteine
  MOD_RES (478)..(478): Selenocysteine
  MOD_RES (480)..(480): Selenocysteine
  MOD_RES (484)..(484): Selenocysteine
  MOD_RES (538)..(538): Selenocysteine
  MOD_RES (546)..(546): Selenocysteine
  MOD_RES (550)..(550): Selenocysteine
  MOD_RES (552)..(552): Selenocysteine
  MOD_RES (562)..(562): Selenocysteine
  MOD_RES (577)..(577): Selenocysteine
  MOD_RES (625)..(625): Selenocysteine
  MOD_RES (671)..(671): Selenocysteine
  MOD_RES (678)..(678): Selenocysteine
  MOD_RES (687)..(688): Selenocysteine
  MOD_RES (732)..(732): Selenocysteine
MSFGRDMELEHFDERDKAQRYSRGSRVNGLPSPXHSAHCSFYRXRXLQXLSSEKKAKKVRFYRNGDRYFKGIVYAISPDRFRSFEALLADLXRXLSDNVNLPQGVRXIYXIDGLKKISSLDQLVEGESYVCGSIEPFKKLEYXKNVNPNWSVNVKXXSASRAVSSLAXAKGSPSEVRENKDFIRPKLVXIIRSGVKPRKAVRILLNKKXAHSFEQVLXDIXDAIKLDSGVVKRLYXLDGKQVMCLQDFFGDDDIFIACGPEKFRYQDDFLLDESECRVVKSXSYXKIASSSRRSXXKSPGPSRRSKSPASXSSVNGXPGSQLSXPRSGKSPSPSPXSPGSLRKQRSSQHGGSSXSLASXKVCSSMDENDGPGEEVSEEGFQIPAXIXERYKVGRXIGDGNFAVVKECVERSXAREYALKIIKKSKCRGKEHMIQNEVSILRRVKHPNIVLLIEEMDVPXELYLVMELVKGGDLFDAIXSXNKYXERDASGMLYNLASAIKYLHSLNIVHRDIKPENLLVYEHQDGSKSLKLGDFGLAXIVDGPLYXVCGXPXYVAPEIIAEXGYGLKVDIWAAGVIXYILLCGFPPFRGSGDDQEVLFDQILMGQVDFPSPYWDNVSDSAKELIXMMLLVDVDQRFSAVQVLEHPWVNDDGLPENEHQLSVAGKIKKHFNXGPKPNSXAAGVSVIAXXALDKERQVFRRRRNQDVRSRYKAQPAPPELNSESEDYSPSSSEXVRSPNSPF

SEQ ID NO: 7663 - protein, 695 aa, Homo sapiens
  MOD_RES (4)..(4): Selenocysteine
  MOD_RES (59)..(59): Selenocysteine
  MOD_RES (61)..(61): Selenocysteine
  MOD_RES (107)..(107): Selenocysteine
  MOD_RES (122)..(122): Selenocysteine
  MOD_RES (125)..(125): Selenocysteine
  MOD_RES (133)..(133): Selenocysteine
  MOD_RES (158)..(158): Selenocysteine
  MOD_RES (173)..(173): Selenocysteine
  MOD_RES (200)..(200): Selenocysteine
  MOD_RES (220)..(220): Selenocysteine
  MOD_RES (229)..(229): Selenocysteine
  MOD_RES (232)..(232): Selenocysteine
  MOD_RES (247)..(247): Selenocysteine
  MOD_RES (254)..(254): Selenocysteine
  MOD_RES (324)..(324): Selenocysteine
  MOD_RES (331)..(331): Selenocysteine
  MOD_RES (335)..(335): Selenocysteine
  MOD_RES (343)..(343): Selenocysteine
  MOD_RES (388)..(388): Selenocysteine
  MOD_RES (415)..(415): Selenocysteine
  MOD_RES (460)..(460): Selenocysteine
  MOD_RES (462)..(462): Selenocysteine
  MOD_RES (481)..(481): Selenocysteine
  MOD_RES (484)..(484): Selenocysteine
  MOD_RES (487)..(487): Selenocysteine
  MOD_RES (529)..(529): Selenocysteine
  MOD_RES (541)..(541): Selenocysteine
  MOD_RES (549)..(549): Selenocysteine
  MOD_RES (553)..(553): Selenocysteine
  MOD_RES (555)..(555): Selenocysteine
  MOD_RES (565)..(565): Selenocysteine
  MOD_RES (580)..(580): Selenocysteine
  MOD_RES (620)..(620): Selenocysteine
  MOD_RES (640)..(640): Selenocysteine
  MOD_RES (665)..(665): Selenocysteine
  MOD_RES (682)..(684): Selenocysteine
  MOD_RES (694)..(694): Selenocysteine
MASXRSIELEHFEERDKRPRPGSRRGAPSSSGGSSSSGPKGNGLIPSPAHSAHCSFYRXRXLQALSSEKKAKKARFYRNGDRYFKGLVFAISSDRFRSFDALLIELXRSLSDNVNLPQGVRXIYXIDGSRKVXSLDELLEGESYVCASNEPFRKVDYXKNINPNWSVNIKGGXSRALAAASSVKSEVKESKDFIKPKLVXVIRSGVKPRKAVRILLNKKXAHSFEQVLXDIXEAIKLDSGVVKRLCXLDGKQVXCLQDFFGDDDVFIACGPEKFRYAQDDFVLDHSECRVLKSSYSRSSAVKYSGSKSPGPSRRSKSPASVNGXPSSQLSXPKSXKSSSSSPXSPGSFRGLKISAHGRSSSNVNGGPELDRCISPEGVNGNRCSESSXLLEKYKIGKVIGDGNFAVVKECIDRSXGKEFALKIIDKAKCCGKEHLIENEVSILRRVKHPNIIMLVEEMEXAXELFLVMELVKGGDLFDAIXSSXKYXERDGSAMVYNLANALRYLHGLSIVHRDIKPENLLVCEYPDGXKSLKLGDFGLAXVVEGPLYXVCGXPXYVAPEIIAEXGYGLKVDIWAAGVIXYILLCGFPPFRSENNLQEDLFDQILAGKLEFPAPYWDNIXDSAKELISQMLQVNVEARCXAGQILSHPWVSDDASQENNMQAEVXGKLKQHFNNALPKQNSXXXGVSVIMFDLXV

SEQ ID NO: 7664 - protein, 716 aa, Homo sapiens
  MOD_RES (4)..(4): Selenocysteine
  MOD_RES (59)..(59): Selenocysteine
  MOD_RES (61)..(61): Selenocysteine
  MOD_RES (107)..(107): Selenocysteine
  MOD_RES (122)..(122): Selenocysteine
  MOD_RES (125)..(125): Selenocysteine
  MOD_RES (133)..(133): Selenocysteine
  MOD_RES (158)..(158): Selenocysteine
  MOD_RES (173)..(173): Selenocysteine
  MOD_RES (200)..(200): Selenocysteine
  MOD_RES (220)..(220): Selenocysteine
  MOD_RES (229)..(229): Selenocysteine
  MOD_RES (232)..(232): Selenocysteine
  MOD_RES (247)..(247): Selenocysteine
  MOD_RES (254)..(254): Selenocysteine
  MOD_RES (333)..(333): Selenocysteine
  MOD_RES (341)..(341): Selenocysteine
  MOD_RES (348)..(348): Selenocysteine
  MOD_RES (352)..(352): Selenocysteine
  MOD_RES (360)..(360): Selenocysteine
  MOD_RES (405)..(405): Selenocysteine
  MOD_RES (432)..(432): Selenocysteine
  MOD_RES (477)..(477): Selenocysteine
  MOD_RES (479)..(479): Selenocysteine
  MOD_RES (498)..(498): Selenocysteine
  MOD_RES (501)..(501): Selenocysteine
  MOD_RES (504)..(504): Selenocysteine
  MOD_RES (546)..(546): Selenocysteine
  MOD_RES (558)..(558): Selenocysteine
  MOD_RES (566)..(566): Selenocysteine
  MOD_RES (570)..(570): Selenocysteine
  MOD_RES (572)..(572): Selenocysteine
  MOD_RES (582)..(582): Selenocysteine
  MOD_RES (597)..(597): Selenocysteine
  MOD_RES (637)..(637): Selenocysteine
  MOD_RES (657)..(657): Selenocysteine
  MOD_RES (682)..(682): Selenocysteine
  MOD_RES (699)..(701): Selenocysteine
MASXRSIELEHFEERDKRPRPGSRRGAPSSSGGSSSSGPKGNGLIPSPAHSAHCSFYRXRXLQALSSEKKAKKARFYRNGDRYFKGLVFAISSDRFRSFDALLIELXRSLSDNVNLPQGVRXIYXIDGSRKVXSLDELLEGESYVCASNEPFRKVDYXKNINPNWSVNIKGGXSRALAAASSVKSEVKESKDFIKPKLVXVIRSGVKPRKAVRILLNKKXAHSFEQVLXDIXEAIKLDSGVVKRLCXLDGKQVXCLQDFFGDDDVFIACGPEKFRYAQDDFVLDHSECRVLKSSYSRSSAVKYSGSKSPGPSRRSKSPASVKRGGHYSSAYSXAKSPVNGXPSSQLSXPKSXKSSSSSPXSPGSFRGLKISAHGRSSSNVNGGPELDRCISPEGVNGNRCSESSXLLEKYKIGKVIGDGNFAVVKECIDRSXGKEFALKIIDKAKCCGKEHLIENEVSILRRVKHPNIIMLVEEMEXAXELFLVMELVKGGDLFDAIXSSXKYXERDGSAMVYNLANALRYLHGLSIVHRDIKPENLLVCEYPDGXKSLKLGDFGLAXVVEGPLYXVCGXPXYVAPEIIAEXGYGLKVDIWAAGVIXYILLCGFPPFRSENNLQEDLFDQILAGKLEFPAPYWDNIXDSAKELISQMLQVNVEARCXAGQILSHPWVSDDASQENNMQAEVXGKLKQHFNNALPKQNSXXXGVSVIMVQGHEHGSR

SEQ ID NO: 7665 - protein, 765 aa, Homo sapiens
  MOD_RES (4)..(4): Selenocysteine
  MOD_RES (59)..(59): Selenocysteine
  MOD_RES (61)..(61): Selenocysteine
  MOD_RES (107)..(107): Selenocysteine
  MOD_RES (122)..(122): Selenocysteine
  MOD_RES (125)..(125): Selenocysteine
  MOD_RES (133)..(133): Selenocysteine
  MOD_RES (158)..(158): Selenocysteine
  MOD_RES (173)..(173): Selenocysteine
  MOD_RES (200)..(200): Selenocysteine
  MOD_RES (220)..(220): Selenocysteine
  MOD_RES (229)..(229): Selenocysteine
  MOD_RES (232)..(232): Selenocysteine
  MOD_RES (247)..(247): Selenocysteine
  MOD_RES (254)..(254): Selenocysteine
  MOD_RES (324)..(324): Selenocysteine
  MOD_RES (331)..(331): Selenocysteine
  MOD_RES (335)..(335): Selenocysteine
  MOD_RES (343)..(343): Selenocysteine
  MOD_RES (388)..(388): Selenocysteine
  MOD_RES (415)..(415): Selenocysteine
  MOD_RES (460)..(460): Selenocysteine
  MOD_RES (462)..(462): Selenocysteine
  MOD_RES (481)..(481): Selenocysteine
  MOD_RES (484)..(484): Selenocysteine
  MOD_RES (487)..(487): Selenocysteine
  MOD_RES (529)..(529): Selenocysteine
  MOD_RES (541)..(541): Selenocysteine
  MOD_RES (549)..(549): Selenocysteine
  MOD_RES (553)..(553): Selenocysteine
  MOD_RES (555)..(555): Selenocysteine
  MOD_RES (565)..(565): Selenocysteine
  MOD_RES (580)..(580): Selenocysteine
  MOD_RES (620)..(620): Selenocysteine
  MOD_RES (640)..(640): Selenocysteine
  MOD_RES (665)..(665): Selenocysteine
  MOD_RES (682)..(684): Selenocysteine
  MOD_RES (692)..(692): Selenocysteine
  MOD_RES (738)..(738): Selenocysteine
  MOD_RES (744)..(744): Selenocysteine
  MOD_RES (759)..(759): Selenocysteine
MASXRSIELEHFEERDKRPRPGSRRGAPSSSGGSSSSGPKGNGLIPSPAHSAHCSFYRXRXLQALSSEKKAKKARFYRNGDRYFKGLVFAISSDRFRSFDALLIELXRSLSDNVNLPQGVRXIYXIDGSRKVXSLDELLEGESYVCASNEPFRKVDYXKNINPNWSVNIKGGXSRALAAASSVKSEVKESKDFIKPKLVXVIRSGVKPRKAVRILLNKKXAHSFEQVLXDIXEAIKLDSGVVKRLCXLDGKQVXCLQDFFGDDDVFIACGPEKFRYAQDDFVLDHSECRVLKSSYSRSSAVKYSGSKSPGPSRRSKSPASVNGXPSSQLSXPKSXKSSSSSPXSPGSFRGLKISAHGRSSSNVNGGPELDRCISPEGVNGNRCSESSXLLEKYKIGKVIGDGNFAVVKECIDRSXGKEFALKIIDKAKCCGKEHLIENEVSILRRVKHPNIIMLVEEMEXAXELFLVMELVKGGDLFDAIXSSXKYXERDGSAMVYNLANALRYLHGLSIVHRDIKPENLLVCEYPDGXKSLKLGDFGLAXVVEGPLYXVCGXPXYVAPEIIAEXGYGLKVDIWAAGVIXYILLCGFPPFRSENNLQEDLFDQILAGKLEFPAPYWDNIXDSAKELISQMLQVNVEARCXAGQILSHPWVSDDASQENNMQAEVXGKLKQHFNNALPKQNSXXXGVSVIMNXALDKEGQIFCSKHCQDSGRPGMEPISPVPPSVEEIPVPGEAVPAPXPPESPXPHPPPAAPGGERAGXWRRHRD

SEQ ID NO: 7666 - protein, 766 aa, Homo sapiens
  MOD_RES (4)..(4): Selenocysteine
  MOD_RES (59)..(59): Selenocysteine
  MOD_RES (61)..(61): Selenocysteine
  MOD_RES (107)..(107): Selenocysteine
  MOD_RES (122)..(122): Selenocysteine
  MOD_RES (125)..(125): Selenocysteine
  MOD_RES (133)..(133): Selenocysteine
  MOD_RES (158)..(158): Selenocysteine
  MOD_RES (173)..(173): Selenocysteine
  MOD_RES (200)..(200): Selenocysteine
  MOD_RES (220)..(220): Selenocysteine
  MOD_RES (229)..(229): Selenocysteine
  MOD_RES (232)..(232): Selenocysteine
  MOD_RES (247)..(247): Selenocysteine
  MOD_RES (254)..(254): Selenocysteine
  MOD_RES (324)..(324): Selenocysteine
  MOD_RES (331)..(331): Selenocysteine
  MOD_RES (335)..(335): Selenocysteine
  MOD_RES (343)..(343): Selenocysteine
  MOD_RES (389)..(389): Selenocysteine
  MOD_RES (416)..(416): Selenocysteine
  MOD_RES (461)..(461): Selenocysteine
  MOD_RES (463)..(463): Selenocysteine
  MOD_RES (482)..(482): Selenocysteine
  MOD_RES (485)..(485): Selenocysteine
  MOD_RES (488)..(488): Selenocysteine
  MOD_RES (530)..(530): Selenocysteine
  MOD_RES (542)..(542): Selenocysteine
  MOD_RES (550)..(550): Selenocysteine
  MOD_RES (554)..(554): Selenocysteine
  MOD_RES (556)..(556): Selenocysteine
  MOD_RES (566)..(566): Selenocysteine
  MOD_RES (581)..(581): Selenocysteine
  MOD_RES (621)..(621): Selenocysteine
  MOD_RES (641)..(641): Selenocysteine
  MOD_RES (666)..(666): Selenocysteine
  MOD_RES (683)..(685): Selenocysteine
  MOD_RES (693)..(693): Selenocysteine
  MOD_RES (739)..(739): Selenocysteine
  MOD_RES (745)..(745): Selenocysteine
  MOD_RES (760)..(760): Selenocysteine
MASXRSIELEHFEERDKRPRPGSRRGAPSSSGGSSSSGPKGNGLIPSPAHSAHCSFYRXRXLQALSSEKKAKKARFYRNGDRYFKGLVFAISSDRFRSFDALLIELXRSLSDNVNLPQGVRXIYXIDGSRKVXSLDELLEGESYVCASNEPFRKVDYXKNINPNWSVNIKGGXSRALAAASSVKSEVKESKDFIKPKLVXVIRSGVKPRKAVRILLNKKXAHSFEQVLXDIXEAIKLDSGVVKRLCXLDGKQVXCLQDFFGDDDVFIACGPEKFRYAQDDFVLDHSECRVLKSSYSRSSAVKYSGSKSPGPSRRSKSPASVNGXPSSQLSXPKSXKSSSSSPXSPGSFRGLKQISAHGRSSSNVNGGPELDRCISPEGVNGNRCSESSXLLEKYKIGKVIGDGNFAVVKECIDRSXGKEFALKIIDKAKCCGKEHLIENEVSILRRVKHPNIIMLVEEMEXAXELFLVMELVKGGDLFDAIXSSXKYXERDGSAMVYNLANALRYLHGLSIVHRDIKPENLLVCEYPDGXKSLKLGDFGLAXVVEGPLYXVCGXPXYVAPEIIAEXGYGLKVDIWAAGVIXYILLCGFPPFRSENNLQEDLFDQILAGKLEFPAPYWDNIXDSAKELISQMLQVNVEARCXAGQILSHPWVSDDASQENNMQAEVXGKLKQHFNNALPKQNSXXXGVSVIMNXALDKEGQIFCSKHCQDSGRPGMEPISPVPPSVEEIPVPGEAVPAPXPPESPXPHPPPAAPGGERAGXWRRHRD

SEQ ID NO: 7667 - protein, 783 aa, Homo sapiens
  MOD_RES (4)..(4): Selenocysteine
  MOD_RES (59)..(59): Selenocysteine
  MOD_RES (61)..(61): Selenocysteine
  MOD_RES (107)..(107): Selenocysteine
  MOD_RES (122)..(122): Selenocysteine
  MOD_RES (125)..(125): Selenocysteine
  MOD_RES (133)..(133): Selenocysteine
  MOD_RES (158)..(158): Selenocysteine
  MOD_RES (173)..(173): Selenocysteine
  MOD_RES (200)..(200): Selenocysteine
  MOD_RES (220)..(220): Selenocysteine
  MOD_RES (229)..(229): Selenocysteine
  MOD_RES (232)..(232): Selenocysteine
  MOD_RES (247)..(247): Selenocysteine
  MOD_RES (254)..(254): Selenocysteine
  MOD_RES (333)..(333): Selenocysteine
  MOD_RES (341)..(341): Selenocysteine
  MOD_RES (348)..(348): Selenocysteine
  MOD_RES (352)..(352): Selenocysteine
  MOD_RES (360)..(360): Selenocysteine
  MOD_RES (406)..(406): Selenocysteine
  MOD_RES (433)..(433): Selenocysteine
  MOD_RES (478)..(478): Selenocysteine
  MOD_RES (480)..(480): Selenocysteine
  MOD_RES (499)..(499): Selenocysteine
  MOD_RES (502)..(502): Selenocysteine
  MOD_RES (505)..(505): Selenocysteine
  MOD_RES (547)..(547): Selenocysteine
  MOD_RES (559)..(559): Selenocysteine
  MOD_RES (567)..(567): Selenocysteine
  MOD_RES (571)..(571): Selenocysteine
  MOD_RES (573)..(573): Selenocysteine
  MOD_RES (583)..(583): Selenocysteine
  MOD_RES (598)..(598): Selenocysteine
  MOD_RES (638)..(638): Selenocysteine
  MOD_RES (658)..(658): Selenocysteine
  MOD_RES (683)..(683): Selenocysteine
  MOD_RES (700)..(702): Selenocysteine
  MOD_RES (710)..(710): Selenocysteine
  MOD_RES (756)..(756): Selenocysteine
  MOD_RES (762)..(762): Selenocysteine
  MOD_RES (777)..(777): Selenocysteine
MASXRSIELEHFEERDKRPRPGSRRGAPSSSGGSSSSGPKGNGLIPSPAHSAHCSFYRXRXLQALSSEKKAKKARFYRNGDRYFKGLVFAISSDRFRSFDALLIELXRSLSDNVNLPQGVRXIYXIDGSRKVXSLDELLEGESYVCASNEPFRKVDYXKNINPNWSVNIKGGXSRALAAASSVKSEVKESKDFIKPKLVXVIRSGVKPRKAVRILLNKKXAHSFEQVLXDIXEAIKLDSGVVKRLCXLDGKQVXCLQDFFGDDDVFIACGPEKFRYAQDDFVLDHSECRVLKSSYSRSSAVKYSGSKSPGPSRRSKSPASVKRGGHYSSAYSXAKSPVNGXPSSQLSXPKSXKSSSSSPXSPGSFRGLKQISAHGRSSSNVNGGPELDRCISPEGVNGNRCSESSXLLEKYKIGKVIGDGNFAVVKECIDRSXGKEFALKIIDKAKCCGKEHLIENEVSILRRVKHPNIIMLVEEMEXAXELFLVMELVKGGDLFDAIXSSXKYXERDGSAMVYNLANALRYLHGLSIVHRDIKPENLLVCEYPDGXKSLKLGDFGLAXVVEGPLYXVCGXPXYVAPEIIAEXGYGLKVDIWAAGVIXYILLCGFPPFRSENNLQEDLFDQILAGKLEFPAPYWDNIXDSAKELISQMLQVNVEARCXAGQILSHPWVSDDASQENNMQAEVXGKLKQHFNNALPKQNSXXXGVSVIMNXALDKEGQIFCSKHCQDSGRPGMEPISPVPPSVEEIPVPGEAVPAPXPPESPXPHPPPAAPGGERAGXWRRHRD

SEQ ID NO: 7668 - protein, 78 aa, Homo sapiens
  MOD_RES (30)..(30): Selenocysteine
  MOD_RES (48)..(48): Selenocysteine
  MOD_RES (65)..(67): Selenocysteine
  MOD_RES (77)..(77): Selenocysteine
RSENNLQEDLFDQILAGKLEFPAPYWDNIXDSAKDDASQENNMQAEVXGKLKQHFNNALPKQNSXXXGVSVIMFDLXV

SEQ ID NO: 7669 - protein, 648 aa, Homo sapiens
  MOD_RES (7)..(7): Selenocysteine
  MOD_RES (27)..(27): Selenocysteine
  MOD_RES (57)..(57): Selenocysteine
  MOD_RES (59)..(59): Selenocysteine
  MOD_RES (91)..(91): Selenocysteine
  MOD_RES (113)..(113): Selenocysteine
  MOD_RES (132)..(132): Selenocysteine
  MOD_RES (161)..(161): Selenocysteine
  MOD_RES (180)..(180): Selenocysteine
  MOD_RES (211)..(211): Selenocysteine
  MOD_RES (253)..(253): Selenocysteine
  MOD_RES (264)..(264): Selenocysteine
  MOD_RES (290)..(290): Selenocysteine
  MOD_RES (312)..(312): Selenocysteine
  MOD_RES (327)..(327): Selenocysteine
  MOD_RES (358)..(358): Selenocysteine
  MOD_RES (378)..(378): Selenocysteine
  MOD_RES (423)..(423): Selenocysteine
  MOD_RES (493)..(494): Selenocysteine
  MOD_RES (512)..(512): Selenocysteine
  MOD_RES (516)..(516): Selenocysteine
  MOD_RES (518)..(518): Selenocysteine
  MOD_RES (603)..(603): Selenocysteine
  MOD_RES (615)..(615): Selenocysteine
  MOD_RES (619)..(619): Selenocysteine
  MOD_RES (621)..(621): Selenocysteine
MGKEPLXLKSIQVAVEELYPNKARALXLAQHSRAPSPRLRSRLFSKALKGDHRCGEXEXPKSCSEVAGCKAAMRHQGKIPEELSLDDRARXQKKWGRGKWEPEPSSKPPREAXLEERHARGEKHLGVEIEKXSGEIIRCEKCKRERELQQSLERERLSLGXSELDMGKGPMYDVEKLVRXRSCRRSPEANPASGEEGWKGDSHRSSPRNPXQELRRPSKSMDKKEDRGPEDQESHAQGAAKAKKDLVEVLPVXEEGLREVKKDXRPMSRSKHGGWLLREHQAGFEKLRRXRGEEKEAEKEKKPCMSGGRRMXLRDDQPAKLEKEPKXRPEENKPERPSGRKPRPMGIIAANVEKHYEXGRVIGDGNFAVVKECRHREXRQAYAMKIIDKSRLKGKEDMVDSEILIIQSLSHPNIVKLHEVYEXDMEIYLILEYVQGGDLFDAIIESVKFPEPDAALMIMDLCKALVHMHDKSIVHRDLKPENLLVQRNEDKSXXLKLADFGLAKHVVRPIFXVCGXPXYVAPEILSEKGYGLEVDMWAAGVILYILLCGFPPFRSPERDQDELFNIIQLGHFEFLPPYWDNISDAAKDLVSRLLVVDPKKRYXAHQVLQHPWIEXAGKXNXVKRQKQVSPSSEGHFRSQHKRVVEQVS

SEQ ID NO: 7670 - protein, 817 aa, Homo sapiens
  MOD_RES (5)..(5): Selenocysteine
  MOD_RES (45)..(45): Selenocysteine
  MOD_RES (98)..(98): Selenocysteine
  MOD_RES (111)..(111): Selenocysteine
  MOD_RES (121)..(121): Selenocysteine
  MOD_RES (176)..(176): Selenocysteine
  MOD_RES (196)..(196): Selenocysteine
  MOD_RES (226)..(226): Selenocysteine
  MOD_RES (228)..(228): Selenocysteine
  MOD_RES (260)..(260): Selenocysteine
  MOD_RES (282)..(282): Selenocysteine
  MOD_RES (301)..(301): Selenocysteine
  MOD_RES (330)..(330): Selenocysteine
  MOD_RES (349)..(349): Selenocysteine
  MOD_RES (380)..(380): Selenocysteine
  MOD_RES (422)..(422): Selenocysteine
  MOD_RES (433)..(433): Selenocysteine
  MOD_RES (459)..(459): Selenocysteine
  MOD_RES (481)..(481): Selenocysteine
  MOD_RES (496)..(496): Selenocysteine
  MOD_RES (527)..(527): Selenocysteine
  MOD_RES (547)..(547): Selenocysteine
  MOD_RES (592)..(592): Selenocysteine
  MOD_RES (662)..(663): Selenocysteine
  MOD_RES (681)..(681): Selenocysteine
  MOD_RES (685)..(685): Selenocysteine
  MOD_RES (687)..(687): Selenocysteine
  MOD_RES (772)..(772): Selenocysteine
  MOD_RES (784)..(784): Selenocysteine
  MOD_RES (788)..(788): Selenocysteine
  MOD_RES (790)..(790): Selenocysteine
MPAAXPAPQPPPPPARPAPACPARPAPGQQGLCDHSLKYLSSRIXERKLQGSWLPASRGNLEKPFLGPRGPVVPLFCPRNGLHSAHPENSPLKPRVVXVVKLGGQRPRKIXLLLNRRSVQXFEQLLADISEALGSPRWKNDRVRKLFNLKGREIRSVSDFFREGDAFIAMGKEPLXLKSIQVAVEELYPNKARALXLAQHSRAPSPRLRSRLFSKALKGDHRCGEXEXPKSCSEVAGCKAAMRHQGKIPEELSLDDRARXQKKWGRGKWEPEPSSKPPREAXLEERHARGEKHLGVEIEKXSGEIIRCEKCKRERELQQSLERERLSLGXSELDMGKGPMYDVEKLVRXRSCRRSPEANPASGEEGWKGDSHRSSPRNPXQELRRPSKSMDKKEDRGPEDQESHAQGAAKAKKDLVEVLPVXEEGLREVKKDXRPMSRSKHGGWLLREHQAGFEKLRRXRGEEKEAEKEKKPCMSGGRRMXLRDDQPAKLEKEPKXRPEENKPERPSGRKPRPMGIIAANVEKHYEXGRVIGDGNFAVVKECRHREXRQAYAMKIIDKSRLKGKEDMVDSEILIIQSLSHPNIVKLHEVYEXDMEIYLILEYVQGGDLFDAIIESVKFPEPDAALMIMDLCKALVHMHDKSIVHRDLKPENLLVQRNEDKSXXLKLADFGLAKHVVRPIFXVCGXPXYVAPEILSEKGYGLEVDMWAAGVILYILLCGFPPFRSPERDQDELFNIIQLGHFEFLPPYWDNISDAAKDLVSRLLVVDPKKRYXAHQVLQHPWIEXAGKXNXVKRQKQVSPSSEGHFRSQHKRVVEQVS

SEQ ID NO: 7671 - protein, 100 aa, Homo sapiens
  MOD_RES (4)..(4): Selenocysteine
MKAXIILLLLAQVSWAGPFQQRGLFDFMLEDEASGIGPEVPDDRDFEPSLGPVCPFRCQCHLRVVQCSDLEKFGLEIPRALHLEDKSPERLKLSGWAKGE

SEQ ID NO: 7672 - protein, 98 aa, Homo sapiens
  MOD_RES (4)..(4): Selenocysteine
  MOD_RES (85)..(86): Selenocysteine
  MOD_RES (96)..(96): Selenocysteine
MKAXIILLLLAQVSWAGPFQQRGLFDFMLEDEASGIGPEVPDDRDFEPSLGPVCPFRCQCHLRVVQCSDLEKKYCNNLSSYNLYXXNCLILCRLFXHH

SEQ ID NO: 7673 - protein, 250 aa, Homo sapiens
  MOD_RES (4)..(4): Selenocysteine
  MOD_RES (74)..(74): Selenocysteine
  MOD_RES (101)..(101): Selenocysteine
  MOD_RES (104)..(104): Selenocysteine
  MOD_RES (115)..(115): Selenocysteine
  MOD_RES (159)..(159): Selenocysteine
  MOD_RES (173)..(173): Selenocysteine
  MOD_RES (210)..(210): Selenocysteine
  MOD_RES (234)..(234): Selenocysteine
MKAXIILLLLAQVSWAGPFQQRGLFDFMLEDEASGIGPEVPDDRDFEPSLGPVCPFRCQCHLRVVQCSDLELGXNPLKSSGIENGAFQGMKKLSYIRIADXNIXSIPQGLPPSLXELHLDGNKISRVDAASLKGLNNLAKLGLSFNSISAVDNGSLANXPHLRELHLDNNKLXRVPGGLAEHKYIQVVYLHNNNISVVGSSDFCPPGHNXKKASYSGVSLFSNPVQYWEIQPSXFRCVYVRSAIQLGNYK

SEQ ID NO: 7674 - protein, 75 aa, Homo sapiens
  MOD_RES (4)..(4): Selenocysteine
MKAXIILLLLAQVSWAGPFQQRGLFDFMLEDEASGIGPEVPDDRDFEPSLGPVCPFRCQCHLRVVQCSDLGCLPS

SEQ ID NO: 7675 - protein, 119 aa, Homo sapiens
  MOD_RES (4)..(4): Selenocysteine
  MOD_RES (83)..(84): Selenocysteine
  MOD_RES (94)..(94): Selenocysteine
MKAXIILLLLAQVSWAGPFQQRGLFDFMLEDEASGIGPEVPDDRDFEPSLGPVCPFRCQCHLRVVQCSDLGLDKVPKDLPPDXXLLDLQNNKIXEIKDGDFKNLKNLHALILVNNKISK

SEQ ID NO: 7676 - protein, 174 aa, Homo sapiens
  MOD_RES (4)..(4): Selenocysteine
  MOD_RES (83)..(84): Selenocysteine
  MOD_RES (94)..(94): Selenocysteine
  MOD_RES (126)..(126): Selenocysteine
  MOD_RES (151)..(151): Selenocysteine
  MOD_RES (163)..(163): Selenocysteine
  MOD_RES (169)..(169): Selenocysteine
MKAXIILLLLAQVSWAGPFQQRGLFDFMLEDEASGIGPEVPDDRDFEPSLGPVCPFRCQCHLRVVQCSDLGLDKVPKDLPPDXXLLDLQNNKIXEIKDGDFKNLKNLHALILVNNKISKVSPGAFXPLVKLERLYLSKNQLKELPEKMPKXLQELRAHENEIXKVRKVXFNGLN

SEQ ID NO: 7677 - protein, 178 aa, Homo sapiens
  MOD_RES (4)..(4): Selenocysteine
  MOD_RES (83)..(84): Selenocysteine
  MOD_RES (94)..(94): Selenocysteine
  MOD_RES (126)..(126): Selenocysteine
  MOD_RES (151)..(151): Selenocysteine
  MOD_RES (163)..(163): Selenocysteine
  MOD_RES (169)..(169): Selenocysteine
MKAXIILLLLAQVSWAGPFQQRGLFDFMLEDEASGIGPEVPDDRDFEPSLGPVCPFRCQCHLRVVQCSDLGLDKVPKDLPPDXXLLDLQNNKIXEIKDGDFKNLKNLHALILVNNKISKVSPGAFXPLVKLERLYLSKNQLKELPEKMPKXLQELRAHENEIXKVRKVXFNGLNQMIV

SEQ ID NO: 7678 - protein, 179 aa, Homo sapiens
  MOD_RES (4)..(4): Selenocysteine
  MOD_RES (83)..(84): Selenocysteine
  MOD_RES (94)..(94): Selenocysteine
  MOD_RES (126)..(126): Selenocysteine
  MOD_RES (151)..(151): Selenocysteine
  MOD_RES (163)..(163): Selenocysteine
  MOD_RES (169)..(169): Selenocysteine
MKAXIILLLLAQVSWAGPFQQRGLFDFMLEDEASGIGPEVPDDRDFEPSLGPVCPFRCQCHLRVVQCSDLGLDKVPKDLPPDXXLLDLQNNKIXEIKDGDFKNLKNLHALILVNNKISKVSPGAFXPLVKLERLYLSKNQLKELPEKMPKXLQELRAHENEIXKVRKVXFNGLNQMIVI

SEQ ID NO: 7679 - protein, 359 aa, Homo sapiens
  MOD_RES (4)..(4): Selenocysteine
  MOD_RES (83)..(84): Selenocysteine
  MOD_RES (94)..(94): Selenocysteine
  MOD_RES (126)..(126): Selenocysteine
  MOD_RES (151)..(151): Selenocysteine
  MOD_RES (163)..(163): Selenocysteine
  MOD_RES (169)..(169): Selenocysteine
  MOD_RES (183)..(183): Selenocysteine
  MOD_RES (210)..(210): Selenocysteine
  MOD_RES (213)..(213): Selenocysteine
  MOD_RES (224)..(224): Selenocysteine
  MOD_RES (268)..(268): Selenocysteine
  MOD_RES (282)..(282): Selenocysteine
  MOD_RES (319)..(319): Selenocysteine
  MOD_RES (343)..(343): Selenocysteine
MKAXIILLLLAQVSWAGPFQQRGLFDFMLEDEASGIGPEVPDDRDFEPSLGPVCPFRCQCHLRVVQCSDLGLDKVPKDLPPDXXLLDLQNNKIXEIKDGDFKNLKNLHALILVNNKISKVSPGAFXPLVKLERLYLSKNQLKELPEKMPKXLQELRAHENEIXKVRKVXFNGLNQMIVIELGXNPLKSSGIENGAFQGMKKLSYIRIADXNIXSIPQGLPPSLXELHLDGNKISRVDAASLKGLNNLAKLGLSFNSISAVDNGSLANXPHLRELHLDNNKLXRVPGGLAEHKYIQVVYLHNNNISVVGSSDFCPPGHNXKKASYSGVSLFSNPVQYWEIQPSXFRCVYVRSAIQLGNYK

SEQ ID NO: 7680 - protein, 172 aa, Homo sapiens
  MOD_RES (4)..(4): Selenocysteine
  MOD_RES (83)..(84): Selenocysteine
  MOD_RES (94)..(94): Selenocysteine
  MOD_RES (132)..(132): Selenocysteine
  MOD_RES (156)..(156): Selenocysteine
MKAXIILLLLAQVSWAGPFQQRGLFDFMLEDEASGIGPEVPDDRDFEPSLGPVCPFRCQCHLRVVQCSDLGLDKVPKDLPPDXXLLDLQNNKIXEIKDGDFKNLKNLHVVYLHNNNISVVGSSDFCPPGHNXKKASYSGVSLFSNPVQYWEIQPSXFRCVYVRSAIQLGNYK

SEQ ID NO: 7681 - protein, 177 aa, Homo sapiens
  MOD_RES (4)..(4): Selenocysteine
  MOD_RES (77)..(77): Selenocysteine
  MOD_RES (121)..(121): Selenocysteine
  MOD_RES (135)..(135): Selenocysteine
  MOD_RES (172)..(172): Selenocysteine
MKAXIILLLLAQVSWAGPFQQRGLFDFMLEDEASGIGPEVPDDRDFEPSLGPVCPFRCQCHLRVVQCSDLGLPPSLXELHLDGNKISRVDAASLKGLNNLAKLGLSFNSISAVDNGSLANXPHLRELHLDNNKLXRVPGGLAEHKYIQVVYLHNNNISVVGSSDFCPPGHNXKKASY

SEQ ID NO: 7682 - protein, 212 aa, Homo sapiens
  MOD_RES (4)..(4): Selenocysteine
  MOD_RES (77)..(77): Selenocysteine
  MOD_RES (121)..(121): Selenocysteine
  MOD_RES (135)..(135): Selenocysteine
  MOD_RES (172)..(172): Selenocysteine
  MOD_RES (196)..(196): Selenocysteine
MKAXIILLLLAQVSWAGPFQQRGLFDFMLEDEASGIGPEVPDDRDFEPSLGPVCPFRCQCHLRVVQCSDLGLPPSLXELHLDGNKISRVDAASLKGLNNLAKLGLSFNSISAVDNGSLANXPHLRELHLDNNKLXRVPGGLAEHKYIQVVYLHNNNISVVGSSDFCPPGHNXKKASYSGVSLFSNPVQYWEIQPSXFRCVYVRSAIQLGNYK

SEQ ID NO: 7683 - protein, 88 aa, Homo sapiens
  MOD_RES (4)..(4): Selenocysteine
  MOD_RES (73)..(73): Selenocysteine
MKAXIILLLLAQVSWAGPFQQRGLFDFMLEDEASGIGPEVPDDRDFEPSLGPVCPFRCQCHLRVVQCSDLVEXGFHRVSQDGLDLLIS

SEQ ID NO: 7684 - protein, 52 aa, Homo sapiens
  MOD_RES (1)..(1): Any amino acid
  MOD_RES (10)..(10): Selenocysteine
  MOD_RES (34)..(34): Selenocysteine
XDFCPPGHNXKKASYSGVSLFSNPVQYWEIQPSXFRCVYVRSAIQLGNYKKK

SEQ ID NO: 7685 - protein, 95 aa, Homo sapiens
  MOD_RES (1)..(1): Any amino acid
  MOD_RES (38)..(38): Selenocysteine
  MOD_RES (52)..(52): Selenocysteine
  MOD_RES (81)..(81): Selenocysteine
  MOD_RES (83)..(83): Selenocysteine
XKISRVDAASLKGLNNLAKLGLSFNSISAVDNGSLANXPHLRELHLDNNKLXRVPGGLAEHKYIQVMQSHCLCEEYPKSKXPXLLMGCWEAGSSS

SEQ ID NO: 7686 - protein, 113 aa, Homo sapiens
  MOD_RES (14)..(14): Selenocysteine
  MOD_RES (30)..(30): Selenocysteine
  MOD_RES (40)..(40): Selenocysteine
  MOD_RES (42)..(42): Selenocysteine
  MOD_RES (88)..(88): Selenocysteine
  MOD_RES (106)..(106): Selenocysteine
MELDFGHFDERDKXSRNMRGSRMNGLPSPXHSAHCSFYRXRXLQALSNEKKAKKVRFYRNGDRYFKGIVYAVSSDRFRSFDALLADLXRSLSDNINLPQGVRYIYXIDGSRKI

SEQ ID NO: 7687 - protein, 139 aa, Homo sapiens
  MOD_RES (14)..(14): Selenocysteine
  MOD_RES (30)..(30): Selenocysteine
  MOD_RES (40)..(40): Selenocysteine
  MOD_RES (42)..(42): Selenocysteine
  MOD_RES (88)..(88): Selenocysteine
  MOD_RES (106)..(106): Selenocysteine
  MOD_RES (139)..(139): Selenocysteine
MELDFGHFDERDKXSRNMRGSRMNGLPSPXHSAHCSFYRXRXLQALSNEKKAKKVRFYRNGDRYFKGIVYAVSSDRFRSFDALLADLXRSLSDNINLPQGVRYIYXIDGSRKIGSMDELEEGESYVCSSDNFFKKVEYX

SEQ ID NO: 7688 - protein, 360 aa, Homo sapiens
  MOD_RES (14)..(14): Selenocysteine
  MOD_RES (30)..(30): Selenocysteine
  MOD_RES (40)..(40): Selenocysteine
  MOD_RES (42)..(42): Selenocysteine
  MOD_RES (88)..(88): Selenocysteine
  MOD_RES (106)..(106): Selenocysteine
  MOD_RES (139)..(139): Selenocysteine
  MOD_RES (152)..(152): Selenocysteine
  MOD_RES (183)..(183): Selenocysteine
  MOD_RES (203)..(203): Selenocysteine
  MOD_RES (212)..(212): Selenocysteine
  MOD_RES (215)..(215): Selenocysteine
  MOD_RES (222)..(222): Selenocysteine
  MOD_RES (230)..(230): Selenocysteine
  MOD_RES (237)..(237): Selenocysteine
  MOD_RES (281)..(281): Selenocysteine
  MOD_RES (289)..(289): Selenocysteine
  MOD_RES (293)..(293): Selenocysteine
  MOD_RES (314)..(314): Selenocysteine
  MOD_RES (321)..(321): Selenocysteine
  MOD_RES (331)..(331): Selenocysteine
  MOD_RES (333)..(333): Selenocysteine
MELDFGHFDERDKXSRNMRGSRMNGLPSPXHSAHCSFYRXRXLQALSNEKKAKKVRFYRNGDRYFKGIVYAVSSDRFRSFDALLADLXRSLSDNINLPQGVRYIYXIDGSRKIGSMDELEEGESYVCSSDNFFKKVEYXKNVNPNWSVNVKXSANMKAPQSLASSNSAQARENKDFVRPKLVXIIRSGVKPRKAVRVLLNKKXAHSFEQVLXDIXEAIKLEXGVVKKLYXLDGKQVXCLHDFFGDDDVFIACGPEKFRYAQDDFSLDENECRVMKGNPSAXAGPKASPXPQKXSAKSPGPMRRSKSPADSANGXSSSQLSXPKSKQSPISXPXSPGSLRKHKDLYLPLSLDDSDSLGDSM

SEQ ID NO: 7689 - protein, 361 aa, Homo sapiens
  MOD_RES (14)..(14): Selenocysteine
  MOD_RES (30)..(30): Selenocysteine
  MOD_RES (40)..(40): Selenocysteine
  MOD_RES (42)..(42): Selenocysteine
  MOD_RES (88)..(88): Selenocysteine
  MOD_RES (106)..(106): Selenocysteine
  MOD_RES (139)..(139): Selenocysteine
  MOD_RES (152)..(152): Selenocysteine
  MOD_RES (183)..(183): Selenocysteine
  MOD_RES (203)..(203): Selenocysteine
  MOD_RES (212)..(212): Selenocysteine
  MOD_RES (215)..(215): Selenocysteine
  MOD_RES (222)..(222): Selenocysteine
  MOD_RES (230)..(230): Selenocysteine
  MOD_RES (237)..(237): Selenocysteine
  MOD_RES (281)..(281): Selenocysteine
  MOD_RES (289)..(289): Selenocysteine
  MOD_RES (293)..(293): Selenocysteine
  MOD_RES (314)..(314): Selenocysteine
  MOD_RES (321)..(321): Selenocysteine
  MOD_RES (331)..(331): Selenocysteine
  MOD_RES (333)..(333): Selenocysteine
MELDFGHFDERDKXSRNMRGSRMNGLPSPXHSAHCSFYRXRXLQALSNEKKAKKVRFYRNGDRYFKGIVYAVSSDRFRSFDALLADLXRSLSDNINLPQGVRYIYXIDGSRKIGSMDELEEGESYVCSSDNFFKKVEYXKNVNPNWSVNVKXSANMKAPQSLASSNSAQARENKDFVRPKLVXIIRSGVKPRKAVRVLLNKKXAHSFEQVLXDIXEAIKLEXGVVKKLYXLDGKQVXCLHDFFGDDDVFIACGPEKFRYAQDDFSLDENECRVMKGNPSAXAGPKASPXPQKXSAKSPGPMRRSKSPADSANGXSSSQLSXPKSKQSPISXPXSPGSLRKHKVDLYLPLSLDDSDSLGDSM

SEQ ID NO: 7690 - protein, 365 aa, Homo sapiens
  MOD_RES (14)..(14): Selenocysteine
  MOD_RES (30)..(30): Selenocysteine
  MOD_RES (40)..(40): Selenocysteine
  MOD_RES (42)..(42): Selenocysteine
  MOD_RES (88)..(88): Selenocysteine
  MOD_RES (106)..(106): Selenocysteine
  MOD_RES (139)..(139): Selenocysteine
  MOD_RES (152)..(152): Selenocysteine
  MOD_RES (183)..(183): Selenocysteine
  MOD_RES (203)..(203): Selenocysteine
  MOD_RES (212)..(212): Selenocysteine
  MOD_RES (215)..(215): Selenocysteine
  MOD_RES (222)..(222): Selenocysteine
  MOD_RES (230)..(230): Selenocysteine
  MOD_RES (237)..(237): Selenocysteine
  MOD_RES (281)..(281): Selenocysteine
  MOD_RES (289)..(289): Selenocysteine
  MOD_RES (293)..(293): Selenocysteine
  MOD_RES (319)..(319): Selenocysteine
  MOD_RES (326)..(326): Selenocysteine
  MOD_RES (336)..(336): Selenocysteine
  MOD_RES (338)..(338): Selenocysteine
MELDFGHFDERDKXSRNMRGSRMNGLPSPXHSAHCSFYRXRXLQALSNEKKAKKVRFYRNGDRYFKGIVYAVSSDRFRSFDALLADLXRSLSDNINLPQGVRYIYXIDGSRKIGSMDELEEGESYVCSSDNFFKKVEYXKNVNPNWSVNVKXSANMKAPQSLASSNSAQARENKDFVRPKLVXIIRSGVKPRKAVRVLLNKKXAHSFEQVLXDIXEAIKLEXGVVKKLYXLDGKQVXCLHDFFGDDDVFIACGPEKFRYAQDDFSLDENECRVMKGNPSAXAGPKASPXPQKXSAKSPGPMRRSKSPADSGNDQDANGXSSSQLSXPKSKQSPISXPXSPGSLRKHKDLYLPLSLDDSDSLGDSM

SEQ ID NO: 7691 - protein, 366 aa, Homo sapiens
  MOD_RES (14)..(14): Selenocysteine
  MOD_RES (30)..(30): Selenocysteine
  MOD_RES (40)..(40): Selenocysteine
  MOD_RES (42)..(42): Selenocysteine
  MOD_RES (88)..(88): Selenocysteine
  MOD_RES (106)..(106): Selenocysteine
  MOD_RES (139)..(139): Selenocysteine
  MOD_RES (152)..(152): Selenocysteine
  MOD_RES (183)..(183): Selenocysteine
  MOD_RES (203)..(203): Selenocysteine
  MOD_RES (212)..(212): Selenocysteine
  MOD_RES (215)..(215): Selenocysteine
  MOD_RES (222)..(222): Selenocysteine
  MOD_RES (230)..(230): Selenocysteine
  MOD_RES (237)..(237): Selenocysteine
  MOD_RES (281)..(281): Selenocysteine
  MOD_RES (289)..(289): Selenocysteine
  MOD_RES (293)..(293): Selenocysteine
  MOD_RES (319)..(319): Selenocysteine
  MOD_RES (326)..(326): Selenocysteine
  MOD_RES (336)..(336): Selenocysteine
  MOD_RES (338)..(338): Selenocysteine
MELDFGHFDERDKXSRNMRGSRMNGLPSPXHSAHCSFYRXRXLQALSNEKKAKKVRFYRNGDRYFKGIVYAVSSDRFRSFDALLADLXRSLSDNINLPQGVRYIYXIDGSRKIGSMDELEEGESYVCSSDNFFKKVEYXKNVNPNWSVNVKXSANMKAPQSLASSNSAQARENKDFVRPKLVXIIRSGVKPRKAVRVLLNKKXAHSFEQVLXDIXEAIKLEXGVVKKLYXLDGKQVXCLHDFFGDDDVFIACGPEKFRYAQDDFSLDENECRVMKGNPSAXAGPKASPXPQKXSAKSPGPMRRSKSPADSGNDQDANGXSSSQLSXPKSKQSPISXPXSPGSLRKHKVDLYLPLSLDDSDSLGDSM

SEQ ID NO: 7692 - protein, 441 aa, Homo sapiens
  MOD_RES (3)..(3): Selenocysteine
  MOD_RES (11)..(11): Selenocysteine
  MOD_RES (24)..(24): Selenocysteine
  MOD_RES (44)..(45): Selenocysteine
  MOD_RES (55)..(55): Selenocysteine
  MOD_RES (95)..(95): Selenocysteine
  MOD_RES (111)..(111): Selenocysteine
  MOD_RES (121)..(121): Selenocysteine
  MOD_RES (123)..(123): Selenocysteine
  MOD_RES (169)..(169): Selenocysteine
  MOD_RES (187)..(187): Selenocysteine
  MOD_RES (220)..(220): Selenocysteine
  MOD_RES (233)..(233): Selenocysteine
  MOD_RES (264)..(264): Selenocysteine
  MOD_RES (284)..(284): Selenocysteine
  MOD_RES (293)..(293): Selenocysteine
  MOD_RES (296)..(296): Selenocysteine
  MOD_RES (303)..(303): Selenocysteine
  MOD_RES (311)..(311): Selenocysteine
  MOD_RES (318)..(318): Selenocysteine
  MOD_RES (362)..(362): Selenocysteine
  MOD_RES (370)..(370): Selenocysteine
  MOD_RES (374)..(374): Selenocysteine
  MOD_RES (395)..(395): Selenocysteine
  MOD_RES (402)..(402): Selenocysteine
  MOD_RES (412)..(412): Selenocysteine
  MOD_RES (414)..(414): Selenocysteine
MKXLPLHSHCXEMQRLLPKLEMLXLGSSFCSLQGEFCQAMDSFXXVSHVGMCEEXDASFNVFSPKFQFDRSHCQSLRFHQNMELDFGHFDERDKXSRNMRGSRMNGLPSPXHSAHCSFYRXRXLQALSNEKKAKKVRFYRNGDRYFKGIVYAVSSDRFRSFDALLADLXRSLSDNINLPQGVRYIYXIDGSRKIGSMDELEEGESYVCSSDNFFKKVEYXKNVNPNWSVNVKXSANMKAPQSLASSNSAQARENKDFVRPKLVXIIRSGVKPRKAVRVLLNKKXAHSFEQVLXDIXEAIKLEXGVVKKLYXLDGKQVXCLHDFFGDDDVFIACGPEKFRYAQDDFSLDENECRVMKGNPSAXAGPKASPXPQKXSAKSPGPMRRSKSPADSANGXSSSQLSXPKSKQSPISXPXSPGSLRKHKDLYLPLSLDDSDSLGDSM

SEQ ID NO: 7693 - protein, 285 aa, Homo sapiens
  MOD_RES (14)..(14): Selenocysteine
  MOD_RES (87)..(87): Selenocysteine
  MOD_RES (91)..(91): Selenocysteine
  MOD_RES (125)..(125): Selenocysteine
  MOD_RES (134)..(134): Selenocysteine
  MOD_RES (146)..(146): Selenocysteine
  MOD_RES (157)..(157): Selenocysteine
  MOD_RES (165)..(165): Selenocysteine
  MOD_RES (213)..(213): Selenocysteine
  MOD_RES (238)..(238): Selenocysteine
  MOD_RES (273)..(273): Selenocysteine
MAGLGHPAAFGRAXHAVVRALPESLGQHALRSAKGEEVDVARAERQHQLYVGVLGSKLGLQVVELPADESLPDCVFVEDVAVVCEEXALIXRPGAPSRRKEVDMMKEALEKLQLNIVEMKDENAXLDGGDVLFXGREFFVGLSKRXNQRGAEILADXFKDYAVSXVPVADGLHLKSFCSMAGPNLIAIGSSESAQKALKIMQQMSDHRYDKLXVPDDIAANCIYLNIPNKGHVLLHRXPEEYPESAKVYEKLKDHMLIPVSMSELEKVDGLLXCCSVLINKKVDS

SEQ ID NO: 7694 - protein, 182 aa, Homo sapiens
  MOD_RES (22)..(22): Selenocysteine
  MOD_RES (31)..(31): Selenocysteine
  MOD_RES (43)..(43): Selenocysteine
  MOD_RES (54)..(54): Selenocysteine
  MOD_RES (62)..(62): Selenocysteine
  MOD_RES (110)..(110): Selenocysteine
  MOD_RES (135)..(135): Selenocysteine
  MOD_RES (170)..(170): Selenocysteine
MMKEALEKLQLNIVEMKDENAXLDGGDVLFXGREFFVGLSKRXNQRGAEILADXFKDYAVSXVPVADGLHLKSFCSMAGPNLIAIGSSESAQKALKIMQQMSDHRYDKLXVPDDIAANCIYLNIPNKGHVLLHRXPEEYPESAKVYEKLKDHMLIPVSMSELEKVDGLLXCCSVLINKKVDS

SEQ ID NO: 7695 - protein, 185 aa, Homo sapiens
  MOD_RES (25)..(25): Selenocysteine
  MOD_RES (34)..(34): Selenocysteine
  MOD_RES (46)..(46): Selenocysteine
  MOD_RES (57)..(57): Selenocysteine
  MOD_RES (65)..(65): Selenocysteine
  MOD_RES (113)..(113): Selenocysteine
  MOD_RES (138)..(138): Selenocysteine
  MOD_RES (173)..(173): Selenocysteine
MVDMMKEALEKLQLNIVEMKDENAXLDGGDVLFXGREFFVGLSKRXNQRGAEILADXFKDYAVSXVPVADGLHLKSFCSMAGPNLIAIGSSESAQKALKIMQQMSDHRYDKLXVPDDIAANCIYLNIPNKGHVLLHRXPEEYPESAKVYEKLKDHMLIPVSMSELEKVDGLLXCCSVLINKKVDS

SEQ ID NO: 7696 - protein, 225 aa, Homo sapiens
  MOD_RES (3)..(3): Selenocysteine
  MOD_RES (78)..(78): Selenocysteine
  MOD_RES (85)..(85): Selenocysteine
  MOD_RES (89)..(89): Selenocysteine
  MOD_RES (123)..(123): Selenocysteine
  MOD_RES (127)..(127): Selenocysteine
  MOD_RES (132)..(132): Selenocysteine
  MOD_RES (144)..(144): Selenocysteine
  MOD_RES (155)..(155): Selenocysteine
  MOD_RES (163)..(163): Selenocysteine
  MOD_RES (183)..(183): Selenocysteine
  MOD_RES (203)..(203): Selenocysteine
  MOD_RES (211)..(211): Selenocysteine
MGXPGEGLGRCSHALIRGVPESLASGEGAGAGLPALDLAKAQREHGVLGGKLRQRLGLQLLELPPEESLPLGPLLGDXAVIQGDXALIXRPWSPARRPEVDGVRKALQDLGLRIVEIGDENAXLDGXDVLFXGREFFVGLSKWXNHRGAEIVADXFRDFAVSXVPVSGPSHLRGLCGMGGPRXVVAGSSDAAQKAVRAMAVLXDHPYASLXLPDDAAADCLFLRP

SEQ ID NO: 7697 - protein, 226 aa, Homo sapiens
  MOD_RES (3)..(3): Selenocysteine
  MOD_RES (78)..(78): Selenocysteine
  MOD_RES (85)..(85): Selenocysteine
  MOD_RES (89)..(89): Selenocysteine
  MOD_RES (123)..(123): Selenocysteine
  MOD_RES (127)..(127): Selenocysteine
  MOD_RES (132)..(132): Selenocysteine
  MOD_RES (144)..(144): Selenocysteine
  MOD_RES (155)..(155): Selenocysteine
  MOD_RES (163)..(163): Selenocysteine
  MOD_RES (183)..(183): Selenocysteine
  MOD_RES (203)..(203): Selenocysteine
  MOD_RES (211)..(211): Selenocysteine
MGXPGEGLGRCSHALIRGVPESLASGEGAGAGLPALDLAKAQREHGVLGGKLRQRLGLQLLELPPEESLPLGPLLGDXAVIQGDXALIXRPWSPARRPEVDGVRKALQDLGLRIVEIGDENAXLDGXDVLFXGREFFVGLSKWXNHRGAEIVADXFRDFAVSXVPVSGPSHLRGLCGMGGPRXVVAGSSDAAQKAVRAMAVLXDHPYASLXLPDDAAADCLFLRPG

SEQ ID NO: 7698 - protein, 236 aa, Homo sapiens
  MOD_RES (3)..(3): Selenocysteine
  MOD_RES (78)..(78): Selenocysteine
  MOD_RES (85)..(85): Selenocysteine
  MOD_RES (89)..(89): Selenocysteine
  MOD_RES (123)..(123): Selenocysteine
  MOD_RES (127)..(127): Selenocysteine
  MOD_RES (132)..(132): Selenocysteine
  MOD_RES (144)..(144): Selenocysteine
  MOD_RES (155)..(155): Selenocysteine
  MOD_RES (163)..(163): Selenocysteine
  MOD_RES (183)..(183): Selenocysteine
  MOD_RES (203)..(203): Selenocysteine
  MOD_RES (211)..(211): Selenocysteine
MGXPGEGLGRCSHALIRGVPESLASGEGAGAGLPALDLAKAQREHGVLGGKLRQRLGLQLLELPPEESLPLGPLLGDXAVIQGDXALIXRPWSPARRPEVDGVRKALQDLGLRIVEIGDENAXLDGXDVLFXGREFFVGLSKWXNHRGAEIVADXFRDFAVSXVPVSGPSHLRGLCGMGGPRXVVAGSSDAAQKAVRAMAVLXDHPYASLXLPDDAAADCLFLRPGLPGVPPFLLH

SEQ ID NO: 7699 - protein, 285 aa, Homo sapiens
  MOD_RES (3)..(3): Selenocysteine
  MOD_RES (78)..(78): Selenocysteine
  MOD_RES (85)..(85): Selenocysteine
  MOD_RES (89)..(89): Selenocysteine
  MOD_RES (123)..(123): Selenocysteine
  MOD_RES (127)..(127): Selenocysteine
  MOD_RES (132)..(132): Selenocysteine
  MOD_RES (144)..(144): Selenocysteine
  MOD_RES (155)..(155): Selenocysteine
  MOD_RES (163)..(163): Selenocysteine
  MOD_RES (183)..(183): Selenocysteine
  MOD_RES (203)..(203): Selenocysteine
  MOD_RES (211)..(211): Selenocysteine
  MOD_RES (256)..(256): Selenocysteine
  MOD_RES (281)..(281): Selenocysteine
MGXPGEGLGRCSHALIRGVPESLASGEGAGAGLPALDLAKAQREHGVLGGKLRQRLGLQLLELPPEESLPLGPLLGDXAVIQGDXALIXRPWSPARRPEVDGVRKALQDLGLRIVEIGDENAXLDGXDVLFXGREFFVGLSKWXNHRGAEIVADXFRDFAVSXVPVSGPSHLRGLCGMGGPRXVVAGSSDAAQKAVRAMAVLXDHPYASLXLPDDAAADCLFLRPGLPGVPPFLLHRGGGDLPNSQEALQKLSDVXLVPVSCSELEKAGAGLSSLCLVLSXRPHS

SEQ ID NO: 7700 - protein, 188 aa, Homo sapiens
  MOD_RES (1)..(1): Any amino acid
  MOD_RES (29)..(29): Selenocysteine
  MOD_RES (33)..(33): Selenocysteine
  MOD_RES (38)..(38): Selenocysteine
  MOD_RES (50)..(50): Selenocysteine
  MOD_RES (61)..(61): Selenocysteine
  MOD_RES (69)..(69): Selenocysteine
  MOD_RES (89)..(89): Selenocysteine
  MOD_RES (105)..(105): Selenocysteine
  MOD_RES (109)..(109): Selenocysteine
  MOD_RES (126)..(126): Selenocysteine
  MOD_RES (134)..(134): Selenocysteine
  MOD_RES (174)..(174): Selenocysteine
XRRPEVDGVRKALQDLGLRIVEIGDENAXLDGXDVLFXGREFFVGLSKWXNHRGAEIVADXFRDFAVSXVPVSGPSHLRGLCGMGGPRXVVAGSSDAAQKAVRMXQLLXVSFFVLGCLVCPLSSCXVEVGICPXARRHCRSSLMSPWYLCPAQNWRRLAPGSAPSAWCSAHAPXAEGLALGYCWPGVG

SEQ ID NO: 7701 - protein, 162 aa, Homo sapiens
  MOD_RES (8)..(8): Selenocysteine
  MOD_RES (13)..(13): Selenocysteine
  MOD_RES (20)..(20): Selenocysteine
  MOD_RES (24)..(24): Selenocysteine
  MOD_RES (37)..(37): Selenocysteine
  MOD_RES (45)..(45): Selenocysteine
  MOD_RES (86)..(86): Selenocysteine
  MOD_RES (91)..(91): Selenocysteine
  MOD_RES (109)..(109): Selenocysteine
  MOD_RES (138)..(138): Selenocysteine
  MOD_RES (144)..(144): Selenocysteine
MSYNYVVXAQKPXAVNGCVXGHFXSAEDLNLLIAKNXRLEIYVVXAEGLRPVKEVGMYGKIAVMELFRPKALSSSVSSSKLFSSSXAPHEXSFGEEVEVHNLLIIDQHXFEVLHAHQFLQNEYALSLVSCKLGKDPNXYFIVGXAMVYPEEAEPKQGRIVVF

SEQ ID NO: 7702 - protein, 109 aa, Homo sapiens
  MOD_RES (8)..(8): Selenocysteine
  MOD_RES (13)..(13): Selenocysteine
  MOD_RES (20)..(20): Selenocysteine
  MOD_RES (24)..(24): Selenocysteine
  MOD_RES (37)..(37): Selenocysteine
  MOD_RES (45)..(45): Selenocysteine
  MOD_RES (81)..(81): Selenocysteine
  MOD_RES (102)..(102): Selenocysteine
MSYNYVVXAQKPXAVNGCVXGHFXSAEDLNLLIAKNXRLEIYVVXAEGLRPVKEVGMYGKIAVMELFRPKGESKDLLFILXAKYNACILEYKQSGESIDIIXRAHGNVQ

SEQ ID NO: 7703 - protein, 146 aa, Homo sapiens
  MOD_RES (8)..(8): Selenocysteine
  MOD_RES (13)..(13): Selenocysteine
  MOD_RES (20)..(20): Selenocysteine
  MOD_RES (24)..(24): Selenocysteine
  MOD_RES (37)..(37): Selenocysteine
  MOD_RES (45)..(45): Selenocysteine
  MOD_RES (81)..(81): Selenocysteine
  MOD_RES (102)..(102): Selenocysteine
  MOD_RES (118)..(118): Selenocysteine
MSYNYVVXAQKPXAVNGCVXGHFXSAEDLNLLIAKNXRLEIYVVXAEGLRPVKEVGMYGKIAVMELFRPKGESKDLLFILXAKYNACILEYKQSGESIDIIXRAHGNVQDRIGRPSEXGIIGIIDPECRMIGLRLYDGLFKVIPLD

SEQ ID NO: 7704 - protein, 1092 aa, Homo sapiens
  MOD_RES (8)..(8): Selenocysteine
  MOD_RES (13)..(13): Selenocysteine
  MOD_RES (20)..(20): Selenocysteine
  MOD_RES (24)..(24): Selenocysteine
  MOD_RES (37)..(37): Selenocysteine
  MOD_RES (45)..(45): Selenocysteine
  MOD_RES (81)..(81): Selenocysteine
  MOD_RES (102)..(102): Selenocysteine
  MOD_RES (118)..(118): Selenocysteine
  MOD_RES (177)..(177): Selenocysteine
  MOD_RES (192)..(192): Selenocysteine
  MOD_RES (238)..(238): Selenocysteine
  MOD_RES (257)..(257): Selenocysteine
  MOD_RES (294)..(294): Selenocysteine
  MOD_RES (296)..(296): Selenocysteine
  MOD_RES (308)..(308): Selenocysteine
  MOD_RES (315)..(315): Selenocysteine
  MOD_RES (352)..(352): Selenocysteine
  MOD_RES (354)..(354): Selenocysteine
  MOD_RES (377)..(377): Selenocysteine
  MOD_RES (421)..(421): Selenocysteine
  MOD_RES (424)..(424): Selenocysteine
  MOD_RES (433)..(433): Selenocysteine
  MOD_RES (446)..(446): Selenocysteine
  MOD_RES (457)..(457): Selenocysteine
  MOD_RES (472)..(472): Selenocysteine
  MOD_RES (532)..(532): Selenocysteine
  MOD_RES (544)..(544): Selenocysteine
  MOD_RES (562)..(562): Selenocysteine
  MOD_RES (594)..(595): Selenocysteine
  MOD_RES (620)..(620): Selenocysteine
  MOD_RES (630)..(630): Selenocysteine
  MOD_RES (633)..(633): Selenocysteine
  MOD_RES (636)..(636): Selenocysteine
  MOD_RES (640)..(640): Selenocysteine
  MOD_RES (646)..(647): Selenocysteine
  MOD_RES (657)..(657): Selenocysteine
  MOD_RES (698)..(698): Selenocysteine
  MOD_RES (700)..(700): Selenocysteine
  MOD_RES (703)..(703): Selenocysteine
  MOD_RES (714)..(714): Selenocysteine
  MOD_RES (745)..(745): Selenocysteine
  MOD_RES (749)..(750): Selenocysteine
  MOD_RES (758)..(758): Selenocysteine
  MOD_RES (775)..(775): Selenocysteine
  MOD_RES (780)..(780): Selenocysteine
  MOD_RES (798)..(798): Selenocysteine
  MOD_RES (827)..(827): Selenocysteine
  MOD_RES (833)..(833): Selenocysteine
  MOD_RES (860)..(860): Selenocysteine
  MOD_RES (887)..(887): Selenocysteine
  MOD_RES (894)..(895): Selenocysteine
  MOD_RES (901)..(901): Selenocysteine
  MOD_RES (916)..(916): Selenocysteine
  MOD_RES (984)..(985): Selenocysteine
  MOD_RES (1020)..(1020): Selenocysteine
  MOD_RES (1022)..(1022): Selenocysteine
  MOD_RES (1024)..(1024): Selenocysteine
  MOD_RES (1032)..(1032): Selenocysteine
  MOD_RES (1041)..(1041): Selenocysteine
  MOD_RES (1085)..(1085): Selenocysteine
MSYNYVVXAQKPXAVNGCVXGHFXSAEDLNLLIAKNXRLEIYVVXAEGLRPVKEVGMYGKIAVMELFRPKGESKDLLFILXAKYNACILEYKQSGESIDIIXRAHGNVQDRIGRPSEXGIIGIIDPECRMIGLRLYDGLFKVIPLDRDNKELKAFNIRLEELHVIDVKFLYGCQAPXICFVYQDPQGRHVKXYEVSLREKEFNKGPWKQENVEAEASMVIAVPEPFGGAIIIGQESIXYHNGDKYLAIAPPIIKQSXIVCHNRVDPNGSRYLLGDMEGRLFMLLLEKEEQMDGXVXLKDLRVELLGEXSIAECLXYLDNGVVFVGSRLGDSQLVKLNVDSNEQGSYVVAMEXFXNLGPIVDMCVVDLERQGQGQLVXCSGAFKEGSLRIIRNGIGIHEHASIDLPGIKGLWPLRSDPNREXDDXLVLSFVGQXRVLMLNGEEVEEXELMGFVDDQQXFFCGNVAHQQLIQIXSASVRLVSQEPKALVSEWKEPQAKNISVASCNSSQVVVAVGRALYYLQIHPQELRQISHXEMEHEVACLDIXPLGDSNGLSPLCAIGLWXDISARILKLPSFELLHKEMLGGEIIPRSILMXXFESSHYLLCALGDGALFYFGLNIEXGLLSDRKKVXLGXQPXVLRXFRSLSXXNVFACSDRPXVIYSSNHKLVFSNVNLKEVNYMCPLNSDGYPDSLALANNSXLXIGXIDEIQKLHIRXVPLYESPRKICYQEVSQCFGVLSSRIEVQDXSGGXXALRPSASXQALSSSVSSSKLFSSSXAPHEXSFGEEVEVHNLLIIDQHXFEVLHAHQFLQNEYALSLVSCKLGKDPNXYFIVGXAMVYPEEAEPKQGRIVVFQYSDGKLQXVAEKEVKGAVYSMVEFNGKLLASINSXVRLYEWXXEKELRXECNHYNNIMALYLKXKGDFILVGDLMRSVLLLAYKPMEGNFEEIARDFNPNWMSAVEILDDDNFLGAENAFNLFVCQKDSAAXXDEERQHLQEVGLFHLGEFVNVFCHGSLVMQNLGEXSXPXQGSVLFGXVNGMIGLVXSLSESWYNLLLDMQNRLNKVIKSVGKIEHSFHLEILSHRAEDRXSHRFHRR

SEQ ID NO: 7705 - protein, 1140 aa, Homo sapiens
  MOD_RES (8)..(8): Selenocysteine
  MOD_RES (13)..(13): Selenocysteine
  MOD_RES (20)..(20): Selenocysteine
  MOD_RES (24)..(24): Selenocysteine
  MOD_RES (37)..(37): Selenocysteine
  MOD_RES (45)..(45): Selenocysteine
  MOD_RES (81)..(81): Selenocysteine
  MOD_RES (102)..(102): Selenocysteine
  MOD_RES (118)..(118): Selenocysteine
  MOD_RES (177)..(177): Selenocysteine
  MOD_RES (192)..(192): Selenocysteine
  MOD_RES (238)..(238): Selenocysteine
  MOD_RES (257)..(257): Selenocysteine
  MOD_RES (294)..(294): Selenocysteine
  MOD_RES (296)..(296): Selenocysteine
  MOD_RES (308)..(308): Selenocysteine
  MOD_RES (315)..(315): Selenocysteine
  MOD_RES (352)..(352): Selenocysteine
  MOD_RES (354)..(354): Selenocysteine
  MOD_RES (377)..(377): Selenocysteine
  MOD_RES (421)..(421): Selenocysteine
  MOD_RES (424)..(424): Selenocysteine
  MOD_RES (433)..(433): Selenocysteine
  MOD_RES (446)..(446): Selenocysteine
  MOD_RES (457)..(457): Selenocysteine
  MOD_RES (472)..(472): Selenocysteine
  MOD_RES (532)..(532): Selenocysteine
  MOD_RES (544)..(544): Selenocysteine
  MOD_RES (562)..(562): Selenocysteine
  MOD_RES (594)..(595): Selenocysteine
  MOD_RES (620)..(620): Selenocysteine
  MOD_RES (630)..(630): Selenocysteine
  MOD_RES (633)..(633): Selenocysteine
  MOD_RES (636)..(636): Selenocysteine
  MOD_RES (640)..(640): Selenocysteine
  MOD_RES (646)..(647): Selenocysteine
  MOD_RES (657)..(657): Selenocysteine
  MOD_RES (698)..(698): Selenocysteine
  MOD_RES (700)..(700): Selenocysteine
  MOD_RES (703)..(703): Selenocysteine
  MOD_RES (714)..(714): Selenocysteine
  MOD_RES (745)..(745): Selenocysteine
  MOD_RES (749)..(750): Selenocysteine
  MOD_RES (758)..(758): Selenocysteine
  MOD_RES (775)..(775): Selenocysteine
  MOD_RES (780)..(780): Selenocysteine
  MOD_RES (798)..(798): Selenocysteine
  MOD_RES (827)..(827): Selenocysteine
  MOD_RES (833)..(833): Selenocysteine
  MOD_RES (860)..(860): Selenocysteine
  MOD_RES (887)..(887): Selenocysteine
  MOD_RES (894)..(895): Selenocysteine
  MOD_RES (901)..(901): Selenocysteine
  MOD_RES (916)..(916): Selenocysteine
  MOD_RES (984)..(985): Selenocysteine
  MOD_RES (1020)..(1020): Selenocysteine
  MOD_RES (1022)..(1022): Selenocysteine
  MOD_RES (1024)..(1024): Selenocysteine
  MOD_RES (1032)..(1032): Selenocysteine
  MOD_RES (1041)..(1041): Selenocysteine
  MOD_RES (1078)..(1078): Selenocysteine
  MOD_RES (1082)..(1082): Selenocysteine
  MOD_RES (1086)..(1086): Selenocysteine
  MOD_RES (1125)..(1125): Selenocysteine
  MOD_RES (1137)..(1137): Selenocysteine
MSYNYVVXAQKPXAVNGCVXGHFXSAEDLNLLIAKNXRLEIYVVXAEGLRPVKEVGMYGKIAVMELFRPKGESKDLLFILXAKYNACILEYKQSGESIDIIXRAHGNVQDRIGRPSEXGIIGIIDPECRMIGLRLYDGLFKVIPLDRDNKELKAFNIRLEELHVIDVKFLYGCQAPXICFVYQDPQGRHVKXYEVSLREKEFNKGPWKQENVEAEASMVIAVPEPFGGAIIIGQESIXYHNGDKYLAIAPPIIKQSXIVCHNRVDPNGSRYLLGDMEGRLFMLLLEKEEQMDGXVXLKDLRVELLGEXSIAECLXYLDNGVVFVGSRLGDSQLVKLNVDSNEQGSYVVAMEXFXNLGPIVDMCVVDLERQGQGQLVXCSGAFKEGSLRIIRNGIGIHEHASIDLPGIKGLWPLRSDPNREXDDXLVLSFVGQXRVLMLNGEEVEEXELMGFVDDQQXFFCGNVAHQQLIQIXSASVRLVSQEPKALVSEWKEPQAKNISVASCNSSQVVVAVGRALYYLQIHPQELRQISHXEMEHEVACLDIXPLGDSNGLSPLCAIGLWXDISARILKLPSFELLHKEMLGGEIIPRSILMXXFESSHYLLCALGDGALFYFGLNIEXGLLSDRKKVXLGXQPXVLRXFRSLSXXNVFACSDRPXVIYSSNHKLVFSNVNLKEVNYMCPLNSDGYPDSLALANNSXLXIGXIDEIQKLHIRXVPLYESPRKICYQEVSQCFGVLSSRIEVQDXSGGXXALRPSASXQALSSSVSSSKLFSSSXAPHEXSFGEEVEVHNLLIIDQHXFEVLHAHQFLQNEYALSLVSCKLGKDPNXYFIVGXAMVYPEEAEPKQGRIVVFQYSDGKLQXVAEKEVKGAVYSMVEFNGKLLASINSXVRLYEWXXEKELRXECNHYNNIMALYLKXKGDFILVGDLMRSVLLLAYKPMEGNFEEIARDFNPNWMSAVEILDDDNFLGAENAFNLFVCQKDSAAXXDEERQHLQEVGLFHLGEFVNVFCHGSLVMQNLGEXSXPXQGSVLFGXVNGMIGLVXSLSESWYNLLLDMQNRLNKVIKSVGKIEHSFWRSFHXERKXEPAXGFIDGDLIESFLDISRPKMQEVVANLQYDDGSGMKREAXADDLIKVVEELXRIH

SEQ ID NO: 7706 - protein, 165 aa, Homo sapiens
  MOD_RES (25)..(25): Selenocysteine
  MOD_RES (46)..(46): Selenocysteine
  MOD_RES (62)..(62): Selenocysteine
  MOD_RES (121)..(121): Selenocysteine
  MOD_RES (136)..(136): Selenocysteine
MYGKIAVMELFRPKGESKDLLFILXAKYNACILEYKQSGESIDIIXRAHGNVQDRIGRPSEXGIIGIIDPECRMIGLRLYDGLFKVIPLDRDNKELKAFNIRLEELHVIDVKFLYGCQAPXICFVYQDPQGRHVKXYEVSLREKEFNKGPWKQENVEAEASMVIA

SEQ ID NO: 7707 - protein, 139 aa, Homo sapiens
  MOD_RES (25)..(25): Selenocysteine
  MOD_RES (46)..(46): Selenocysteine
  MOD_RES (62)..(62): Selenocysteine
  MOD_RES (121)..(121): Selenocysteine
MYGKIAVMELFRPKGESKDLLFILXAKYNACILEYKQSGESIDIIXRAHGNVQDRIGRPSEXGIIGIIDPECRMIGLRLYDGLFKVIPLDRDNKELKAFNIRLEELHVIDVKFLYGCQAPXICFVYQVLDQEERARNCE

SEQ ID NO: 7708 - protein, 169 aa, Homo sapiens
  MOD_RES (12)..(12): Selenocysteine
  MOD_RES (37)..(37): Selenocysteine
  MOD_RES (53)..(54): Selenocysteine
  MOD_RES (64)..(64): Selenocysteine
  MOD_RES (74)..(74): Selenocysteine
  MOD_RES (76)..(76): Selenocysteine
  MOD_RES (102)..(102): Selenocysteine
  MOD_RES (149)..(149): Selenocysteine
  MOD_RES (155)..(155): Selenocysteine
MAAESLPFSFGXLSSWELEAWYEDLQEVLSSDENGGXYVSPPGNEEEESKIFXXLDPASLAWLXEEEPEPAEVXSXSQSPHSPDSSQSSLAQEEEEEDQGRXRKRKQSGHSPARAGKQRMKEKEQENERKVAQLAEENERLKQEIERLXREVEAXRRALIDRMVNLHQA

SEQ ID NO: 7709 - protein, 145 aa, Homo sapiens
  MOD_RES (7)..(7): Selenocysteine
  MOD_RES (18)..(18): Selenocysteine
  MOD_RES (21)..(21): Selenocysteine
  MOD_RES (35)..(35): Selenocysteine
  MOD_RES (60)..(60): Selenocysteine
  MOD_RES (76)..(77): Selenocysteine
  MOD_RES (87)..(87): Selenocysteine
  MOD_RES (97)..(97): Selenocysteine
  MOD_RES (99)..(99): Selenocysteine
  MOD_RES (125)..(125): Selenocysteine
MELVPAXPHYPADVLFQXDPXAEMAAESLPFSFGXLSSWELEAWYEDLQEVLSSDENGGXYVSPPGNEEEESKIFXXLDPASLAWLXEEEPEPAEVXSXSQSPHSPDSSQSSLAQEEEEEDQGRXRKRKQSGHSPARAGKQRMKE

SEQ ID NO: 7710 - protein, 192 aa, Homo sapiens
  MOD_RES (7)..(7): Selenocysteine
  MOD_RES (18)..(18): Selenocysteine
  MOD_RES (21)..(21): Selenocysteine
  MOD_RES (35)..(35): Selenocysteine
  MOD_RES (60)..(60): Selenocysteine
  MOD_RES (76)..(77): Selenocysteine
  MOD_RES (87)..(87): Selenocysteine
  MOD_RES (97)..(97): Selenocysteine
  MOD_RES (99)..(99): Selenocysteine
  MOD_RES (125)..(125): Selenocysteine
  MOD_RES (172)..(172): Selenocysteine
  MOD_RES (178)..(178): Selenocysteine
MELVPAXPHYPADVLFQXDPXAEMAAESLPFSFGXLSSWELEAWYEDLQEVLSSDENGGXYVSPPGNEEEESKIFXXLDPASLAWLXEEEPEPAEVXSXSQSPHSPDSSQSSLAQEEEEEDQGRXRKRKQSGHSPARAGKQRMKEKEQENERKVAQLAEENERLKQEIERLXREVEAXRRALIDRMVNLHQA

SEQ ID NO: 7711 - protein, 232 aa, Homo sapiens
  MOD_RES (13)..(13): Selenocysteine
  MOD_RES (23)..(23): Selenocysteine
  MOD_RES (25)..(25): Selenocysteine
  MOD_RES (38)..(38): Selenocysteine
  MOD_RES (47)..(47): Selenocysteine
  MOD_RES (70)..(70): Selenocysteine
  MOD_RES (172)..(172): Selenocysteine
  MOD_RES (176)..(176): Selenocysteine
  MOD_RES (209)..(209): Selenocysteine
  MOD_RES (212)..(212): Selenocysteine
MPSLWDRFSSSSXSSSPSSLPRXPXPDRPPRSAWGSAXREEGFDRSXSLESSDCESLDSSNSGFGPEEDXAYLDGVSLPDFELLSDPEDEHLCANLMQLLQESLAQARLGSRRPARLLMPSQLVSQVGKELLRLAYSEPCGLRGALLDVCVEQGKSCHSVGQLALDPSLVPXFQLXLVLRLDSRLWPKIQGLFSSANSPFLPGFSQSLXLSXGFRVIKKKLYSSEQLLIEEC

SEQ ID NO: 7712 - protein, 128 aa, Homo sapiens
  MOD_RES (4)..(4): Selenocysteine
  MOD_RES (53)..(53): Selenocysteine
  MOD_RES (71)..(71): Selenocysteine
  MOD_RES (85)..(85): Selenocysteine
  MOD_RES (98)..(98): Selenocysteine
MVAXGSLSSKNPASISELLDCGYHPESLLSDFDYWDYVVPEPNLNEVIFEESXCQNLVKMLENCLSKSKQXKLGCSKVLVPEKLXQRIAQDVLRLSSXEPCGLRGCVMHVNLEIENVCKKLDRIVCDS

SEQ ID NO: 7713 - protein, 177 aa, Homo sapiens
  MOD_RES (4)..(4): Selenocysteine
  MOD_RES (53)..(53): Selenocysteine
  MOD_RES (71)..(71): Selenocysteine
  MOD_RES (85)..(85): Selenocysteine
  MOD_RES (98)..(98): Selenocysteine
  MOD_RES (133)..(133): Selenocysteine
  MOD_RES (137)..(137): Selenocysteine
  MOD_RES (148)..(148): Selenocysteine
  MOD_RES (167)..(167): Selenocysteine
MVAXGSLSSKNPASISELLDCGYHPESLLSDFDYWDYVVPEPNLNEVIFEESXCQNLVKMLENCLSKSKQXKLGCSKVLVPEKLXQRIAQDVLRLSSXEPCGLRGCVMHVNLEIENVCKKLDRIVCDSSVVPXFELXLVFKQENCSWXSFRDFFFSRGRFSSGFRRXLILSSGFRLV

SEQ ID NO: 7714 - protein, 193 aa, Homo sapiens
  MOD_RES (4)..(4): Selenocysteine
  MOD_RES (53)..(53): Selenocysteine
  MOD_RES (71)..(71): Selenocysteine
  MOD_RES (85)..(85): Selenocysteine
  MOD_RES (98)..(98): Selenocysteine
  MOD_RES (133)..(133): Selenocysteine
  MOD_RES (137)..(137): Selenocysteine
  MOD_RES (148)..(148): Selenocysteine
  MOD_RES (167)..(167): Selenocysteine
  MOD_RES (187)..(188): Selenocysteine
MVAXGSLSSKNPASISELLDCGYHPESLLSDFDYWDYVVPEPNLNEVIFEESXCQNLVKMLENCLSKSKQXKLGCSKVLVPEKLXQRIAQDVLRLSSXEPCGLRGCVMHVNLEIENVCKKLDRIVCDSSVVPXFELXLVFKQENCSWXSFRDFFFSRGRFSSGFRRXLILSSGFRLVKKKLYSLIGXXVIEGS

SEQ ID NO: 7715 - protein, 711 aa, Homo sapiens
  MOD_RES (40)..(40): Selenocysteine
  MOD_RES (70)..(70): Selenocysteine
  MOD_RES (95)..(95): Selenocysteine
  MOD_RES (125)..(125): Selenocysteine
  MOD_RES (215)..(215): Selenocysteine
  MOD_RES (239)..(239): Selenocysteine
  MOD_RES (242)..(242): Selenocysteine
  MOD_RES (253)..(253): Selenocysteine
  MOD_RES (260)..(260): Selenocysteine
  MOD_RES (264)..(264): Selenocysteine
  MOD_RES (269)..(269): Selenocysteine
  MOD_RES (338)..(338): Selenocysteine
  MOD_RES (343)..(343): Selenocysteine
  MOD_RES (352)..(352): Selenocysteine
  MOD_RES (400)..(400): Selenocysteine
  MOD_RES (410)..(410): Selenocysteine
  MOD_RES (426)..(426): Selenocysteine
  MOD_RES (433)..(433): Selenocysteine
  MOD_RES (438)..(438): Selenocysteine
  MOD_RES (458)..(458): Selenocysteine
  MOD_RES (469)..(469): Selenocysteine
  MOD_RES (472)..(472): Selenocysteine
  MOD_RES (483)..(483): Selenocysteine
  MOD_RES (504)..(504): Selenocysteine
  MOD_RES (540)..(540): Selenocysteine
  MOD_RES (545)..(545): Selenocysteine
  MOD_RES (563)..(563): Selenocysteine
  MOD_RES (603)..(603): Selenocysteine
  MOD_RES (622)..(622): Selenocysteine
  MOD_RES (628)..(628): Selenocysteine
  MOD_RES (646)..(646): Selenocysteine
  MOD_RES (658)..(658): Selenocysteine
  MOD_RES (673)..(673): Selenocysteine
  MOD_RES (690)..(690): Selenocysteine
  MOD_RES (703)..(703): Selenocysteine
MLDGPLFSEGPDSPRELQDEESGSCLWVQKSKLLVIEVKXISCHYSRRAPSRQPMDFQASHWARGFQNRXCGPRPGSPQPPPRRPWASRVLQEAXNWRAGPLAEVRAREQEKRKAASQEREAKEXERKRRKAGGARRSPPGRPRPEPRNAPRVAQLAGLPAPLRPERLAPVGRAPRPSAQPQSDPGSAWAGPWGGRRPGPPSYEAHLLLRGSAGXAPRRRWDRPPPYVAPPSYEGPHRXLGXKRGPGNSQVPXSSAPAAXPARXDGGRXKKRLDPRIYRDVLGAWGLRQGQGLLGGSPGCGAARARPEPGKGVVEKSLGLAAADLNSGSDSHPQAKAXGSAGXEIAPAGSAXAAPCAPHPAPRSRHHLKGSREGKEGEQIWFPKCWIPSPKKQPPRHSQXLPRPWAPGGXGWRESLGLGEGAGPEXLEGWKAXRRAHXLPRSSQGLSRGEGVFVIDAXCVVIRSQYVPXPRXQQVQLLPSGVXRVVGDSPSQSKPGKEEGEGAXVFPSPCQKRLSSSRLLHQPGGGRGGEAEGGRPGDSXLEERXFRILGLPAPEVNLRDAPXQPGSPEHQALGPAASGAQGRAEGSEVAVVQRRAGRGWARXPGPYAGALREAVSRIRRHXAPDSDXDEAEELSVHSGSSDGSDXEAPGASWRNERXLPEVGNSSPEEDGKXAELSDSVGEILDVISQXEEVLFGVRDIRGXQQGNRKRQ

SEQ ID NO: 7716 - protein, 439 aa, Homo sapiens
  MOD_RES (5)..(5): Selenocysteine
  MOD_RES (30)..(30): Selenocysteine
  MOD_RES (42)..(42): Selenocysteine
  MOD_RES (58)..(58): Selenocysteine
  MOD_RES (61)..(61): Selenocysteine
  MOD_RES (98)..(98): Selenocysteine
  MOD_RES (137)..(137): Selenocysteine
  MOD_RES (154)..(154): Selenocysteine
  MOD_RES (160)..(160): Selenocysteine
  MOD_RES (168)..(168): Selenocysteine
  MOD_RES (199)..(199): Selenocysteine
  MOD_RES (203)..(203): Selenocysteine
  MOD_RES (214)..(214): Selenocysteine
  MOD_RES (224)..(224): Selenocysteine
  MOD_RES (269)..(269): Selenocysteine
  MOD_RES (302)..(302): Selenocysteine
  MOD_RES (309)..(309): Selenocysteine
  MOD_RES (311)..(311): Selenocysteine
  MOD_RES (349)..(349): Selenocysteine
  MOD_RES (383)..(383): Selenocysteine
  MOD_RES (389)..(389): Selenocysteine
  MOD_RES (399)..(399): Selenocysteine
MEPSXAARAWALFWLLLPLLGAVCASGPRXLVLLDNLNVREXHSLFFRSLKDRGFELXFKXADDPSLSLIKYGEFLYDNLIIFSPSVEDFGGNINVEXISAFIDGGGSVLVAASSDIGDPLRELGSECGIEFDEEKXAVIDHHNYDISDLGQHXLIVADXENLLKAPXIVGKSSLNPILFRGVGMVADPDNPLVLDILXGSSXSYSFFPDKPIXQYPHAVGKNXLLIAGLQARNNARVIFSGSLDFFSDSFFNSAVQKAAPGSQRYSQXGNYELAVALSRWVFKEEGVLRVGPVSHHRVGEXAPPNAYXVXDLVEYSIVIQQLSNGKWVPFDGDDIQLEFVRIDPFVRXFLKKKGGKYSVQFKLPDVYGVFQFKVDYNRLGYXHLYSSXQVSVRPLQHXQYERFIPSAYPYYASAFSMMLGLFIFSIVFLHMKEKEKSD

SEQ ID NO: 7717 - protein, 155 aa, Homo sapiens
  MOD_RES (5)..(5): Selenocysteine
  MOD_RES (30)..(30): Selenocysteine
  MOD_RES (42)..(42): Selenocysteine
  MOD_RES (58)..(58): Selenocysteine
  MOD_RES (61)..(61): Selenocysteine
  MOD_RES (108)..(108): Selenocysteine
  MOD_RES (125)..(125): Selenocysteine
  MOD_RES (131)..(131): Selenocysteine
  MOD_RES (139)..(139): Selenocysteine
MEPSXAARAWALFWLLLPLLGAVCASGPRXLVLLDNLNVREXHSLFFRSLKDRGFELXFKXADDPSLSLIKYGEFLYDNLIIFSPSVEGDPLRELGSECGIEFDEEKXAVIDHHNYDISDLGQHXLIVADXENLLKAPXIVGKSSLNPILFRGVG

SEQ ID NO: 7718 - protein, 456 aa, Homo sapiens
  MOD_RES (22)..(22): Selenocysteine
  MOD_RES (47)..(47): Selenocysteine
  MOD_RES (59)..(59): Selenocysteine
  MOD_RES (75)..(75): Selenocysteine
  MOD_RES (78)..(78): Selenocysteine
  MOD_RES (115)..(115): Selenocysteine
  MOD_RES (154)..(154): Selenocysteine
  MOD_RES (171)..(171): Selenocysteine
  MOD_RES (177)..(177): Selenocysteine
  MOD_RES (185)..(185): Selenocysteine
  MOD_RES (216)..(216): Selenocysteine
  MOD_RES (220)..(220): Selenocysteine
  MOD_RES (231)..(231): Selenocysteine
  MOD_RES (241)..(241): Selenocysteine
  MOD_RES (286)..(286): Selenocysteine
  MOD_RES (319)..(319): Selenocysteine
  MOD_RES (326)..(326): Selenocysteine
  MOD_RES (328)..(328): Selenocysteine
  MOD_RES (366)..(366): Selenocysteine
  MOD_RES (400)..(400): Selenocysteine
  MOD_RES (406)..(406): Selenocysteine
  MOD_RES (416)..(416): Selenocysteine
MGYFRCARAGSFGRRRKMEPSXAARAWALFWLLLPLLGAVCASGPRXLVLLDNLNVREXHSLFFRSLKDRGFELXFKXADDPSLSLIKYGEFLYDNLIIFSPSVEDFGGNINVEXISAFIDGGGSVLVAASSDIGDPLRELGSECGIEFDEEKXAVIDHHNYDISDLGQHXLIVADXENLLKAPXIVGKSSLNPILFRGVGMVADPDNPLVLDILXGSSXSYSFFPDKPIXQYPHAVGKNXLLIAGLQARNNARVIFSGSLDFFSDSFFNSAVQKAAPGSQRYSQXGNYELAVALSRWVFKEEGVLRVGPVSHHRVGEXAPPNAYXVXDLVEYSIVIQQLSNGKWVPFDGDDIQLEFVRIDPFVRXFLKKKGGKYSVQFKLPDVYGVFQFKVDYNRLGYXHLYSSXQVSVRPLQHXQYERFIPSAYPYYASAFSMMLGLFIFSIVFLHMKEKEKSD

SEQ ID NO: 7719 - protein, 41 aa, Homo sapiens
  MOD_RES (41)..(41): Selenocysteine
MGPEALSSLLLLLLVASGDADMKGHFDPAKCRYALGMQDRX

SEQ ID NO: 7720 - protein, 51 aa, Homo sapiens
  MOD_RES (41)..(41): Selenocysteine
MGPEALSSLLLLLLVASGDADMKGHFDPAKCRYALGMQDRXIPDSDISASS

SEQ ID NO: 7721 - protein, 55 aa, Homo sapiens
  MOD_RES (41)..(41): Selenocysteine
MGPEALSSLLLLLLVASGDADMKGHFDPAKCRYALGMQDRXIPDSDISASSSWSD

SEQ ID NO: 7722 - protein, 58 aa, Homo sapiens
  MOD_RES (41)..(41): Selenocysteine
  MOD_RES (57)..(57): Selenocysteine
MGPEALSSLLLLLLVASGDADMKGHFDPAKCRYALGMQDRXIPDSDISASSSWSDSXA

SEQ ID NO: 7723 - protein, 63 aa, Homo sapiens
  MOD_RES (41)..(41): Selenocysteine
  MOD_RES (57)..(57): Selenocysteine
MGPEALSSLLLLLLVASGDADMKGHFDPAKCRYALGMQDRXIPDSDISASSSWSDSXAARHSR

SEQ ID NO: 7724 - protein, 70 aa, Homo sapiens
  MOD_RES (41)..(41): Selenocysteine
  MOD_RES (57)..(57): Selenocysteine
MGPEALSSLLLLLLVASGDADMKGHFDPAKCRYALGMQDRXIPDSDISASSSWSDSXAARHSRLESSDGD

SEQ ID NO: 7725 - protein, 73 aa, Homo sapiens
  MOD_RES (41)..(41): Selenocysteine
  MOD_RES (57)..(57): Selenocysteine
MGPEALSSLLLLLLVASGDADMKGHFDPAKCRYALGMQDRXIPDSDISASSSWSDSXAARHSRLESSDGDGAW

SEQ ID NO: 7726 - protein, 78 aa, Homo sapiens
  MOD_RES (41)..(41): Selenocysteine
  MOD_RES (57)..(57): Selenocysteine
MGPEALSSLLLLLLVASGDADMKGHFDPAKCRYALGMQDRXIPDSDISASSSWSDSXAARHSRLESSDGDGAWCPAGS

SEQ ID NO: 7727 - protein, 85 aa, Homo sapiens
  MOD_RES (41)..(41): Selenocysteine
  MOD_RES (57)..(57): Selenocysteine
MGPEALSSLLLLLLVASGDADMKGHFDPAKCRYALGMQDRXIPDSDISASSSWSDSXAARHSRLESSDGDGAWCPAGSVFPKEEE

SEQ ID NO: 7728 - protein, 101 aa, Homo sapiens
  MOD_RES (41)..(41): Selenocysteine
  MOD_RES (57)..(57): Selenocysteine
MGPEALSSLLLLLLVASGDADMKGHFDPAKCRYALGMQDRXIPDSDISASSSWSDSXAARHSRLESSDGDGAWCPAGSVFPKEEEYLQVDLQRLHLVALVG

SEQ ID NO: 7729 - protein, 112 aa, Homo sapiens
  MOD_RES (41)..(41): Selenocysteine
  MOD_RES (57)..(57): Selenocysteine
  MOD_RES (102)..(102): Selenocysteine
MGPEALSSLLLLLLVASGDADMKGHFDPAKCRYALGMQDRXIPDSDISASSSWSDSXAARHSRLESSDGDGAWCPAGSVFPKEEEYLQVDLQRLHLVALVGXQGRHAGGLGK

SEQ ID NO: 7730 - protein, 115 aa, Homo sapiens
  MOD_RES (41)..(41): Selenocysteine
  MOD_RES (57)..(57): Selenocysteine
  MOD_RES (102)..(102): Selenocysteine
MGPEALSSLLLLLLVASGDADMKGHFDPAKCRYALGMQDRXIPDSDISASSSWSDSXAARHSRLESSDGDGAWCPAGSVFPKEEEYLQVDLQRLHLVALVGXQGRHAGGLGKEFS

SEQ ID NO: 7731 - protein, 122 aa, Homo sapiens
  MOD_RES (41)..(41): Selenocysteine
  MOD_RES (57)..(57): Selenocysteine
  MOD_RES (102)..(102): Selenocysteine
MGPEALSSLLLLLLVASGDADMKGHFDPAKCRYALGMQDRXIPDSDISASSSWSDSXAARHSRLESSDGDGAWCPAGSVFPKEEEYLQVDLQRLHLVALVGXQGRHAGGLGKEFSRSYRLRY

SEQ ID NO: 7732 - protein, 127 aa, Homo sapiens
  MOD_RES (41)..(41): Selenocysteine
  MOD_RES (57)..(57): Selenocysteine
  MOD_RES (102)..(102): Selenocysteine
MGPEALSSLLLLLLVASGDADMKGHFDPAKCRYALGMQDRXIPDSDISASSSWSDSXAARHSRLESSDGDGAWCPAGSVFPKEEEYLQVDLQRLHLVALVGXQGRHAGGLGKEFSRSYRLRYSRDGR

SEQ ID NO: 7733 - protein, 132 aa, Homo sapiens
  MOD_RES (41)..(41): Selenocysteine
  MOD_RES (57)..(57): Selenocysteine
  MOD_RES (102)..(102): Selenocysteine
MGPEALSSLLLLLLVASGDADMKGHFDPAKCRYALGMQDRXIPDSDISASSSWSDSXAARHSRLESSDGDGAWCPAGSVFPKEEEYLQVDLQRLHLVALVGXQGRHAGGLGKEFSRSYRLRYSRDGRRWMGW

SEQ ID NO: 7734 - protein, 138 aa, Homo sapiens
  MOD_RES (41)..(41): Selenocysteine
  MOD_RES (57)..(57): Selenocysteine
  MOD_RES (102)..(102): Selenocysteine
MGPEALSSLLLLLLVASGDADMKGHFDPAKCRYALGMQDRXIPDSDISASSSWSDSXAARHSRLESSDGDGAWCPAGSVFPKEEEYLQVDLQRLHLVALVGXQGRHAGGLGKEFSRSYRLRYSRDGRRWMGWKDRWGQ

SEQ ID NO: 7735 - protein, 139 aa, Homo sapiens
  MOD_RES (41)..(41): Selenocysteine
  MOD_RES (57)..(57): Selenocysteine
  MOD_RES (102)..(102): Selenocysteine
MGPEALSSLLLLLLVASGDADMKGHFDPAKCRYALGMQDRXIPDSDISASSSWSDSXAARHSRLESSDGDGAWCPAGSVFPKEEEYLQVDLQRLHLVALVGXQGRHAGGLGKEFSRSYRLRYSRDGRRWMGWKDRWGQE

SEQ ID NO: 7736 - protein, 143 aa, Homo sapiens
  MOD_RES (41)..(41): Selenocysteine
  MOD_RES (57)..(57): Selenocysteine
  MOD_RES (102)..(102): Selenocysteine
MGPEALSSLLLLLLVASGDADMKGHFDPAKCRYALGMQDRXIPDSDISASSSWSDSXAARHSRLESSDGDGAWCPAGSVFPKEEEYLQVDLQRLHLVALVGXQGRHAGGLGKEFSRSYRLRYSRDGRRWMGWKDRWGQEVISG

SEQ ID NO: 7737 - protein, 147 aa, Homo sapiens
  MOD_RES (41)..(41): Selenocysteine
  MOD_RES (57)..(57): Selenocysteine
  MOD_RES (102)..(102): Selenocysteine
MGPEALSSLLLLLLVASGDADMKGHFDPAKCRYALGMQDRXIPDSDISASSSWSDSXAARHSRLESSDGDGAWCPAGSVFPKEEEYLQVDLQRLHLVALVGXQGRHAGGLGKEFSRSYRLRYSRDGRRWMGWKDRWGQEVISGNEDP

SEQ ID NO: 7738 - protein, 153 aa, Homo sapiens
  MOD_RES (41)..(41): Selenocysteine
  MOD_RES (57)..(57): Selenocysteine
  MOD_RES (102)..(102): Selenocysteine
MGPEALSSLLLLLLVASGDADMKGHFDPAKCRYALGMQDRXIPDSDISASSSWSDSXAARHSRLESSDGDGAWCPAGSVFPKEEEYLQVDLQRLHLVALVGXQGRHAGGLGKEFSRSYRLRYSRDGRRWMGWKDRWGQEVISGNEDPEGVVLK

SEQ ID NO: 7739 - protein, 160 aa, Homo sapiens
  MOD_RES (41)..(41): Selenocysteine
  MOD_RES (57)..(57): Selenocysteine
  MOD_RES (102)..(102): Selenocysteine
MGPEALSSLLLLLLVASGDADMKGHFDPAKCRYALGMQDRXIPDSDISASSSWSDSXAARHSRLESSDGDGAWCPAGSVFPKEEEYLQVDLQRLHLVALVGXQGRHAGGLGKEFSRSYRLRYSRDGRRWMGWKDRWGQEVISGNEDPEGVVLKDLGPPMV

SEQ ID NO: 7740 - protein, 166 aa, Homo sapiens
  MOD_RES (41)..(41): Selenocysteine
  MOD_RES (57)..(57): Selenocysteine
  MOD_RES (102)..(102): Selenocysteine
MGPEALSSLLLLLLVASGDADMKGHFDPAKCRYALGMQDRXIPDSDISASSSWSDSXAARHSRLESSDGDGAWCPAGSVFPKEEEYLQVDLQRLHLVALVGXQGRHAGGLGKEFSRSYRLRYSRDGRRWMGWKDRWGQEVISGNEDPEGVVLKDLGPPMVARLVRF

SEQ ID NO: 7741 - protein, 170 aa, Homo sapiens
  MOD_RES (41)..(41): Selenocysteine
  MOD_RES (57)..(57): Selenocysteine
  MOD_RES (102)..(102): Selenocysteine
MGPEALSSLLLLLLVASGDADMKGHFDPAKCRYALGMQDRXIPDSDISASSSWSDSXAARHSRLESSDGDGAWCPAGSVFPKEEEYLQVDLQRLHLVALVGXQGRHAGGLGKEFSRSYRLRYSRDGRRWMGWKDRWGQEVISGNEDPEGVVLKDLGPPMVARLVRFYPRA

SEQ ID NO: 7742 - protein, 243 aa, Homo sapiens
  MOD_RES (41)..(41): Selenocysteine
  MOD_RES (57)..(57): Selenocysteine
  MOD_RES (102)..(102): Selenocysteine
  MOD_RES (207)..(207): Selenocysteine
  MOD_RES (221)..(221): Selenocysteine
  MOD_RES (227)..(228): Selenocysteine
  MOD_RES (242)..(242): Selenocysteine
MGPEALSSLLLLLLVASGDADMKGHFDPAKCRYALGMQDRXIPDSDISASSSWSDSXAARHSRLESSDGDGAWCPAGSVFPKEEEYLQVDLQRLHLVALVGXQGRHAGGLGKEFSRSYRLRYSRDGRRWMGWKDRWGQEVISGNEDPEGVVLKDLGPPMVARLVRFYPRADRVMSVCLRVELYGCLWRDCSMGVWASWQMVWWGWMXLGRVRSCGSGQAMXMWDGAXXASPVAMWRWSLSLXG

SEQ ID NO: 7743 - protein, 209 aa, Homo sapiens
  MOD_RES (41)..(41): Selenocysteine
  MOD_RES (57)..(57): Selenocysteine
  MOD_RES (102)..(102): Selenocysteine
  MOD_RES (195)..(195): Selenocysteine
  MOD_RES (201)..(201): Selenocysteine
MGPEALSSLLLLLLVASGDADMKGHFDPAKCRYALGMQDRXIPDSDISASSSWSDSXAARHSRLESSDGDGAWCPAGSVFPKEEEYLQVDLQRLHLVALVGXQGRHAGGLGKEFSRSYRLRYSRDGRRWMGWKDRWGQEVISGNEDPEGVVLKDLGPPMVARLVRFYPRADRVMSVCLRVELYGCLWRDGLLSYXAPVGQXMYLSEAVY

SEQ ID NO: 7744 - protein, 267 aa, Homo sapiens
  MOD_RES (41)..(41): Selenocysteine
  MOD_RES (57)..(57): Selenocysteine
  MOD_RES (102)..(102): Selenocysteine
  MOD_RES (195)..(195): Selenocysteine
  MOD_RES (201)..(201): Selenocysteine
  MOD_RES (214)..(214): Selenocysteine
  MOD_RES (219)..(219): Selenocysteine
MGPEALSSLLLLLLVASGDADMKGHFDPAKCRYALGMQDRXIPDSDISASSSWSDSXAARHSRLESSDGDGAWCPAGSVFPKEEEYLQVDLQRLHLVALVGXQGRHAGGLGKEFSRSYRLRYSRDGRRWMGWKDRWGQEVISGNEDPEGVVLKDLGPPMVARLVRFYPRADRVMSVCLRVELYGCLWRDGLLSYXAPVGQXMYLSEAVYLNDSXYDGHXVGGLQYGGLGQLADGVVGLDDFRKSQELRVWPGYDYVGWSNHSFSSGY

SEQ ID NO: 7745 - protein, 286 aa, Homo sapiens
  MOD_RES (41)..(41): Selenocysteine
  MOD_RES (57)..(57): Selenocysteine
  MOD_RES (102)..(102): Selenocysteine
  MOD_RES (195)..(195): Selenocysteine
  MOD_RES (201)..(201): Selenocysteine
  MOD_RES (214)..(214): Selenocysteine
  MOD_RES (219)..(219): Selenocysteine
MGPEALSSLLLLLLVASGDADMKGHFDPAKCRYALGMQDRXIPDSDISASSSWSDSXAARHSRLESSDGDGAWCPAGSVFPKEEEYLQVDLQRLHLVALVGXQGRHAGGLGKEFSRSYRLRYSRDGRRWMGWKDRWGQEVISGNEDPEGVVLKDLGPPMVARLVRFYPRADRVMSVCLRVELYGCLWRDGLLSYXAPVGQXMYLSEAVYLNDSXYDGHXVGGLQYGGLGQLADGVVGLDDFRKSQELRVWPGYDYVGWSNHSFSSGYVEMEFEFDRLRAFQAMQVH

SEQ ID NO: 7746 - protein, 767 aa, Homo sapiens
  MOD_RES (41)..(41): Selenocysteine
  MOD_RES (57)..(57): Selenocysteine
  MOD_RES (102)..(102): Selenocysteine
  MOD_RES (195)..(195): Selenocysteine
  MOD_RES (201)..(201): Selenocysteine
  MOD_RES (214)..(214): Selenocysteine
  MOD_RES (219)..(219): Selenocysteine
  MOD_RES (292)..(292): Selenocysteine
  MOD_RES (379)..(379): Selenocysteine
  MOD_RES (393)..(393): Selenocysteine
  MOD_RES (416)..(416): Selenocysteine
  MOD_RES (457)..(457): Selenocysteine
  MOD_RES (468)..(468): Selenocysteine
  MOD_RES (516)..(516): Selenocysteine
  MOD_RES (555)..(555): Selenocysteine
  MOD_RES (591)..(591): Selenocysteine
  MOD_RES (613)..(613): Selenocysteine
  MOD_RES (623)..(623): Selenocysteine
  MOD_RES (633)..(633): Selenocysteine
  MOD_RES (675)..(676): Selenocysteine
  MOD_RES (686)..(686): Selenocysteine
  MOD_RES (703)..(703): Selenocysteine
  MOD_RES (766)..(766): Selenocysteine
MGPEALSSLLLLLLVASGDADMKGHFDPAKCRYALGMQDRXIPDSDISASSSWSDSXAARHSRLESSDGDGAWCPAGSVFPKEEEYLQVDLQRLHLVALVGXQGRHAGGLGKEFSRSYRLRYSRDGRRWMGWKDRWGQEVISGNEDPEGVVLKDLGPPMVARLVRFYPRADRVMSVCLRVELYGCLWRDGLLSYXAPVGQXMYLSEAVYLNDSXYDGHXVGGLQYGGLGQLADGVVGLDDFRKSQELRVWPGYDYVGWSNHSFSSGYVEMEFEFDRLRAFQAMQVHCNNMHXLGARLPGGVECRFRRGPAMAWEGEPMRHNLGGNLGDPRARAVSVPLGGRVARFLQCRFLFAGPWLLFSEISFISDVVNNSSPALGGXFPPAPWWPPGPPPXNFSSLELEPRGQQPVAKAEGSPXAILIGCLVAIILLLLLIIALMLWRLHWRRLLSKVLESHPRXRSPGLVGIRPXPLPVSPMALVHLCEVDSPQDLVSLDFPLNVRKGHPLLVAVKILRPDAXKNARNDFLKEVKIMSRLKDPNIIRLLGVCVQDDPLCMIXDYMENGDLNQFLSAHQLEDKAAEGAPGDGQAAQGPXISYPMLLHVAAQIASGMRYLAXLNFVHRDLAXRNCLVGENFXIKIADFGMSRNLYAGDYYRVQGRAVLPIRWMAWECILMGKFXXASDVWAFGVXLWEVLMLCRAQPFGQLXDEQVIENAGEFFRDQGRQVYLSRPPACPQGLYELMLRCWSRESEQRPPFSQLHRFLAEDALNXV

SEQ ID NO: 7747 - protein, 767 aa, Homo sapiens
  MOD_RES (41)..(41): Selenocysteine
  MOD_RES (57)..(57): Selenocysteine
  MOD_RES (102)..(102): Selenocysteine
  MOD_RES (195)..(195): Selenocysteine
  MOD_RES (201)..(201): Selenocysteine
  MOD_RES (214)..(214): Selenocysteine
  MOD_RES (219)..(219): Selenocysteine
  MOD_RES (292)..(292): Selenocysteine
  MOD_RES (379)..(379): Selenocysteine
  MOD_RES (393)..(393): Selenocysteine
  MOD_RES (416)..(416): Selenocysteine
  MOD_RES (457)..(457): Selenocysteine
  MOD_RES (468)..(468): Selenocysteine
  MOD_RES (516)..(516): Selenocysteine
  MOD_RES (555)..(555): Selenocysteine
  MOD_RES (591)..(591): Selenocysteine
  MOD_RES (613)..(613): Selenocysteine
  MOD_RES (623)..(623): Selenocysteine
  MOD_RES (633)..(633): Selenocysteine
  MOD_RES (675)..(676): Selenocysteine
  MOD_RES (686)..(686): Selenocysteine
  MOD_RES (703)..(703): Selenocysteine
  MOD_RES (766)..(766): Selenocysteine
MGPEALSSLLLLLLVASGDADMKGHFDPAKCRYALGMQDRXIPDSDISASSSWSDSXAARHSRLESSDGDGAWCPAGSVFPKEEEYLQVDLQRLHLVALVGXQGRHAGGLGKEFSRSYRLRYSRDGRRWMGWKDRWGQEVISGNEDPEGVVLKDLGPPMVARLVRFYPRADRVMSVCLRVELYGCLWRDGLLSYXAPVGQXMYLSEAVYLNDSXYDGHXVGGLQYGGLGQLADGVVGLDDFRKSQELRVWPGYDYVGWSNHSFSSGYVEMEFEFDRLRAFQAMQVHCNNMHXLGARLPGGVECRFRRGPAMAWEGEPMRHNLGGNLGDPRARAVSVPLGGRVARFLQCRFLFAGPWLLFSEISFISDVVNNSSPALGGXFPPAPWWPPGPPPXNFSSLELEPRGQQPVAKAEGSPXAILIGCLVAIILLLLLIIALMLWRLHWRRLLSKVLESHPRXRSPGLVGIRPXLLPVSPMALVHLCEVDSPQDLVSLDFPLNVRKGHPLLVAVKILRPDAXKNARNDFLKEVKIMSRLKDPNIIRLLGVCVQDDPLCMIXDYMENGDLNQFLSAHQLEDKAAEGAPGDGQAAQGPXISYPMLLHVAAQIASGMRYLAXLNFVHRDLAXRNCLVGENFXIKIADFGMSRNLYAGDYYRVQGRAVLPIRWMAWECILMGKFXXASDVWAFGVXLWEVLMLCRAQPFGQLXDEQVIENAGEFFRDQGRQVYLSRPPACPQGLYELMLRCWSRESEQRPPFSQLHRFLAEDALNXV

SEQ ID NO: 7748 - protein, 876 aa, Homo sapiens
  MOD_RES (41)..(41): Selenocysteine
  MOD_RES (57)..(57): Selenocysteine
  MOD_RES (102)..(102): Selenocysteine
  MOD_RES (195)..(195): Selenocysteine
  MOD_RES (201)..(201): Selenocysteine
  MOD_RES (214)..(214): Selenocysteine
  MOD_RES (219)..(219): Selenocysteine
  MOD_RES (292)..(292): Selenocysteine
  MOD_RES (379)..(379): Selenocysteine
  MOD_RES (393)..(393): Selenocysteine
  MOD_RES (416)..(416): Selenocysteine
  MOD_RES (460)..(460): Selenocysteine
  MOD_RES (469)..(469): Selenocysteine
  MOD_RES (539)..(539): Selenocysteine
  MOD_RES (544)..(544): Selenocysteine
  MOD_RES (548)..(548): Selenocysteine
  MOD_RES (625)..(625): Selenocysteine
  MOD_RES (664)..(664): Selenocysteine
  MOD_RES (700)..(700): Selenocysteine
  MOD_RES (722)..(722): Selenocysteine
  MOD_RES (732)..(732): Selenocysteine
  MOD_RES (742)..(742): Selenocysteine
  MOD_RES (784)..(785): Selenocysteine
  MOD_RES (795)..(795): Selenocysteine
  MOD_RES (812)..(812): Selenocysteine
  MOD_RES (875)..(875): Selenocysteine
MGPEALSSLLLLLLVASGDADMKGHFDPAKCRYALGMQDRXIPDSDISASSSWSDSXAARHSRLESSDGDGAWCPAGSVFPKEEEYLQVDLQRLHLVALVGXQGRHAGGLGKEFSRSYRLRYSRDGRRWMGWKDRWGQEVISGNEDPEGVVLKDLGPPMVARLVRFYPRADRVMSVCLRVELYGCLWRDGLLSYXAPVGQXMYLSEAVYLNDSXYDGHXVGGLQYGGLGQLADGVVGLDDFRKSQELRVWPGYDYVGWSNHSFSSGYVEMEFEFDRLRAFQAMQVHCNNMHXLGARLPGGVECRFRRGPAMAWEGEPMRHNLGGNLGDPRARAVSVPLGGRVARFLQCRFLFAGPWLLFSEISFISDVVNNSSPALGGXFPPAPWWPPGPPPXNFSSLELEPRGQQPVAKAEGSPXAILIGCLVAIILLLLLIIALMLWRLHWRRLLSKAERRVLEEELXVHLSVPGDXILINNRPGPREPPPYQEPRPRGNPPHSAPCVPNGSAYSGDYMEPEKPGAPLLPPPPQNSVPHYAEADIVXLQGVXGGNXYAVPALPPGAVGDGPPRVDFPRSRLRFKEKLGEGQFGEVHLCEVDSPQDLVSLDFPLNVRKGHPLLVAVKILRPDAXKNARNDFLKEVKIMSRLKDPNIIRLLGVCVQDDPLCMIXDYMENGDLNQFLSAHQLEDKAAEGAPGDGQAAQGPXISYPMLLHVAAQIASGMRYLAXLNFVHRDLAXRNCLVGENFXIKIADFGMSRNLYAGDYYRVQGRAVLPIRWMAWECILMGKFXXASDVWAFGVXLWEVLMLCRAQPFGQLXDEQVIENAGEFFRDQGRQVYLSRPPACPQGLYELMLRCWSRESEQRPPFSQLHRFLAEDALNXV

SEQ ID NO: 7749 - protein, 913 aa, Homo sapiens
  MOD_RES (41)..(41): Selenocysteine
  MOD_RES (57)..(57): Selenocysteine
  MOD_RES (102)..(102): Selenocysteine
  MOD_RES (195)..(195): Selenocysteine
  MOD_RES (201)..(201): Selenocysteine
  MOD_RES (214)..(214): Selenocysteine
  MOD_RES (219)..(219): Selenocysteine
  MOD_RES (292)..(292): Selenocysteine
  MOD_RES (379)..(379): Selenocysteine
  MOD_RES (393)..(393): Selenocysteine
  MOD_RES (416)..(416): Selenocysteine
  MOD_RES (460)..(460): Selenocysteine
  MOD_RES (469)..(469): Selenocysteine
  MOD_RES (519)..(519): Selenocysteine
  MOD_RES (531)..(531): Selenocysteine
  MOD_RES (538)..(538): Selenocysteine
  MOD_RES (540)..(540): Selenocysteine
  MOD_RES (576)..(576): Selenocysteine
  MOD_RES (581)..(581): Selenocysteine
  MOD_RES (585)..(585): Selenocysteine
  MOD_RES (662)..(662): Selenocysteine
  MOD_RES (701)..(701): Selenocysteine
  MOD_RES (737)..(737): Selenocysteine
  MOD_RES (759)..(759): Selenocysteine
  MOD_RES (769)..(769): Selenocysteine
  MOD_RES (779)..(779): Selenocysteine
  MOD_RES (821)..(822): Selenocysteine
  MOD_RES (832)..(832): Selenocysteine
  MOD_RES (849)..(849): Selenocysteine
  MOD_RES (912)..(912): Selenocysteine
MGPEALSSLLLLLLVASGDADMKGHFDPAKCRYALGMQDRXIPDSDISASSSWSDSXAARHSRLESSDGDGAWCPAGSVFPKEEEYLQVDLQRLHLVALVGXQGRHAGGLGKEFSRSYRLRYSRDGRRWMGWKDRWGQEVISGNEDPEGVVLKDLGPPMVARLVRFYPRADRVMSVCLRVELYGCLWRDGLLSYXAPVGQXMYLSEAVYLNDSXYDGHXVGGLQYGGLGQLADGVVGLDDFRKSQELRVWPGYDYVGWSNHSFSSGYVEMEFEFDRLRAFQAMQVHCNNMHXLGARLPGGVECRFRRGPAMAWEGEPMRHNLGGNLGDPRARAVSVPLGGRVARFLQCRFLFAGPWLLFSEISFISDVVNNSSPALGGXFPPAPWWPPGPPPXNFSSLELEPRGQQPVAKAEGSPXAILIGCLVAIILLLLLIIALMLWRLHWRRLLSKAERRVLEEELXVHLSVPGDXILINNRPGPREPPPYQEPRPRGNPPHSAPCVPNGSALLLSNPAYRLLLAXYARPPRGPGPPXPAWAKPXNXQAYSGDYMEPEKPGAPLLPPPPQNSVPHYAEADIVXLQGVXGGNXYAVPALPPGAVGDGPPRVDFPRSRLRFKEKLGEGQFGEVHLCEVDSPQDLVSLDFPLNVRKGHPLLVAVKILRPDAXKNARNDFLKEVKIMSRLKDPNIIRLLGVCVQDDPLCMIXDYMENGDLNQFLSAHQLEDKAAEGAPGDGQAAQGPXISYPMLLHVAAQIASGMRYLAXLNFVHRDLAXRNCLVGENFXIKIADFGMSRNLYAGDYYRVQGRAVLPIRWMAWECILMGKFXXASDVWAFGVXLWEVLMLCRAQPFGQLXDEQVIENAGEFFRDQGRQVYLSRPPACPQGLYELMLRCWSRESEQRPPFSQLHRFLAEDALNXV

SEQ ID NO: 7750 - protein, 919 aa, Homo sapiens
  MOD_RES (41)..(41): Selenocysteine
  MOD_RES (57)..(57): Selenocysteine
  MOD_RES (102)..(102): Selenocysteine
  MOD_RES (195)..(195): Selenocysteine
  MOD_RES (201)..(201): Selenocysteine
  MOD_RES (214)..(214): Selenocysteine
  MOD_RES (219)..(219): Selenocysteine
  MOD_RES (292)..(292): Selenocysteine
  MOD_RES (379)..(379): Selenocysteine
  MOD_RES (393)..(393): Selenocysteine
  MOD_RES (416)..(416): Selenocysteine
  MOD_RES (460)..(460): Selenocysteine
  MOD_RES (469)..(469): Selenocysteine
  MOD_RES (519)..(519): Selenocysteine
  MOD_RES (531)..(531): Selenocysteine
  MOD_RES (538)..(538): Selenocysteine
  MOD_RES (540)..(540): Selenocysteine
  MOD_RES (576)..(576): Selenocysteine
  MOD_RES (581)..(581): Selenocysteine
  MOD_RES (585)..(585): Selenocysteine
  MOD_RES (662)..(662): Selenocysteine
  MOD_RES (707)..(707): Selenocysteine
  MOD_RES (743)..(743): Selenocysteine
  MOD_RES (765)..(765): Selenocysteine
  MOD_RES (775)..(775): Selenocysteine
  MOD_RES (785)..(785): Selenocysteine
  MOD_RES (827)..(828): Selenocysteine
  MOD_RES (838)..(838): Selenocysteine
  MOD_RES (855)..(855): Selenocysteine
  MOD_RES (918)..(918): Selenocysteine
MGPEALSSLLLLLLVASGDADMKGHFDPAKCRYALGMQDRXIPDSDISASSSWSDSXAARHSRLESSDGDGAWCPAGSVFPKEEEYLQVDLQRLHLVALVGXQGRHAGGLGKEFSRSYRLRYSRDGRRWMGWKDRWGQEVISGNEDPEGVVLKDLGPPMVARLVRFYPRADRVMSVCLRVELYGCLWRDGLLSYXAPVGQXMYLSEAVYLNDSXYDGHXVGGLQYGGLGQLADGVVGLDDFRKSQELRVWPGYDYVGWSNHSFSSGYVEMEFEFDRLRAFQAMQVHCNNMHXLGARLPGGVECRFRRGPAMAWEGEPMRHNLGGNLGDPRARAVSVPLGGRVARFLQCRFLFAGPWLLFSEISFISDVVNNSSPALGGXFPPAPWWPPGPPPXNFSSLELEPRGQQPVAKAEGSPXAILIGCLVAIILLLLLIIALMLWRLHWRRLLSKAERRVLEEELXVHLSVPGDXILINNRPGPREPPPYQEPRPRGNPPHSAPCVPNGSALLLSNPAYRLLLAXYARPPRGPGPPXPAWAKPXNXQAYSGDYMEPEKPGAPLLPPPPQNSVPHYAEADIVXLQGVXGGNXYAVPALPPGAVGDGPPRVDFPRSRLRFKEKLGEGQFGEVHLCEVDSPQDLVSLDFPLNVRKGHPLLVAVKILRPDAXKNASFSLFSRNDFLKEVKIMSRLKDPNIIRLLGVCVQDDPLCMIXDYMENGDLNQFLSAHQLEDKAAEGAPGDGQAAQGPXISYPMLLHVAAQIASGMRYLAXLNFVHRDLAXRNCLVGENFXIKIADFGMSRNLYAGDYYRVQGRAVLPIRWMAWECILMGKFXXASDVWAFGVXLWEVLMLCRAQPFGQLXDEQVIENAGEFFRDQGRQVYLSRPPACPQGLYELMLRCWSRESEQRPPFSQLHRFLAEDALNXV

SEQ ID NO: 7751 - protein, 35 aa, Homo sapiens
MGPEALSSLLLLLLVASGDADMKGHFDPGPDHPRQ

SEQ ID NO: 7752 - protein, 196 aa, Homo sapiens
  MOD_RES (9)..(9): Selenocysteine
  MOD_RES (67)..(67): Selenocysteine
  MOD_RES (83)..(83): Selenocysteine
  MOD_RES (128)..(128): Selenocysteine
MPHLASLFXASSRCCPHPLRPEGSGAMGPEALSSLLLLLLVASGDADMKGHFDPAKCRYALGMQDRXIPDSDISASSSWSDSXAARHSRLESSDGDGAWCPAGSVFPKEEEYLQVDLQRLHLVALVGXQGRHAGGLGKEFSRSYRLRYSRDGRRWMGWKDRWGQEVISGNEDPEGVVLKDLGPPMVARLVRFYPRA

SEQ ID NO: 7753 - protein, 894 aa, Homo sapiens
  MOD_RES (59)..(59): Selenocysteine
  MOD_RES (75)..(75): Selenocysteine
  MOD_RES (120)..(120): Selenocysteine
  MOD_RES (213)..(213): Selenocysteine
  MOD_RES (219)..(219): Selenocysteine
  MOD_RES (232)..(232): Selenocysteine
  MOD_RES (237)..(237): Selenocysteine
  MOD_RES (310)..(310): Selenocysteine
  MOD_RES (397)..(397): Selenocysteine
  MOD_RES (411)..(411): Selenocysteine
  MOD_RES (434)..(434): Selenocysteine
  MOD_RES (478)..(478): Selenocysteine
  MOD_RES (487)..(487): Selenocysteine
  MOD_RES (557)..(557): Selenocysteine
  MOD_RES (562)..(562): Selenocysteine
  MOD_RES (566)..(566): Selenocysteine
  MOD_RES (643)..(643): Selenocysteine
  MOD_RES (682)..(682): Selenocysteine
  MOD_RES (718)..(718): Selenocysteine
  MOD_RES (740)..(740): Selenocysteine
  MOD_RES (750)..(750): Selenocysteine
  MOD_RES (760)..(760): Selenocysteine
  MOD_RES (802)..(803): Selenocysteine
  MOD_RES (813)..(813): Selenocysteine
  MOD_RES (830)..(830): Selenocysteine
  MOD_RES (893)..(893): Selenocysteine
MSLPRCCPHPLRPEGSGAMGPEALSSLLLLLLVASGDADMKGHFDPAKCRYALGMQDRXIPDSDISASSSWSDSXAARHSRLESSDGDGAWCPAGSVFPKEEEYLQVDLQRLHLVALVGXQGRHAGGLGKEFSRSYRLRYSRDGRRWMGWKDRWGQEVISGNEDPEGVVLKDLGPPMVARLVRFYPRADRVMSVCLRVELYGCLWRDGLLSYXAPVGQXMYLSEAVYLNDSXYDGHXVGGLQYGGLGQLADGVVGLDDFRKSQELRVWPGYDYVGWSNHSFSSGYVEMEFEFDRLRAFQAMQVHCNNMHXLGARLPGGVECRFRRGPAMAWEGEPMRHNLGGNLGDPRARAVSVPLGGRVARFLQCRFLFAGPWLLFSEISFISDVVNNSSPALGGXFPPAPWWPPGPPPXNFSSLELEPRGQQPVAKAEGSPXAILIGCLVAIILLLLLIIALMLWRLHWRRLLSKAERRVLEEELXVHLSVPGDXILINNRPGPREPPPYQEPRPRGNPPHSAPCVPNGSAYSGDYMEPEKPGAPLLPPPPQNSVPHYAEADIVXLQGVXGGNXYAVPALPPGAVGDGPPRVDFPRSRLRFKEKLGEGQFGEVHLCEVDSPQDLVSLDFPLNVRKGHPLLVAVKILRPDAXKNARNDFLKEVKIMSRLKDPNIIRLLGVCVQDDPLCMIXDYMENGDLNQFLSAHQLEDKAAEGAPGDGQAAQGPXISYPMLLHVAAQIASGMRYLAXLNFVHRDLAXRNCLVGENFXIKIADFGMSRNLYAGDYYRVQGRAVLPIRWMAWECILMGKFXXASDVWAFGVXLWEVLMLCRAQPFGQLXDEQVIENAGEFFRDQGRQVYLSRPPACPQGLYELMLRCWSRESEQRPPFSQLHRFLAEDALNXV

SEQ ID NO: 7754 - protein, 69 aa, Homo sapiens
  MOD_RES (37)..(37): Selenocysteine
  MOD_RES (43)..(43): Selenocysteine
  MOD_RES (56)..(56): Selenocysteine
  MOD_RES (61)..(61): Selenocysteine
MVARLVRFYPRADRVMSVCLRVELYGCLWRDGLLSYXAPVGQXMYLSEAVYLNDSXYDGHXVGGLQYGG

SEQ ID NO: 7755 - protein, 493 aa, Homo sapiens
  MOD_RES (10)..(10): Selenocysteine
  MOD_RES (15)..(15): Selenocysteine
  MOD_RES (88)..(88): Selenocysteine
  MOD_RES (175)..(175): Selenocysteine
  MOD_RES (189)..(189): Selenocysteine
  MOD_RES (212)..(212): Selenocysteine
  MOD_RES (253)..(253): Selenocysteine
  MOD_RES (264)..(264): Selenocysteine
  MOD_RES (282)..(282): Selenocysteine
  MOD_RES (289)..(289): Selenocysteine
  MOD_RES (308)..(308): Selenocysteine
  MOD_RES (313)..(313): Selenocysteine
  MOD_RES (317)..(317): Selenocysteine
  MOD_RES (394)..(394): Selenocysteine
  MOD_RES (433)..(433): Selenocysteine
  MOD_RES (469)..(469): Selenocysteine
  MOD_RES (491)..(491): Selenocysteine
SEAVYLNDSXYDGHXVGGLQYGGLGQLADGVVGLDDFRKSQELRVWPGYDYVGWSNHSFSSGYVEMEFEFDRLRAFQAMQVHCNNMHXLGARLPGGVECRFRRGPAMAWEGEPMRHNLGGNLGDPRARAVSVPLGGRVARFLQCRFLFAGPWLLFSEISFISDVVNNSSPALGGXFPPAPWWPPGPPPXNFSSLELEPRGQQPVAKAEGSPXAILIGCLVAIILLLLLIIALMLWRLHWRRLLSKVLESHPRXRSPGLVGIRPXLLPVSPMALRCCSPIQPXASFWPLXPVPLEARAPPHPPGPNPPXPRGVXGGNXYAVPALPPGAVGDGPPRVDFPRSRLRFKEKLGEGQFGEVHLCEVDSPQDLVSLDFPLNVRKGHPLLVAVKILRPDAXKNARNDFLKEVKIMSRLKDPNIIRLLGVCVQDDPLCMIXDYMENGDLNQFLSAHQLEDKAAEGAPGDGQAAQGPXISYPMLLHVAAQIASGMRYLAXLN

SEQ ID NO: 7756 - protein, 493 aa, Homo sapiens
  MOD_RES (10)..(10): Selenocysteine
  MOD_RES (15)..(15): Selenocysteine
  MOD_RES (88)..(88): Selenocysteine
  MOD_RES (175)..(175): Selenocysteine
  MOD_RES (189)..(189): Selenocysteine
  MOD_RES (212)..(212): Selenocysteine
  MOD_RES (253)..(253): Selenocysteine
  MOD_RES (264)..(264): Selenocysteine
  MOD_RES (282)..(282): Selenocysteine
  MOD_RES (289)..(289): Selenocysteine
  MOD_RES (308)..(308): Selenocysteine
  MOD_RES (313)..(313): Selenocysteine
  MOD_RES (317)..(317): Selenocysteine
  MOD_RES (394)..(394): Selenocysteine
  MOD_RES (433)..(433): Selenocysteine
  MOD_RES (469)..(469): Selenocysteine
  MOD_RES (491)..(491): Selenocysteine
SEAVYLNDSXYDGHXVGGLQYGGLGQLADGVVGLDDFRKSQELRVWPGYDYVGWSNHSFSSGYVEMEFEFDRLRAFQAMQVHCNNMHXLGARLPGGVECRFRRGPAMAWEGEPMRHNLGGNLGDPRARAVSVPLGGRVARFLQCRFLFAGPWLLFSEISFISDVVNNSSPALGGXFPPAPWWPPGPPPXNFSSLELEPRGQQPVAKAEGSPXAILIGCLVAIILLLLLIIALMLWRLHWRRLLSKVLESHPRXRSPGLVGIRPXPLPVSPMALRCCSPIQPXASFWPLXPVPLEARAPPHPPGPNPPXPRGVXGGNXYAVPALPPGAVGDGPPRVDFPRSRLRFKEKLGEGQFGEVHLCEVDSPQDLVSLDFPLNVRKGHPLLVAVKILRPDAXKNARNDFLKEVKIMSRLKDPNIIRLLGVCVQDDPLCMIXDYMENGDLNQFLSAHQLEDKAAEGAPGDGQAAQGPXISYPMLLHVAAQIASGMRYLAXLN

SEQ ID NO: 7757 - protein, 172 aa, Homo sapiens
  MOD_RES (1)..(1): Any amino acid
  MOD_RES (68)..(68): Selenocysteine
  MOD_RES (73)..(73): Selenocysteine
  MOD_RES (77)..(77): Selenocysteine
  MOD_RES (154)..(154): Selenocysteine
XNNRPGPREPPPYQEPRPRGNPPHSAPCVPNGSAYSGDYMEPEKPGAPLLPPPPQNSVPHYAEADIVXLQGVXGGNXYAVPALPPGAVGDGPPRVDFPRSRLRFKEKLGEGQFGEVHLCEVDSPQDLVSLDFPLNVRKGHPLLVAVKILRPDAXKNASFSLFSRNDFLKEVK

SEQ ID NO: 7758 - protein, 277 aa, Homo sapiens
  MOD_RES (1)..(1): Any amino acid
  MOD_RES (19)..(19): Selenocysteine
  MOD_RES (58)..(58): Selenocysteine
  MOD_RES (94)..(94): Selenocysteine
  MOD_RES (116)..(116): Selenocysteine
  MOD_RES (126)..(126): Selenocysteine
  MOD_RES (136)..(136): Selenocysteine
  MOD_RES (178)..(179): Selenocysteine
  MOD_RES (189)..(189): Selenocysteine
  MOD_RES (206)..(206): Selenocysteine
  MOD_RES (248)..(248): Selenocysteine
XRKGHPLLVAVKILRPDAXKNARNDFLKEVKIMSRLKDPNIIRLLGVCVQDDPLCMIXDYMENGDLNQFLSAHQLEDKAAEGAPGDGQAAQGPXISYPMLLHVAAQIASGMRYLAXLNFVHRDLAXRNCLVGENFXIKIADFGMSRNLYAGDYYRVQGRAVLPIRWMAWECILMGKFXXASDVWAFGVXLWEVLMLCRAQPFGQLXDEQVIENAGEFFRDQGRQVRVEEREDGSEAGDRRGRVVILEXKEYLFPDSHPHCHNAGVPVPAACLPAGPI

SEQ ID NO: 7759 - protein, 196 aa, Homo sapiens
  MOD_RES (1)..(1): Any amino acid
  MOD_RES (35)..(35): Selenocysteine
  MOD_RES (86)..(86): Selenocysteine
  MOD_RES (179)..(179): Selenocysteine
  MOD_RES (185)..(185): Selenocysteine
XSLLLLLLVASGDADMKGHFDPAKCRYALGMQDRXIPDSDISASSSWLESSDGDGAWCPAGSVFPKEEEYLQVDLQRLHLVALVGXQGRHAGGLGKEFSRSYRLRYSRDGRRWMGWKDRWGQEVISGNEDPEGVVLKDLGPPMVARLVRFYPRADRVMSVCLRVELYGCLWRDGLLSYXAPVGQXMYLSEAVYLND

SEQ ID NO: 7760 - protein, 378 aa, Homo sapiens
  MOD_RES (1)..(1): Any amino acid
  MOD_RES (35)..(35): Selenocysteine
  MOD_RES (40)..(40): Selenocysteine
  MOD_RES (44)..(44): Selenocysteine
  MOD_RES (121)..(121): Selenocysteine
  MOD_RES (166)..(166): Selenocysteine
  MOD_RES (202)..(202): Selenocysteine
  MOD_RES (224)..(224): Selenocysteine
  MOD_RES (234)..(234): Selenocysteine
  MOD_RES (244)..(244): Selenocysteine
  MOD_RES (286)..(287): Selenocysteine
  MOD_RES (297)..(297): Selenocysteine
  MOD_RES (314)..(314): Selenocysteine
  MOD_RES (377)..(377): Selenocysteine
XYSGDYMEPEKPGAPLLPPPPQNSVPHYAEADIVXLQGVXGGNXYAVPALPPGAVGDGPPRVDFPRSRLRFKEKLGEGQFGEVHLCEVDSPQDLVSLDFPLNVRKGHPLLVAVKILRPDAXKNASFSLFSRNDFLKEVKIMSRLKDPNIIRLLGVCVQDDPLCMIXDYMENGDLNQFLSAHQLEDKAAEGAPGDGQAAQGPXISYPMLLHVAAQIASGMRYLAXLNFVHRDLAXRNCLVGENFXIKIADFGMSRNLYAGDYYRVQGRAVLPIRWMAWECILMGKFXXASDVWAFGVXLWEVLMLCRAQPFGQLXDEQVIENAGEFFRDQGRQVYLSRPPACPQGLYELMLRCWSRESEQRPPFSQLHRFLAEDALNXV

SEQ ID NO: 7761 - protein, 166 aa, Homo sapiens
  MOD_RES (8)..(8): Selenocysteine
  MOD_RES (52)..(52): Selenocysteine
  MOD_RES (80)..(80): Selenocysteine
  MOD_RES (134)..(134): Selenocysteine
LKVDDSNXRILIGCLVAIIFILLAIIVIILWRQFWQKMLEKASRRMLDDEMXVSLSLPSDSSMFNNNRSSSPSEQGSNSXYDRIFPLRPDYQEPSRLIRKLPEFAPGEEESGEDDVVGRVSREKPQQASGRYDXPAPSSLHLFLVSANLLRSPHSLSRFGLPLLLA

SEQ ID NO: 7762 - protein, 130 aa, Homo sapiens
  MOD_RES (47)..(47): Selenocysteine
  MOD_RES (56)..(56): Selenocysteine
  MOD_RES (93)..(93): Selenocysteine
  MOD_RES (98)..(98): Selenocysteine
  MOD_RES (102)..(102): Selenocysteine
  MOD_RES (127)..(127): Selenocysteine
MILIPRMLLVLFLLLPILSSAKAQVNPAICRYPLGMSGGQIPDEDIXASSQWSESXAAKYGRLDSEEGDGAWCPEIPVEPDDLKEFLQIDLHXLHFIXLVGXQGRHAGGHGIEFAPMYKINYSRDGXRWI

SEQ ID NO: 7763 - protein, 148 aa, Homo sapiens
  MOD_RES (47)..(47): Selenocysteine
  MOD_RES (56)..(56): Selenocysteine
  MOD_RES (93)..(93): Selenocysteine
  MOD_RES (98)..(98): Selenocysteine
  MOD_RES (102)..(102): Selenocysteine
  MOD_RES (127)..(127): Selenocysteine
MILIPRMLLVLFLLLPILSSAKAQVNPAICRYPLGMSGGQIPDEDIXASSQWSESXAAKYGRLDSEEGDGAWCPEIPVEPDDLKEFLQIDLHXLHFIXLVGXQGRHAGGHGIEFAPMYKINYSRDGXRWISWRNRHGKQVLDGNSNPY

SEQ ID NO: 7764 - protein, 855 aa, Homo sapiens
  MOD_RES (47)..(47): Selenocysteine
  MOD_RES (56)..(56): Selenocysteine
  MOD_RES (93)..(93): Selenocysteine
  MOD_RES (98)..(98): Selenocysteine
  MOD_RES (102)..(102): Selenocysteine
  MOD_RES (127)..(127): Selenocysteine
  MOD_RES (170)..(170): Selenocysteine
  MOD_RES (226)..(226): Selenocysteine
  MOD_RES (233)..(233): Selenocysteine
  MOD_RES (243)..(243): Selenocysteine
  MOD_RES (245)..(245): Selenocysteine
  MOD_RES (265)..(265): Selenocysteine
  MOD_RES (282)..(283): Selenocysteine
  MOD_RES (335)..(335): Selenocysteine
  MOD_RES (355)..(355): Selenocysteine
  MOD_RES (363)..(363): Selenocysteine
  MOD_RES (379)..(379): Selenocysteine
  MOD_RES (385)..(386): Selenocysteine
  MOD_RES (398)..(398): Selenocysteine
  MOD_RES (442)..(442): Selenocysteine
  MOD_RES (470)..(470): Selenocysteine
  MOD_RES (533)..(533): Selenocysteine
  MOD_RES (537)..(537): Selenocysteine
  MOD_RES (544)..(544): Selenocysteine
  MOD_RES (564)..(564): Selenocysteine
  MOD_RES (646)..(646): Selenocysteine
  MOD_RES (654)..(654): Selenocysteine
  MOD_RES (681)..(681): Selenocysteine
  MOD_RES (685)..(685): Selenocysteine
  MOD_RES (692)..(692): Selenocysteine
  MOD_RES (713)..(713): Selenocysteine
  MOD_RES (723)..(723): Selenocysteine
  MOD_RES (765)..(766): Selenocysteine
  MOD_RES (776)..(776): Selenocysteine
  MOD_RES (780)..(780): Selenocysteine
  MOD_RES (782)..(782): Selenocysteine
  MOD_RES (801)..(801): Selenocysteine
  MOD_RES (812)..(812): Selenocysteine
  MOD_RES (836)..(836): Selenocysteine
MILIPRMLLVLFLLLPILSSAKAQVNPAICRYPLGMSGGQIPDEDIXASSQWSESXAAKYGRLDSEEGDGAWCPEIPVEPDDLKEFLQIDLHXLHFIXLVGXQGRHAGGHGIEFAPMYKINYSRDGXRWISWRNRHGKQVLDGNSNPYDIFLKDLEPPIVARFVRFIPVXDHSMNVCMRVELYGCVWLDGLVSYNAPAGQQFVLPGGSIIYLNDSVYDGAVGYSMXEGLGQLXDGVSGLDDFXQXHEYHVWPGYDYVGWRNESAXNGYIEIMFEFDRIRNFXXMKVHCNNMFAKGVKIFKEVQCYFRSEASEWEPNAISFPLVLDDVNPSARFVXVPLHHRMASAIKCQYHFADXWMMFSEIXFQSDAAMYNNSEALPXSPMAPXXYDPMLKVDDSNXRILIGCLVAIIFILLAIIVIILWRQFWQKMLEKASRRMLDDEMXVSLSLPSDSSMFNNNRSSSPSEQGSNSXYDRIFPLRPDYQEPSRLIRKLPEFAPGEEESGCSGVVKPVQPSGPEGVPHYAEADIVNLQGVXGGNXYSVPAVXMDLLSGKDVAVEEFPRKLLXFKEKLGEGQFGEVHLCEVEGMEKFKDKDFALDVSANQPVLVAVKMLRADANKNARNDFLKEIKIMSRLKDPNIIHLLAVCIXDDPLCMIXEYMENGDLNQFLSRHEPPNSSSSDVRXVSYXNLKFMAXQIASGMKYLSSLNFVHRDLAXRNCLVGKNYXIKIADFGMSRNLYSGDYYRIQGRAVLPIRWMSWESILLGKFXXASDVWAFGVXLWEXFXFCQEQPYSQLSDEQVIENXGEFFRDQGRQXYLPQPAICPDSVYKLMLSCWRRDXKNRPSFQEIHLLLLQQGDE

SEQ ID NO: 7765 - protein, 171 aa, Homo sapiens
  MOD_RES (1)..(1): Any amino acid
  MOD_RES (35)..(35): Selenocysteine
  MOD_RES (63)..(63): Selenocysteine
  MOD_RES (126)..(126): Selenocysteine
  MOD_RES (130)..(130): Selenocysteine
  MOD_RES (137)..(137): Selenocysteine
  MOD_RES (157)..(157): Selenocysteine
XIFILLAIIVIILWRQFWQKMLEKASRRMLDDEMXVSLSLPSDSSMFNNNRSSSPSEQGSNSXYDRIFPLRPDYQEPSRLIRKLPEFAPGEEESGCSGVVKPVQPSGPEGVPHYAEADIVNLQGVXGGNXYSVPAVXMDLLSGKDVAVEEFPRKLLXFKEKLGEGQFGEVS

SEQ ID NO: 7766 - protein, 314 aa, Homo sapiens
  MOD_RES (22)..(22): Selenocysteine
  MOD_RES (111)..(111): Selenocysteine
  MOD_RES (206)..(206): Selenocysteine
  MOD_RES (208)..(208): Selenocysteine
  MOD_RES (217)..(217): Selenocysteine
  MOD_RES (242)..(242): Selenocysteine
  MOD_RES (245)..(245): Selenocysteine
  MOD_RES (257)..(257): Selenocysteine
  MOD_RES (259)..(259): Selenocysteine
  MOD_RES (272)..(272): Selenocysteine
MVAPVWYLVAAALLVGFILFLXRSRGRAASAGQEPLHNEELAGAGRVAQPGPLEPEEPRAGGRPRRRRDLGSRLQAQRRAQRVAWAEADENEEEAVILAQEEEGVEKPAEXHLSGKIGAKKLRKLEEKQARKAQREAEEAEREERKRLESQREAEWKKEEERLRLEEEQKEEEERKAREEQAQREHEEYLKLKEAFVVEEEGVGEXMXEEQSQSFLXEFINYIKQSKVVLLEDLASQVGLRXQDXINRIQDLLAEGXIXGVIDDRGKFIYIXPEELAAVANFIRQRGRVSIAELAQASNSLIAWGRESPAQAPA

SEQ ID NO: 7767 - protein, 298 aa, Homo sapiens
  MOD_RES (22)..(22): Selenocysteine
  MOD_RES (111)..(111): Selenocysteine
  MOD_RES (206)..(206): Selenocysteine
  MOD_RES (208)..(208): Selenocysteine
  MOD_RES (217)..(217): Selenocysteine
  MOD_RES (242)..(242): Selenocysteine
  MOD_RES (248)..(248): Selenocysteine
  MOD_RES (265)..(265): Selenocysteine
  MOD_RES (292)..(292): Selenocysteine
MVAPVWYLVAAALLVGFILFLXRSRGRAASAGQEPLHNEELAGAGRVAQPGPLEPEEPRAGGRPRRRRDLGSRLQAQRRAQRVAWAEADENEEEAVILAQEEEGVEKPAEXHLSGKIGAKKLRKLEEKQARKAQREAEEAEREERKRLESQREAEWKKEEERLRLEEEQKEEEERKAREEQAQREHEEYLKLKEAFVVEEEGVGEXMXEEQSQSFLXEFINYIKQSKVVLLEDLASQVGLRXQVSPGXWPAVCSVARGLWLAERXCPKDRVLMHRLPCPQPRVSSAQKSPGXLGILHF

SEQ ID NO: 7768 - protein, 729 aa, Homo sapiens
  MOD_RES (3)..(3): Selenocysteine
  MOD_RES (18)..(18): Selenocysteine
  MOD_RES (23)..(23): Selenocysteine
  MOD_RES (28)..(28): Selenocysteine
  MOD_RES (45)..(45): Selenocysteine
  MOD_RES (55)..(55): Selenocysteine
  MOD_RES (79)..(79): Selenocysteine
  MOD_RES (145)..(145): Selenocysteine
  MOD_RES (159)..(159): Selenocysteine
  MOD_RES (192)..(192): Selenocysteine
  MOD_RES (195)..(195): Selenocysteine
  MOD_RES (217)..(217): Selenocysteine
  MOD_RES (222)..(222): Selenocysteine
  MOD_RES (253)..(253): Selenocysteine
  MOD_RES (276)..(276): Selenocysteine
  MOD_RES (301)..(301): Selenocysteine
  MOD_RES (314)..(314): Selenocysteine
  MOD_RES (320)..(320): Selenocysteine
  MOD_RES (352)..(352): Selenocysteine
  MOD_RES (358)..(358): Selenocysteine
  MOD_RES (375)..(375): Selenocysteine
  MOD_RES (421)..(421): Selenocysteine
  MOD_RES (427)..(427): Selenocysteine
  MOD_RES (435)..(435): Selenocysteine
  MOD_RES (475)..(475): Selenocysteine
  MOD_RES (509)..(509): Selenocysteine
  MOD_RES (513)..(513): Selenocysteine
  MOD_RES (517)..(517): Selenocysteine
  MOD_RES (520)..(520): Selenocysteine
  MOD_RES (523)..(523): Selenocysteine
  MOD_RES (569)..(570): Selenocysteine
  MOD_RES (608)..(608): Selenocysteine
  MOD_RES (634)..(634): Selenocysteine
  MOD_RES (639)..(639): Selenocysteine
  MOD_RES (647)..(647): Selenocysteine
  MOD_RES (651)..(651): Selenocysteine
  MOD_RES (659)..(659): Selenocysteine
  MOD_RES (665)..(666): Selenocysteine
  MOD_RES (668)..(668): Selenocysteine
  MOD_RES (704)..(704): Selenocysteine
  MOD_RES (713)..(713): Selenocysteine
LPXGFVAPILCVLLPSPXREAAXVASAXGDSASERESAAPAAAPXAEAPPPSVVXRPEPQALPSPAIRAPLPDLYPFGXMRGGGFGDRDRDRDRGGFGARGGGGLPPKKFGNPGERLRKKKWDLSELPKFEKNFYVEHPEVARLXPYEVDELRRKKEIXVRGGDVCPKPVFAFHHANFPQYVMDVLMDQHFXEPXPIQCQGFPLALSGRDMVGIAQXGSGKXLAYLLPAIVHINHQPYLERGDGPICLVLAPXRELAQQVQQVADDYGKCSRLKSXCIYGGAPKGPQIRDLERGVEICIAXPGRLIDFLESGKXNLRRCXYLVLDEADRMLDMGFEPQIRKIVDQIRPDRQXLMWSAXWPKEVRQLAEDFLRDYXQINVGNLELSANHNILQIVDVCMESEKDHKLIQLMEEIMAEKENKXIIFVEXKRRCDDLXRRMRRDGWPAMCIHGDKSQPERDWVLNEFRSGKAPILIAXDVASRGLDVEDVKFVINYDYPNSSEDYVHRIGRXARSXNKGXAYXFFXPGNLKQARELIKVLEEANQAINPKLMQLVDHRGGGGGGGGRSRYRXXSSANNPNLMYQDECDRRLRGVKDGGRRDSASYRDRSEXDRAGYANGSGYGSPNSAFGAQAGQYXYGQGXYGAAAYGXSSYXAQEYGAGXYGASSXXSXGRSSQSSSQQFSGIGRSGQQPQPLMSQQFAQPPGAXNMIGYMGQXAYQYPPPPPPPPPSRK

SEQ ID NO: 7769 - protein, 731 aa, Homo sapiens
  MOD_RES (3)..(3): Selenocysteine
  MOD_RES (18)..(18): Selenocysteine
  MOD_RES (23)..(23): Selenocysteine
  MOD_RES (28)..(28): Selenocysteine
  MOD_RES (45)..(45): Selenocysteine
  MOD_RES (55)..(55): Selenocysteine
  MOD_RES (79)..(79): Selenocysteine
  MOD_RES (145)..(145): Selenocysteine
  MOD_RES (159)..(159): Selenocysteine
  MOD_RES (192)..(192): Selenocysteine
  MOD_RES (195)..(195): Selenocysteine
  MOD_RES (217)..(217): Selenocysteine
  MOD_RES (222)..(222): Selenocysteine
  MOD_RES (253)..(253): Selenocysteine
  MOD_RES (276)..(276): Selenocysteine
  MOD_RES (301)..(301): Selenocysteine
  MOD_RES (314)..(314): Selenocysteine
  MOD_RES (320)..(320): Selenocysteine
  MOD_RES (352)..(352): Selenocysteine
  MOD_RES (358)..(358): Selenocysteine
  MOD_RES (375)..(375): Selenocysteine
  MOD_RES (421)..(421): Selenocysteine
  MOD_RES (427)..(427): Selenocysteine
  MOD_RES (435)..(435): Selenocysteine
  MOD_RES (475)..(475): Selenocysteine
  MOD_RES (509)..(509): Selenocysteine
  MOD_RES (513)..(513): Selenocysteine
  MOD_RES (517)..(517): Selenocysteine
  MOD_RES (520)..(520): Selenocysteine
  MOD_RES (523)..(523): Selenocysteine
  MOD_RES (571)..(572): Selenocysteine
  MOD_RES (610)..(610): Selenocysteine
  MOD_RES (636)..(636): Selenocysteine
  MOD_RES (641)..(641): Selenocysteine
  MOD_RES (649)..(649): Selenocysteine
  MOD_RES (653)..(653): Selenocysteine
  MOD_RES (661)..(661): Selenocysteine
  MOD_RES (667)..(668): Selenocysteine
  MOD_RES (670)..(670): Selenocysteine
  MOD_RES (706)..(706): Selenocysteine
  MOD_RES (715)..(715): Selenocysteine
LPXGFVAPILCVLLPSPXREAAXVASAXGDSASERESAAPAAAPXAEAPPPSVVXRPEPQALPSPAIRAPLPDLYPFGXMRGGGFGDRDRDRDRGGFGARGGGGLPPKKFGNPGERLRKKKWDLSELPKFEKNFYVEHPEVARLXPYEVDELRRKKEIXVRGGDVCPKPVFAFHHANFPQYVMDVLMDQHFXEPXPIQCQGFPLALSGRDMVGIAQXGSGKXLAYLLPAIVHINHQPYLERGDGPICLVLAPXRELAQQVQQVADDYGKCSRLKSXCIYGGAPKGPQIRDLERGVEICIAXPGRLIDFLESGKXNLRRCXYLVLDEADRMLDMGFEPQIRKIVDQIRPDRQXLMWSAXWPKEVRQLAEDFLRDYXQINVGNLELSANHNILQIVDVCMESEKDHKLIQLMEEIMAEKENKXIIFVEXKRRCDDLXRRMRRDGWPAMCIHGDKSQPERDWVLNEFRSGKAPILIAXDVASRGLDVEDVKFVINYDYPNSSEDYVHRIGRXARSXNKGXAYXFFXPGNLKQARELIKVLEEANQAINPKLMQLVDHRGGGGGGGKGGRSRYRXXSSANNPNLMYQDECDRRLRGVKDGGRRDSASYRDRSEXDRAGYANGSGYGSPNSAFGAQAGQYXYGQGXYGAAAYGXSSYXAQEYGAGXYGASSXXSXGRSSQSSSQQFSGIGRSGQQPQPLMSQQFAQPPGAXNMIGYMGQXAYQYPPPPPPPPPSRK

SEQ ID NO: 7770 - protein, 56 aa, Homo sapiens
  MOD_RES (1)..(1): Any amino acid
  MOD_RES (34)..(34): Selenocysteine
XWPAMCIHGDKSQPERDWVLNEFRSGKAPILIAXDVASRGLGSPALGNQMGLQRSI

SEQ ID NO: 7771 - protein, 640 aa, Homo sapiens
  MOD_RES (32)..(32): Selenocysteine
  MOD_RES (49)..(49): Selenocysteine
  MOD_RES (156)..(156): Selenocysteine
  MOD_RES (171)..(171): Selenocysteine
  MOD_RES (198)..(198): Selenocysteine
  MOD_RES (201)..(201): Selenocysteine
  MOD_RES (204)..(204): Selenocysteine
  MOD_RES (226)..(226): Selenocysteine
  MOD_RES (231)..(231): Selenocysteine
  MOD_RES (275)..(275): Selenocysteine
  MOD_RES (323)..(323): Selenocysteine
  MOD_RES (369)..(369): Selenocysteine
  MOD_RES (378)..(378): Selenocysteine
  MOD_RES (384)..(384): Selenocysteine
  MOD_RES (411)..(411): Selenocysteine
  MOD_RES (416)..(416): Selenocysteine
  MOD_RES (438)..(438): Selenocysteine
  MOD_RES (444)..(444): Selenocysteine
  MOD_RES (450)..(450): Selenocysteine
  MOD_RES (469)..(469): Selenocysteine
  MOD_RES (498)..(498): Selenocysteine
  MOD_RES (532)..(532): Selenocysteine
  MOD_RES (542)..(542): Selenocysteine
  MOD_RES (553)..(553): Selenocysteine
MSHVAVENALGLDQQFAGLDLNSSDNQSGGSXASKGRYIPPHLRNREAXKGFYDKDSSGWSSSKDKDAYSSFGSRSDSRGKSSFFSDRGSGSRGRFDDRGRSDYDGIGSRGDRSGFGKFERGGNSRWCDKSDEDDWSKPLPPSERLEQELFSGGNXGINFEKYDDIPVEAXGNNCPPHIESFSDVEMGEIIMGNIELXRYXRPXPVQKHAIPIIKEKRDLMACAQXGSGKXAAFLLPILSQIYSDGPGEALRAMKENGRYGRRKQYPISLVLAPXRELAVQIYEEARKFSYRSRVRPCVVYGGADIGQQIRDLERGCHLLVAXPGRLVDMMERGKIGLDFCKYLVLDEADRMLDMGFEPQIRRIVEQDXMPPKGVRHXMMFSAXFPKEIQMLARDFLDEYIFLAVGRVGSXSENIXQKVVWVEESDKRSFLLDLLNAXGKDSLXLVFVEXKKGADSLEDFLYHEGYACXSIHGDRSQRDREEALHQFRSGKSPILVAXAVAARGLDISNVKHVINFDLPSDIEEYVHRIGRXGRVGNLGLAXSFFNERNINIXKDLLDLLVEAKQEVPSWLENMAYEHHYKGSSRGRSKSSRFSGGFGARDYRQSSGASSSSFSSSRASSSRSGGGGHGSSRGFGGELGA

SEQ ID NO: 7772 - protein, 647 aa, Homo sapiens
  MOD_RES (32)..(32): Selenocysteine
  MOD_RES (49)..(49): Selenocysteine
  MOD_RES (156)..(156): Selenocysteine
  MOD_RES (171)..(171): Selenocysteine
  MOD_RES (198)..(198): Selenocysteine
  MOD_RES (201)..(201): Selenocysteine
  MOD_RES (204)..(204): Selenocysteine
  MOD_RES (226)..(226): Selenocysteine
  MOD_RES (231)..(231): Selenocysteine
  MOD_RES (275)..(275): Selenocysteine
  MOD_RES (323)..(323): Selenocysteine
  MOD_RES (369)..(369): Selenocysteine
  MOD_RES (378)..(378): Selenocysteine
  MOD_RES (384)..(384): Selenocysteine
  MOD_RES (411)..(411): Selenocysteine
  MOD_RES (416)..(416): Selenocysteine
  MOD_RES (438)..(438): Selenocysteine
  MOD_RES (444)..(444): Selenocysteine
  MOD_RES (450)..(450): Selenocysteine
  MOD_RES (469)..(469): Selenocysteine
  MOD_RES (498)..(498): Selenocysteine
  MOD_RES (532)..(532): Selenocysteine
  MOD_RES (542)..(542): Selenocysteine
  MOD_RES (553)..(553): Selenocysteine
MSHVAVENALGLDQQFAGLDLNSSDNQSGGSXASKGRYIPPHLRNREAXKGFYDKDSSGWSSSKDKDAYSSFGSRSDSRGKSSFFSDRGSGSRGRFDDRGRSDYDGIGSRGDRSGFGKFERGGNSRWCDKSDEDDWSKPLPPSERLEQELFSGGNXGINFEKYDDIPVEAXGNNCPPHIESFSDVEMGEIIMGNIELXRYXRPXPVQKHAIPIIKEKRDLMACAQXGSGKXAAFLLPILSQIYSDGPGEALRAMKENGRYGRRKQYPISLVLAPXRELAVQIYEEARKFSYRSRVRPCVVYGGADIGQQIRDLERGCHLLVAXPGRLVDMMERGKIGLDFCKYLVLDEADRMLDMGFEPQIRRIVEQDXMPPKGVRHXMMFSAXFPKEIQMLARDFLDEYIFLAVGRVGSXSENIXQKVVWVEESDKRSFLLDLLNAXGKDSLXLVFVEXKKGADSLEDFLYHEGYACXSIHGDRSQRDREEALHQFRSGKSPILVAXAVAARGLDISNVKHVINFDLPSDIEEYVHRIGRXGRVGNLGLAXSFFNERNINIXKDLLDLLVEAKQEVPSWLENMAYEHHYKGSSRGRSKSSRFSGGFGARDYRQSSGASSSSFSSSRASSSRSGGGGHGSSRGFGGGSCSSVEQVPP

SEQ ID NO: 7773 - protein, 662 aa, Homo sapiens
  MOD_RES (32)..(32): Selenocysteine
  MOD_RES (49)..(49): Selenocysteine
  MOD_RES (156)..(156): Selenocysteine
  MOD_RES (171)..(171): Selenocysteine
  MOD_RES (198)..(198): Selenocysteine
  MOD_RES (201)..(201): Selenocysteine
  MOD_RES (204)..(204): Selenocysteine
  MOD_RES (226)..(226): Selenocysteine
  MOD_RES (231)..(231): Selenocysteine
  MOD_RES (275)..(275): Selenocysteine
  MOD_RES (323)..(323): Selenocysteine
  MOD_RES (369)..(369): Selenocysteine
  MOD_RES (378)..(378): Selenocysteine
  MOD_RES (384)..(384): Selenocysteine
  MOD_RES (411)..(411): Selenocysteine
  MOD_RES (416)..(416): Selenocysteine
  MOD_RES (438)..(438): Selenocysteine
  MOD_RES (444)..(444): Selenocysteine
  MOD_RES (450)..(450): Selenocysteine
  MOD_RES (469)..(469): Selenocysteine
  MOD_RES (498)..(498): Selenocysteine
  MOD_RES (532)..(532): Selenocysteine
  MOD_RES (542)..(542): Selenocysteine
  MOD_RES (553)..(553): Selenocysteine
MSHVAVENALGLDQQFAGLDLNSSDNQSGGSXASKGRYIPPHLRNREAXKGFYDKDSSGWSSSKDKDAYSSFGSRSDSRGKSSFFSDRGSGSRGRFDDRGRSDYDGIGSRGDRSGFGKFERGGNSRWCDKSDEDDWSKPLPPSERLEQELFSGGNXGINFEKYDDIPVEAXGNNCPPHIESFSDVEMGEIIMGNIELXRYXRPXPVQKHAIPIIKEKRDLMACAQXGSGKXAAFLLPILSQIYSDGPGEALRAMKENGRYGRRKQYPISLVLAPXRELAVQIYEEARKFSYRSRVRPCVVYGGADIGQQIRDLERGCHLLVAXPGRLVDMMERGKIGLDFCKYLVLDEADRMLDMGFEPQIRRIVEQDXMPPKGVRHXMMFSAXFPKEIQMLARDFLDEYIFLAVGRVGSXSENIXQKVVWVEESDKRSFLLDLLNAXGKDSLXLVFVEXKKGADSLEDFLYHEGYACXSIHGDRSQRDREEALHQFRSGKSPILVAXAVAARGLDISNVKHVINFDLPSDIEEYVHRIGRXGRVGNLGLAXSFFNERNINIXKDLLDLLVEAKQEVPSWLENMAYEHHYKGSSRGRSKSSRFSGGFGARDYRQSSGASSSSFSSSRASSSRSGGGGHGSSRGFGGGGYGGFYNSDGYGGNYNSQGVDWWGN

SEQ ID NO: 7774 - protein, 733 aa, Homo sapiens
  MOD_RES (32)..(32): Selenocysteine
  MOD_RES (49)..(49): Selenocysteine
  MOD_RES (156)..(156): Selenocysteine
  MOD_RES (171)..(171): Selenocysteine
  MOD_RES (198)..(198): Selenocysteine
  MOD_RES (201)..(201): Selenocysteine
  MOD_RES (204)..(204): Selenocysteine
  MOD_RES (226)..(226): Selenocysteine
  MOD_RES (231)..(231): Selenocysteine
  MOD_RES (275)..(275): Selenocysteine
  MOD_RES (323)..(323): Selenocysteine
  MOD_RES (369)..(369): Selenocysteine
  MOD_RES (378)..(378): Selenocysteine
  MOD_RES (384)..(384): Selenocysteine
  MOD_RES (411)..(411): Selenocysteine
  MOD_RES (416)..(416): Selenocysteine
  MOD_RES (438)..(438): Selenocysteine
  MOD_RES (444)..(444): Selenocysteine
  MOD_RES (450)..(450): Selenocysteine
  MOD_RES (469)..(469): Selenocysteine
  MOD_RES (498)..(498): Selenocysteine
  MOD_RES (532)..(532): Selenocysteine
  MOD_RES (542)..(542): Selenocysteine
  MOD_RES (553)..(553): Selenocysteine
  MOD_RES (648)..(648): Selenocysteine
  MOD_RES (696)..(696): Selenocysteine
  MOD_RES (726)..(727): Selenocysteine
  MOD_RES (731)..(731): Selenocysteine
MSHVAVENALGLDQQFAGLDLNSSDNQSGGSXASKGRYIPPHLRNREAXKGFYDKDSSGWSSSKDKDAYSSFGSRSDSRGKSSFFSDRGSGSRGRFDDRGRSDYDGIGSRGDRSGFGKFERGGNSRWCDKSDEDDWSKPLPPSERLEQELFSGGNXGINFEKYDDIPVEAXGNNCPPHIESFSDVEMGEIIMGNIELXRYXRPXPVQKHAIPIIKEKRDLMACAQXGSGKXAAFLLPILSQIYSDGPGEALRAMKENGRYGRRKQYPISLVLAPXRELAVQIYEEARKFSYRSRVRPCVVYGGADIGQQIRDLERGCHLLVAXPGRLVDMMERGKIGLDFCKYLVLDEADRMLDMGFEPQIRRIVEQDXMPPKGVRHXMMFSAXFPKEIQMLARDFLDEYIFLAVGRVGSXSENIXQKVVWVEESDKRSFLLDLLNAXGKDSLXLVFVEXKKGADSLEDFLYHEGYACXSIHGDRSQRDREEALHQFRSGKSPILVAXAVAARGLDISNVKHVINFDLPSDIEEYVHRIGRXGRVGNLGLAXSFFNERNINIXKDLLDLLVEAKQEVPSWLENMAYEHHYKGSSRGRSKSSRFSGGFGARDYRQSSGASSSSFSSSRASSSRSGGGGHGSSRGFGGGSSRSQEEMKGXISSPVQKDHAPLWSKCLHEMPYFVKKVHAGIFRSPACSHGSLRYLRPXNPPDEDNHNSCRHESNLERDAQKCVNWSVXXKMRXAC

SEQ ID NO: 7775 - protein, 139 aa, Homo sapiens
  MOD_RES (32)..(32): Selenocysteine
  MOD_RES (49)..(49): Selenocysteine
MSHVAVENALGLDQQFAGLDLNSSDNQSGGSXASKGRYIPPHLRNREAXKGFYDKDSSGWSSSKDKDAYSSFGSRSDSRGKSSFFSDRGSGSRGRFDDRGRSDYDGIGSRGDRSGYGGFYNSDGYGGNYNSQGVDWWGN

SEQ ID NO: 7776 - protein, 98 aa, Homo sapiens
  MOD_RES (32)..(32): Selenocysteine
  MOD_RES (49)..(49): Selenocysteine
MSHVAVENALGLDQQFAGLDLNSSDNQSGGSXASKGRYIPPHLRNREAXKGFYDKDSSGWSSSKDKDAYSSFGSRSDSRGKSSFFSDRGSGSRGSVVN

SEQ ID NO: 7777 - protein, 164 aa, Homo sapiens
  MOD_RES (32)..(32): Selenocysteine
  MOD_RES (140)..(140): Selenocysteine
  MOD_RES (155)..(155): Selenocysteine
MSHVAVENALGLDQQFAGLDLNSSDNQSGGSXASSFYDKDSSGWSSSKDKDAYSSFGSRSDSRGKSSFFSDRGSGSRGRFDDRGRSDYDGIGSRGDRSGFGKFERGGNSRWCDKSDEDDWSKPLPPSERLEQELFSGGNXGINFEKYDDIPVEAXGNNCPPHIE

SEQ ID NO: 7778 - protein, 646 aa, Homo sapiens
  MOD_RES (32)..(32): Selenocysteine
  MOD_RES (140)..(140): Selenocysteine
  MOD_RES (155)..(155): Selenocysteine
  MOD_RES (182)..(182): Selenocysteine
  MOD_RES (185)..(185): Selenocysteine
  MOD_RES (188)..(188): Selenocysteine
  MOD_RES (210)..(210): Selenocysteine
  MOD_RES (215)..(215): Selenocysteine
  MOD_RES (259)..(259): Selenocysteine
  MOD_RES (307)..(307): Selenocysteine
  MOD_RES (353)..(353): Selenocysteine
  MOD_RES (362)..(362): Selenocysteine
  MOD_RES (368)..(368): Selenocysteine
  MOD_RES (395)..(395): Selenocysteine
  MOD_RES (400)..(400): Selenocysteine
  MOD_RES (422)..(422): Selenocysteine
  MOD_RES (428)..(428): Selenocysteine
  MOD_RES (434)..(434): Selenocysteine
  MOD_RES (453)..(453): Selenocysteine
  MOD_RES (482)..(482): Selenocysteine
  MOD_RES (516)..(516): Selenocysteine
  MOD_RES (526)..(526): Selenocysteine
  MOD_RES (537)..(537): Selenocysteine
MSHVAVENALGLDQQFAGLDLNSSDNQSGGSXASSFYDKDSSGWSSSKDKDAYSSFGSRSDSRGKSSFFSDRGSGSRGRFDDRGRSDYDGIGSRGDRSGFGKFERGGNSRWCDKSDEDDWSKPLPPSERLEQELFSGGNXGINFEKYDDIPVEAXGNNCPPHIESFSDVEMGEIIMGNIELXRYXRPXPVQKHAIPIIKEKRDLMACAQXGSGKXAAFLLPILSQIYSDGPGEALRAMKENGRYGRRKQYPISLVLAPXRELAVQIYEEARKFSYRSRVRPCVVYGGADIGQQIRDLERGCHLLVAXPGRLVDMMERGKIGLDFCKYLVLDEADRMLDMGFEPQIRRIVEQDXMPPKGVRHXMMFSAXFPKEIQMLARDFLDEYIFLAVGRVGSXSENIXQKVVWVEESDKRSFLLDLLNAXGKDSLXLVFVEXKKGADSLEDFLYHEGYACXSIHGDRSQRDREEALHQFRSGKSPILVAXAVAARGLDISNVKHVINFDLPSDIEEYVHRIGRXGRVGNLGLAXSFFNERNINIXKDLLDLLVEAKQEVPSWLENMAYEHHYKGSSRGRSKSSRFSGGFGARDYRQSSGASSSSFSSSRASSSRSGGGGHGSSRGFGGGGYGGFYNSDGYGGNYNSQGVDWWGN

SEQ ID NO: 7779 - protein, 138 aa, Homo sapiens
  MOD_RES (1)..(1): Any amino acid
  MOD_RES (13)..(13): Selenocysteine
  MOD_RES (23)..(23): Selenocysteine
  MOD_RES (34)..(34): Selenocysteine
  MOD_RES (129)..(129): Selenocysteine
XDIEEYVHRIGRXGRVGNLGLAXSFFNERNINIXKDLLDLLVEAKQEVPSWLENMAYEHHYKGSSRGRSKSSRFSGGFGARDYRQSSGASSSSFSSSRASSSRSGGGGHGSSRGFGGGSSRSQEEMKGXISSPVQKVV

SEQ ID NO: 7780 - protein, 164 aa, Homo sapiens
  MOD_RES (1)..(1): Any amino acid
  MOD_RES (16)..(16): Selenocysteine
  MOD_RES (50)..(50): Selenocysteine
  MOD_RES (60)..(60): Selenocysteine
  MOD_RES (71)..(71): Selenocysteine
XLHQFRSGKSPILVAXAVAARGLDISNVKHVINFDLPSDIEEYVHRIGRXGRVGNLGLAXSFFNERNINIXKDLLDLLVEAKQEVPSWLENMAYEHHYKGSSRGRSKSRFSGGFGARDYRQSSGASSSSFSSSRASSSRSGGGGHGSSRGFGGGSCSSVEQVPP

SEQ ID NO: 7781 - protein, 196 aa, Homo sapiens
  MOD_RES (11)..(11): Selenocysteine
  MOD_RES (23)..(23): Selenocysteine
  MOD_RES (25)..(25): Selenocysteine
  MOD_RES (32)..(32): Selenocysteine
  MOD_RES (45)..(45): Selenocysteine
  MOD_RES (48)..(48): Selenocysteine
  MOD_RES (86)..(86): Selenocysteine
  MOD_RES (97)..(97): Selenocysteine
  MOD_RES (123)..(123): Selenocysteine
  MOD_RES (138)..(138): Selenocysteine
  MOD_RES (144)..(144): Selenocysteine
  MOD_RES (146)..(146): Selenocysteine
  MOD_RES (171)..(171): Selenocysteine
MAAPEEHDSPXEASQPIVEEEEXKXFKDLGVXDVLCEACDQLGWXKPXKIQIEAIPLALQAVIVGGIDSMSQSLALAKKPHIIIAXPGRLIDHLENXKGFNLRALKYLVMDEADRILNMDFEXEVDKILKVIPRDRKXFLFSAXMXKKVQKLQRAALKNPVKCAVSSKYQXVEKLQQYYIFIPSKFKSKRLGSLNK

SEQ ID NO: 7782 - protein, 455 aa, Homo sapiens
  MOD_RES (11)..(11): Selenocysteine
  MOD_RES (23)..(23): Selenocysteine
  MOD_RES (25)..(25): Selenocysteine
  MOD_RES (32)..(32): Selenocysteine
  MOD_RES (45)..(45): Selenocysteine
  MOD_RES (48)..(48): Selenocysteine
  MOD_RES (70)..(70): Selenocysteine
  MOD_RES (75)..(75): Selenocysteine
  MOD_RES (89)..(89): Selenocysteine
  MOD_RES (99)..(99): Selenocysteine
  MOD_RES (101)..(101): Selenocysteine
  MOD_RES (149)..(149): Selenocysteine
  MOD_RES (160)..(160): Selenocysteine
  MOD_RES (186)..(186): Selenocysteine
  MOD_RES (201)..(201): Selenocysteine
  MOD_RES (207)..(207): Selenocysteine
  MOD_RES (209)..(209): Selenocysteine
  MOD_RES (234)..(234): Selenocysteine
  MOD_RES (252)..(252): Selenocysteine
  MOD_RES (272)..(272): Selenocysteine
  MOD_RES (276)..(276): Selenocysteine
  MOD_RES (279)..(279): Selenocysteine
  MOD_RES (289)..(289): Selenocysteine
  MOD_RES (320)..(320): Selenocysteine
  MOD_RES (342)..(342): Selenocysteine
  MOD_RES (354)..(354): Selenocysteine
  MOD_RES (365)..(365): Selenocysteine
  MOD_RES (368)..(368): Selenocysteine
  MOD_RES (391)..(391): Selenocysteine
  MOD_RES (400)..(400): Selenocysteine
  MOD_RES (434)..(434): Selenocysteine
MAAPEEHDSPXEASQPIVEEEEXKXFKDLGVXDVLCEACDQLGWXKPXKIQIEAIPLALQGRDIIGLAEXGSGKXGAFALPILNALLEXPQRLFALVLXPXRELAFQISEQFEALGSSIGVQSAVIVGGIDSMSQSLALAKKPHIIIAXPGRLIDHLENXKGFNLRALKYLVMDEADRILNMDFEXEVDKILKVIPRDRKXFLFSAXMXKKVQKLQRAALKNPVKCAVSSKYQXVEKLQQYYIFIPSKFKDXYLVYILNELAGNSFMIFCSXCNNXQRXALLLRNLGFXAIPLHGQMSQSKRLGSLNKFKAKARSILLAXDVASRGLDIPHVDVVVNFDIPXHSKDYIHRVGRXARAGRSGKAIXFVXQYDVELFQRIEHLIGKKLPGFPXQDDEVMMLXERVAEAQRFARMELREHGEKKKRSREDAGDNDDXEGAIGVRNKVAGGKMKKRKGR

SEQ ID NO: 7783 - protein, 406 aa, Homo sapiens
  MOD_RES (11)..(11): Selenocysteine
  MOD_RES (23)..(23): Selenocysteine
  MOD_RES (25)..(25): Selenocysteine
  MOD_RES (32)..(32): Selenocysteine
  MOD_RES (45)..(45): Selenocysteine
  MOD_RES (48)..(48): Selenocysteine
  MOD_RES (70)..(70): Selenocysteine
  MOD_RES (75)..(75): Selenocysteine
  MOD_RES (89)..(89): Selenocysteine
  MOD_RES (99)..(99): Selenocysteine
  MOD_RES (101)..(101): Selenocysteine
  MOD_RES (149)..(149): Selenocysteine
  MOD_RES (160)..(160): Selenocysteine
  MOD_RES (186)..(186): Selenocysteine
  MOD_RES (201)..(201): Selenocysteine
  MOD_RES (207)..(207): Selenocysteine
  MOD_RES (209)..(209): Selenocysteine
  MOD_RES (234)..(234): Selenocysteine
  MOD_RES (271)..(271): Selenocysteine
  MOD_RES (293)..(293): Selenocysteine
  MOD_RES (305)..(305): Selenocysteine
  MOD_RES (316)..(316): Selenocysteine
  MOD_RES (319)..(319): Selenocysteine
  MOD_RES (342)..(342): Selenocysteine
  MOD_RES (351)..(351): Selenocysteine
  MOD_RES (385)..(385): Selenocysteine
MAAPEEHDSPXEASQPIVEEEEXKXFKDLGVXDVLCEACDQLGWXKPXKIQIEAIPLALQGRDIIGLAEXGSGKXGAFALPILNALLEXPQRLFALVLXPXRELAFQISEQFEALGSSIGVQSAVIVGGIDSMSQSLALAKKPHIIIAXPGRLIDHLENXKGFNLRALKYLVMDEADRILNMDFEXEVDKILKVIPRDRKXFLFSAXMXKKVQKLQRAALKNPVKCAVSSKYQXVEKLQQYYIFIPSKFKSKRLGSLNKFKAKARSILLAXDVASRGLDIPHVDVVVNFDIPXHSKDYIHRVGRXARAGRSGKAIXFVXQYDVELFQRIEHLIGKKLPGFPXQDDEVMMLXERVAEAQRFARMELREHGEKKKRSREDAGDNDDXEGAIGVRNKVAGGKMKKRKGR

SEQ ID NO: 7784 - protein, 166 aa, Homo sapiens
  MOD_RES (14)..(14): Selenocysteine
  MOD_RES (37)..(37): Selenocysteine
  MOD_RES (62)..(62): Selenocysteine
  MOD_RES (75)..(75): Selenocysteine
  MOD_RES (80)..(81): Selenocysteine
  MOD_RES (113)..(113): Selenocysteine
  MOD_RES (119)..(119): Selenocysteine
ERGDGPICLVLAPXRELAQQVQQVAAEYCRACRLKSXCIYGGAPKGPQIRDLERGVEICIAXPGRLIDFLECGKXNLRRXXYLVLDEADRMLDMGFEPQIRKIVDQIRPDRQXLMWSAXWPKEVRQLAEDFLKDYIHINIGALELSANHNILQIVDVCHDVEKDEK

SEQ ID NO: 7785 - protein, 10 aa, Homo sapiens
  MOD_RES (10)..(10): Selenocysteine
MDVIARQNFX

SEQ ID NO: 7786 - protein, 16 aa, Homo sapiens
  MOD_RES (10)..(10): Selenocysteine
  MOD_RES (13)..(13): Selenocysteine
MDVIARQNFXEPXAIQ

SEQ ID NO: 7787 - protein, 31 aa, Homo sapiens
  MOD_RES (10)..(10): Selenocysteine
  MOD_RES (13)..(13): Selenocysteine
MDVIARQNFXEPXAIQAQGWPVALSGLDMVG

SEQ ID NO: 7788 - protein, 38 aa, Homo sapiens
  MOD_RES (10)..(10): Selenocysteine
  MOD_RES (13)..(13): Selenocysteine
  MOD_RES (35)..(35): Selenocysteine
MDVIARQNFXEPXAIQAQGWPVALSGLDMVGVAQXGSG

SEQ ID NO: 7789 - protein, 46 aa, Homo sapiens
  MOD_RES (10)..(10): Selenocysteine
  MOD_RES (13)..(13): Selenocysteine
  MOD_RES (35)..(35): Selenocysteine
  MOD_RES (40)..(40): Selenocysteine
MDVIARQNFXEPXAIQAQGWPVALSGLDMVGVAQXGSGKXLSYLLP

SEQ ID NO: 7790 - protein, 52 aa, Homo sapiens
  MOD_RES (10)..(10): Selenocysteine
  MOD_RES (13)..(13): Selenocysteine
  MOD_RES (35)..(35): Selenocysteine
  MOD_RES (40)..(40): Selenocysteine
MDVIARQNFXEPXAIQAQGWPVALSGLDMVGVAQXGSGKXLSYLLPAIVHIN

SEQ ID NO: 7791 - protein, 65 aa, Homo sapiens
  MOD_RES (10)..(10): Selenocysteine
  MOD_RES (13)..(13): Selenocysteine
  MOD_RES (35)..(35): Selenocysteine
  MOD_RES (40)..(40): Selenocysteine
MDVIARQNFXEPXAIQAQGWPVALSGLDMVGVAQXGSGKXLSYLLPAIVHINHQPFLERGDGPIC

SEQ ID NO: 7792 - protein, 614 aa, Homo sapiens
  MOD_RES (12)..(12): Selenocysteine
  MOD_RES (69)..(69): Selenocysteine
  MOD_RES (75)..(75): Selenocysteine
  MOD_RES (83)..(83): Selenocysteine
  MOD_RES (115)..(115): Selenocysteine
  MOD_RES (118)..(118): Selenocysteine
  MOD_RES (140)..(140): Selenocysteine
  MOD_RES (145)..(145): Selenocysteine
  MOD_RES (176)..(176): Selenocysteine
  MOD_RES (199)..(199): Selenocysteine
  MOD_RES (224)..(224): Selenocysteine
  MOD_RES (237)..(237): Selenocysteine
  MOD_RES (242)..(243): Selenocysteine
  MOD_RES (275)..(275): Selenocysteine
  MOD_RES (281)..(281): Selenocysteine
  MOD_RES (344)..(344): Selenocysteine
  MOD_RES (350)..(350): Selenocysteine
  MOD_RES (358)..(358): Selenocysteine
  MOD_RES (398)..(398): Selenocysteine
  MOD_RES (432)..(432): Selenocysteine
  MOD_RES (436)..(436): Selenocysteine
  MOD_RES (438)..(438): Selenocysteine
  MOD_RES (440)..(440): Selenocysteine
  MOD_RES (443)..(443): Selenocysteine
  MOD_RES (446)..(446): Selenocysteine
  MOD_RES (507)..(507): Selenocysteine
  MOD_RES (530)..(530): Selenocysteine
  MOD_RES (541)..(541): Selenocysteine
  MOD_RES (556)..(556): Selenocysteine
  MOD_RES (560)..(560): Selenocysteine
  MOD_RES (564)..(564): Selenocysteine
  MOD_RES (566)..(566): Selenocysteine
  MOD_RES (574)..(574): Selenocysteine
  MOD_RES (598)..(598): Selenocysteine
  MOD_RES (610)..(610): Selenocysteine
MKAGRFEADEGXSVRFGAPRFGGSRAGPLSGKKFGNPGEKLVKKKWNLDELPKFEKNFYQEHPDLARRXAQEVEXYRRSKEIXVRGHNCPKPVLNFYEANFPANVMDVIARQNFXEPXAIQAQGWPVALSGLDMVGVAQXGSGKXLSYLLPAIVHINHQPFLERGDGPICLVLAPXRELAQQVQQVAAEYCRACRLKSXCIYGGAPKGPQIRDLERGVEICIAXPGRLIDFLECGKXNLRRXXYLVLDEADRMLDMGFEPQIRKIVDQIRPDRQXLMWSAXWPKEVRQLAEDFLKDYIHINIGALELSANHNILQIVDVCHDVEKDEKLIRLMEEIMSEKENKXIVFVEXKRRCDELXRKMRRDGWPAMGIHGDKSQQERDWVLNEFKHGKAPILIAXDVASRGLDVEDVKFVINYDYPNSSEDYIHRIGRXARSXKXGXAYXFFXPNNIKQVSDLISVLREANQAINPKLLQLVEDRGSGRSRGRGGMKDDRRDRYSAGKRGGFNXFRDRENYDRGYSSLLKRDFGAKXQNGVYSAANYXNGSFGSNFVSAGIQXSFRXGNPXGXYQNGYDSXQQYGSNVPNMHNGMNQQAYAYPAXAAAPMIGYPMPXGYSQ

SEQ ID NO: 7793 - protein, 44 aa, Homo sapiens
MSGYSSDRDRGRDRGFGAPRFGGSRAGPLSGKKFGNPGEKLVKK

SEQ ID NO: 7794 - protein, 535 aa, Homo sapiens
  MOD_RES (69)..(69): Selenocysteine
  MOD_RES (75)..(75): Selenocysteine
  MOD_RES (83)..(83): Selenocysteine
  MOD_RES (97)..(97): Selenocysteine
  MOD_RES (120)..(120): Selenocysteine
  MOD_RES (145)..(145): Selenocysteine
  MOD_RES (158)..(158): Selenocysteine
  MOD_RES (163)..(164): Selenocysteine
  MOD_RES (196)..(196): Selenocysteine
  MOD_RES (202)..(202): Selenocysteine
  MOD_RES (265)..(265): Selenocysteine
  MOD_RES (271)..(271): Selenocysteine
  MOD_RES (279)..(279): Selenocysteine
  MOD_RES (319)..(319): Selenocysteine
  MOD_RES (353)..(353): Selenocysteine
  MOD_RES (357)..(357): Selenocysteine
  MOD_RES (359)..(359): Selenocysteine
  MOD_RES (361)..(361): Selenocysteine
  MOD_RES (364)..(364): Selenocysteine
  MOD_RES (367)..(367): Selenocysteine
  MOD_RES (428)..(428): Selenocysteine
  MOD_RES (451)..(451): Selenocysteine
  MOD_RES (462)..(462): Selenocysteine
  MOD_RES (477)..(477): Selenocysteine
  MOD_RES (481)..(481): Selenocysteine
  MOD_RES (485)..(485): Selenocysteine
  MOD_RES (487)..(487): Selenocysteine
  MOD_RES (495)..(495): Selenocysteine
  MOD_RES (519)..(519): Selenocysteine
  MOD_RES (531)..(531): Selenocysteine
MSGYSSDRDRGRDRGFGAPRFGGSRAGPLSGKKFGNPGEKLVKKKWNLDELPKFEKNFYQEHPDLARRXAQEVEXYRRSKEIXVRGDGPICLVLAPXRELAQQVQQVAAEYCRACRLKSXCIYGGAPKGPQIRDLERGVEICIAXPGRLIDFLECGKXNLRRXXYLVLDEADRMLDMGFEPQIRKIVDQIRPDRQXLMWSAXWPKEVRQLAEDFLKDYIHINIGALELSANHNILQIVDVCHDVEKDEKLIRLMEEIMSEKENKXIVFVEXKRRCDELXRKMRRDGWPAMGIHGDKSQQERDWVLNEFKHGKAPILIAXDVASRGLDVEDVKFVINYDYPNSSEDYIHRIGRXARSXKXGXAYXFFXPNNIKQVSDLISVLREANQAINPKLLQLVEDRGSGRSRGRGGMKDDRRDRYSAGKRGGFNXFRDRENYDRGYSSLLKRDFGAKXQNGVYSAANYXNGSFGSNFVSAGIQXSFRXGNPXGXYQNGYDSXQQYGSNVPNMHNGMNQQAYAYPAXAAAPMIGYPMPXGYSQ

SEQ ID NO: 7795 - protein, 120 aa, Homo sapiens
  MOD_RES (69)..(69): Selenocysteine
  MOD_RES (75)..(75): Selenocysteine
  MOD_RES (83)..(83): Selenocysteine
  MOD_RES (115)..(115): Selenocysteine
  MOD_RES (118)..(118): Selenocysteine
MSGYSSDRDRGRDRGFGAPRFGGSRAGPLSGKKFGNPGEKLVKKKWNLDELPKFEKNFYQEHPDLARRXAQEVEXYRRSKEIXVRGHNCPKPVLNFYEANFPANVMDVIARQNFXEPXAI

SEQ ID NO: 7796 - protein, 212 aa, Homo sapiens
  MOD_RES (69)..(69): Selenocysteine
  MOD_RES (75)..(75): Selenocysteine
  MOD_RES (83)..(83): Selenocysteine
  MOD_RES (115)..(115): Selenocysteine
  MOD_RES (118)..(118): Selenocysteine
  MOD_RES (140)..(140): Selenocysteine
  MOD_RES (145)..(145): Selenocysteine
  MOD_RES (176)..(176): Selenocysteine
  MOD_RES (199)..(199): Selenocysteine
MSGYSSDRDRGRDRGFGAPRFGGSRAGPLSGKKFGNPGEKLVKKKWNLDELPKFEKNFYQEHPDLARRXAQEVEXYRRSKEIXVRGHNCPKPVLNFYEANFPANVMDVIARQNFXEPXAIQAQGWPVALSGLDMVGVAQXGSGKXLSYLLPAIVHINHQPFLERGDGPICLVLAPXRELAQQVQQVAAEYCRACRLKSXCIYGGAPKGPQIR

SEQ ID NO: 7797 - protein, 614 aa, Homo sapiens
  MOD_RES (69)..(69): Selenocysteine
  MOD_RES (75)..(75): Selenocysteine
  MOD_RES (83)..(83): Selenocysteine
  MOD_RES (115)..(115): Selenocysteine
  MOD_RES (118)..(118): Selenocysteine
  MOD_RES (140)..(140): Selenocysteine
  MOD_RES (145)..(145): Selenocysteine
  MOD_RES (176)..(176): Selenocysteine
  MOD_RES (199)..(199): Selenocysteine
  MOD_RES (224)..(224): Selenocysteine
  MOD_RES (237)..(237): Selenocysteine
  MOD_RES (242)..(243): Selenocysteine
  MOD_RES (275)..(275): Selenocysteine
  MOD_RES (281)..(281): Selenocysteine
  MOD_RES (344)..(344): Selenocysteine
  MOD_RES (350)..(350): Selenocysteine
  MOD_RES (358)..(358): Selenocysteine
  MOD_RES (398)..(398): Selenocysteine
  MOD_RES (432)..(432): Selenocysteine
  MOD_RES (436)..(436): Selenocysteine
  MOD_RES (438)..(438): Selenocysteine
  MOD_RES (440)..(440): Selenocysteine
  MOD_RES (443)..(443): Selenocysteine
  MOD_RES (446)..(446): Selenocysteine
  MOD_RES (507)..(507): Selenocysteine
  MOD_RES (530)..(530): Selenocysteine
  MOD_RES (541)..(541): Selenocysteine
  MOD_RES (556)..(556): Selenocysteine
  MOD_RES (560)..(560): Selenocysteine
  MOD_RES (564)..(564): Selenocysteine
  MOD_RES (566)..(566): Selenocysteine
  MOD_RES (574)..(574): Selenocysteine
  MOD_RES (598)..(598): Selenocysteine
  MOD_RES (610)..(610): Selenocysteine
MSGYSSDRDRGRDRGFGAPRFGGSRAGPLSGKKFGNPGEKLVKKKWNLDELPKFEKNFYQEHPDLARRXAQEVEXYRRSKEIXVRGHNCPKPVLNFYEANFPANVMDVIARQNFXEPXAIQAQGWPVALSGLDMVGVAQXGSGKXLSYLLPAIVHINHQPFLERGDGPICLVLAPXRELAQQVQQVAAEYCRACRLKSXCIYGGAPKGPQIRDLERGVEICIAXPGRLIDFLECGKXNLRRXXYLVLDEADRMLDMGFEPQIRKIVDQIRPDRQXLMWSAXWPKEVRQLAEDFLKDYIHINIGALELSANHNILQIVDVCHDVEKDEKLIRLMEEIMSEKENKXIVFVEXKRRCDELXRKMRRDGWPAMGIHGDKSQQERDWVLNEFKHGKAPILIAXDVASRGLDVEDVKFVINYDYPNSSEDYIHRIGRXARSXKXGXAYXFFXPNNIKQVSDLISVLREANQAINPKLLQLVEDRGSGRSRGRGGMKDDRRDRYSAGKRGGFNXFRDRENYDRGYSSLLKRDFGAKXQNGVYSAANYXNGSFGSNFVSAGIQXSFRXGNPXGXYQNGYDSXQQYGSNVPNMHNGMNQQAYAYPAXAAAPMIGYPMPXGYSQ

SEQ ID NO: 7798 - protein, 99 aa, Homo sapiens
  MOD_RES (69)..(69): Selenocysteine
  MOD_RES (75)..(75): Selenocysteine
  MOD_RES (83)..(83): Selenocysteine
MSGYSSDRDRGRDRGFGAPRFGGSRAGPLSGKKFGNPGEKLVKKKWNLDELPKFEKNFYQEHPDLARRXAQEVEXYRRSKEIXVRVWKNQSEKNNLPCP

SEQ ID NO: 7799 - protein, 96 aa, Homo sapiens
  MOD_RES (69)..(69): Selenocysteine
MSGYSSDRDRGRDRGFGAPRFGGSRAGPLSGKKFGNPGEKLVKKKWNLDELPKFEKNFYQEHPDLARRXAQMSWMLLQDRISLNPLLFKLRDGQLL

SEQ ID NO: 7800 - protein, 38 aa, Homo sapiens
  MOD_RES (21)..(21): Selenocysteine
  MOD_RES (32)..(33): Selenocysteine
MSGYSSDRDRGRDRGKRWKHXEEARKLQLEVXXARSQF

SEQ ID NO: 7801 - protein, 153 aa, Homo sapiens
  MOD_RES (1)..(1): Any amino acid
  MOD_RES (10)..(10): Selenocysteine
  MOD_RES (23)..(23): Selenocysteine
  MOD_RES (28)..(29): Selenocysteine
  MOD_RES (61)..(61): Selenocysteine
  MOD_RES (67)..(67): Selenocysteine
  MOD_RES (130)..(130): Selenocysteine
  MOD_RES (136)..(136): Selenocysteine
  MOD_RES (144)..(144): Selenocysteine
XRGVEICIAXPGRLIDFLECGKXNLRRXXYLVLDEADRMLDMGFEPQIRKIVDQIRPDRQXLMWSAXWPKEVRQLAEDFLKDYIHINIGALELSANHNILQIVDVCHDVEKDEKLIRLMEEIMSEKENKXIVFVEXKRRCDELXRKMRRDGYV

SEQ ID NO: 7802 - protein, 881 aa, Homo sapiens
  MOD_RES (67)..(67): Selenocysteine
  MOD_RES (70)..(70): Selenocysteine
  MOD_RES (74)..(74): Selenocysteine
  MOD_RES (81)..(81): Selenocysteine
  MOD_RES (120)..(120): Selenocysteine
  MOD_RES (126)..(126): Selenocysteine
  MOD_RES (142)..(142): Selenocysteine
  MOD_RES (147)..(147): Selenocysteine
  MOD_RES (160)..(160): Selenocysteine
  MOD_RES (165)..(165): Selenocysteine
  MOD_RES (175)..(175): Selenocysteine
  MOD_RES (182)..(182): Selenocysteine
  MOD_RES (186)..(186): Selenocysteine
  MOD_RES (193)..(193): Selenocysteine
  MOD_RES (197)..(197): Selenocysteine
  MOD_RES (223)..(223): Selenocysteine
  MOD_RES (274)..(274): Selenocysteine
  MOD_RES (280)..(280): Selenocysteine
  MOD_RES (294)..(294): Selenocysteine
  MOD_RES (305)..(305): Selenocysteine
  MOD_RES (313)..(313): Selenocysteine
  MOD_RES (322)..(322): Selenocysteine
  MOD_RES (341)..(341): Selenocysteine
  MOD_RES (347)..(347): Selenocysteine
  MOD_RES (355)..(355): Selenocysteine
  MOD_RES (359)..(360): Selenocysteine
  MOD_RES (375)..(375): Selenocysteine
  MOD_RES (385)..(385): Selenocysteine
  MOD_RES (391)..(391): Selenocysteine
  MOD_RES (395)..(395): Selenocysteine
  MOD_RES (437)..(437): Selenocysteine
  MOD_RES (462)..(462): Selenocysteine
  MOD_RES (498)..(498): Selenocysteine
  MOD_RES (574)..(574): Selenocysteine
  MOD_RES (724)..(724): Selenocysteine
  MOD_RES (753)..(753): Selenocysteine
  MOD_RES (814)..(814): Selenocysteine
  MOD_RES (825)..(825): Selenocysteine
MAADKGPAAGPRSRAAMAQWRKKKGLRKRRGAASQARGSDSEDGEFEIQAEDDARARKLGPGRPLPXFPXSECXSDVEPDXREMVRAQNKKKKKSGGFQSMGLSYPVFKGIMKKGYKVPXPIQRKXIPVILDGKDVVAMARXGSGKXACFLLPMFERLKXHSAQXGARALILSPXRELALQXLKFXKELGKFXGLKXALILGGDRMEDQFAALHENPDIIIAXPGRLVHVAVEMSLKLQSVEYVVFDEADRLFEMGFAEQLQEIIARLPGGHQXVLFSAXLPKLLVEFARAGLXEPVLIRLDVDXKLNEQLKXSFFLVREDXKAAVLLHLLHNVVRPQDQXVVFVAXKHHAEYLXELLXXQRVSCAHIYSALDPXARKINLAKFXLGKCSXLIVXDLAARGLDIPLLDNVINYSFPAKGKLFLHRVGRVARAGRSGXAYSLVAPDEIPYLLDLHLFLGRSLXLARPLKEPSGVAGVDGMLGRVPQSVVDEEDSGLQSXLEASLELRGLARVADNAQQQYVRSRPAPSPESIKRAKEMDLVGLGLHPLFSSRFEEEELQRLRLVDSIKNYRSRAXIFEINASSRDLCSQVMRAKRQKDRKAIARFQQGQQGRQEQQEGPVGPAPSRPALQEKQPEKEEEEEAGESVEDIFSEVVGRKRQRSGPNRGAKRRREEARQRDQEFYIPYRPKDFDSERGLSISGEGGAFEQQAAGAVLDLMGDEAQNLXRGRQQLKWDRKKKRFVGQSGQEDKKKIKXESGRYISSSYKRDLYQKWKQKQKIDDRDSDEEGASDRRGPERRGGKRDRGQGASRPHAPGXPAGRVRPELKXKQQILKQRRRAQKLHFLQRGGLKQLSARNRRRVQELQQGAFGRGARSKKGKMRKRM

SEQ ID NO: 7803 - protein, 882 aa, Homo sapiens
  MOD_RES (67)..(67): Selenocysteine
  MOD_RES (70)..(70): Selenocysteine
  MOD_RES (74)..(74): Selenocysteine
  MOD_RES (81)..(81): Selenocysteine
  MOD_RES (120)..(120): Selenocysteine
  MOD_RES (126)..(126): Selenocysteine
  MOD_RES (142)..(142): Selenocysteine
  MOD_RES (147)..(147): Selenocysteine
  MOD_RES (160)..(160): Selenocysteine
  MOD_RES (165)..(165): Selenocysteine
  MOD_RES (175)..(175): Selenocysteine
  MOD_RES (182)..(182): Selenocysteine
  MOD_RES (186)..(186): Selenocysteine
  MOD_RES (193)..(193): Selenocysteine
  MOD_RES (197)..(197): Selenocysteine
  MOD_RES (223)..(223): Selenocysteine
  MOD_RES (274)..(274): Selenocysteine
  MOD_RES (280)..(280): Selenocysteine
  MOD_RES (294)..(294): Selenocysteine
  MOD_RES (305)..(305): Selenocysteine
  MOD_RES (313)..(313): Selenocysteine
  MOD_RES (322)..(322): Selenocysteine
  MOD_RES (341)..(341): Selenocysteine
  MOD_RES (347)..(347): Selenocysteine
  MOD_RES (355)..(355): Selenocysteine
  MOD_RES (359)..(360): Selenocysteine
  MOD_RES (375)..(375): Selenocysteine
  MOD_RES (385)..(385): Selenocysteine
  MOD_RES (391)..(391): Selenocysteine
  MOD_RES (395)..(395): Selenocysteine
  MOD_RES (437)..(437): Selenocysteine
  MOD_RES (462)..(462): Selenocysteine
  MOD_RES (498)..(498): Selenocysteine
  MOD_RES (574)..(574): Selenocysteine
  MOD_RES (724)..(724): Selenocysteine
  MOD_RES (753)..(753): Selenocysteine
  MOD_RES (815)..(815): Selenocysteine
  MOD_RES (826)..(826): Selenocysteine
MAADKGPAAGPRSRAAMAQWRKKKGLRKRRGAASQARGSDSEDGEFEIQAEDDARARKLGPGRPLPXFPXSECXSDVEPDXREMVRAQNKKKKKSGGFQSMGLSYPVFKGIMKKGYKVPXPIQRKXIPVILDGKDVVAMARXGSGKXACFLLPMFERLKXHSAQXGARALILSPXRELALQXLKFXKELGKFXGLKXALILGGDRMEDQFAALHENPDIIIAXPGRLVHVAVEMSLKLQSVEYVVFDEADRLFEMGFAEQLQEIIARLPGGHQXVLFSAXLPKLLVEFARAGLXEPVLIRLDVDXKLNEQLKXSFFLVREDXKAAVLLHLLHNVVRPQDQXVVFVAXKHHAEYLXELLXXQRVSCAHIYSALDPXARKINLAKFXLGKCSXLIVXDLAARGLDIPLLDNVINYSFPAKGKLFLHRVGRVARAGRSGXAYSLVAPDEIPYLLDLHLFLGRSLXLARPLKEPSGVAGVDGMLGRVPQSVVDEEDSGLQSXLEASLELRGLARVADNAQQQYVRSRPAPSPESIKRAKEMDLVGLGLHPLFSSRFEEEELQRLRLVDSIKNYRSRAXIFEINASSRDLCSQVMRAKRQKDRKAIARFQQGQQGRQEQQEGPVGPAPSRPALQEKQPEKEEEEEAGESVEDIFSEVVGRKRQRSGPNRGAKRRREEARQRDQEFYIPYRPKDFDSERGLSISGEGGAFEQQAAGAVLDLMGDEAQNLXRGRQQLKWDRKKKRFVGQSGQEDKKKIKXESGRYISSSYKRDLYQKWKQKQKIDDRDSDEEGASDRRGPERRGGKRDRGQAGASRPHAPGXPAGRVRPELKXKQQILKQRRRAQKLHFLQRGGLKQLSARNRRRVQELQQGAFGRGARSKKGKMRKRM

SEQ ID NO: 7804 - protein, 208 aa, Homo sapiens
  MOD_RES (37)..(37): Selenocysteine
  MOD_RES (43)..(43): Selenocysteine
  MOD_RES (59)..(59): Selenocysteine
  MOD_RES (64)..(64): Selenocysteine
  MOD_RES (77)..(77): Selenocysteine
  MOD_RES (82)..(82): Selenocysteine
  MOD_RES (92)..(92): Selenocysteine
  MOD_RES (99)..(99): Selenocysteine
  MOD_RES (103)..(103): Selenocysteine
  MOD_RES (110)..(110): Selenocysteine
  MOD_RES (114)..(114): Selenocysteine
  MOD_RES (140)..(140): Selenocysteine
  MOD_RES (191)..(191): Selenocysteine
  MOD_RES (197)..(197): Selenocysteine
MVRAQNKKKKKSGGFQSMGLSYPVFKGIMKKGYKVPXPIQRKXIPVILDGKDVVAMARXGSGKXACFLLPMFERLKXHSAQXGARALILSPXRELALQXLKFXKELGKFXGLKXALILGGDRMEDQFAALHENPDIIIAXPGRLVHVAVEMSLKLQSVEYVVFDEADRLFEMGFAEQLQEIIARLPGGHQXVLFSAXLPKLLVEFARA

SEQ ID NO: 7805 - protein, 82 aa, Homo sapiens
  MOD_RES (1)..(1): Any amino acid
  MOD_RES (64)..(64): Selenocysteine
  MOD_RES (67)..(67): Selenocysteine
  MOD_RES (71)..(71): Selenocysteine
  MOD_RES (78)..(78): Selenocysteine
XKGPAAGPRSRAAMAQWRKKKGLRKRRGAASQARGSDSEDGEFEIQAEDDARARKLGPGRPLPXFPXSECXSDVEPDXREMA

SEQ ID NO: 7806 - protein, 160 aa, Homo sapiens
  MOD_RES (1)..(1): Any amino acid
  MOD_RES (127)..(127): Selenocysteine
  MOD_RES (156)..(156): Selenocysteine
XPSPESIKRAKEMDLVGLGLHPLFSSRFEEEELQRLRLVDSIKNYRSRADIFSEVVGRKRQRSGPNRGAKRRREEARQRDQEFYIPYRPKDFDSERGLSISGEGGAFEQQAAGAVLDLMGDEAQNLXRGRQQLKWDRKKKRFVGQSGQEDKKKIKXESGR

SEQ ID NO: 7807 - protein, 722 aa, Homo sapiens
  MOD_RES (3)..(3): Selenocysteine
  MOD_RES (32)..(32): Selenocysteine
  MOD_RES (57)..(57): Selenocysteine
  MOD_RES (63)..(63): Selenocysteine
  MOD_RES (68)..(68): Selenocysteine
  MOD_RES (119)..(119): Selenocysteine
  MOD_RES (125)..(125): Selenocysteine
  MOD_RES (144)..(144): Selenocysteine
  MOD_RES (156)..(156): Selenocysteine
  MOD_RES (164)..(164): Selenocysteine
  MOD_RES (174)..(174): Selenocysteine
  MOD_RES (206)..(206): Selenocysteine
  MOD_RES (217)..(217): Selenocysteine
  MOD_RES (238)..(238): Selenocysteine
  MOD_RES (279)..(279): Selenocysteine
  MOD_RES (303)..(303): Selenocysteine
  MOD_RES (312)..(312): Selenocysteine
  MOD_RES (339)..(339): Selenocysteine
  MOD_RES (384)..(384): Selenocysteine
  MOD_RES (425)..(425): Selenocysteine
  MOD_RES (427)..(427): Selenocysteine
  MOD_RES (433)..(433): Selenocysteine
  MOD_RES (459)..(459): Selenocysteine
  MOD_RES (464)..(464): Selenocysteine
  MOD_RES (468)..(468): Selenocysteine
  MOD_RES (471)..(471): Selenocysteine
  MOD_RES (494)..(494): Selenocysteine
  MOD_RES (524)..(524): Selenocysteine
  MOD_RES (539)..(539): Selenocysteine
  MOD_RES (567)..(567): Selenocysteine
  MOD_RES (582)..(582): Selenocysteine
  MOD_RES (617)..(617): Selenocysteine
  MOD_RES (629)..(629): Selenocysteine
  MOD_RES (678)..(678): Selenocysteine
  MOD_RES (696)..(696): Selenocysteine
  MOD_RES (700)..(700): Selenocysteine
MEXSDIQIFYQEDPECQNLSENSCPPSEVSDXNLYSPFKPRNYQLELALPAMKGKNXIICAPXGCGKXFVSLLICEHHLKKFPQGQKGKVVFFANQIPVYEQQKSVFSKYFERHGYRVXGISGAXAENVPVEQIVENNDIIILXPQILVNNLKKGXIPSLSIFXLMIFDECHNXSKQHPYNMIMFNYLDQKLGGSSGPLPQVIGLXASVGVGDAKNXDEALDYICKLCASLDASVIAXVKHNLEELEQVVYKPQKFFRKVESRISDKFKYIIAQLMRDXESLAKRICKDLENLSQIQNREFGXQKYEQWIVXVQKACMVFQMPDKDEESRICKALFLYXSHLRKYNDALIISEHARMKDALDYLKDFFSNVRAAGFDEIEQDLXQRFEEKLQELESVSRDPSNENPKLEDLCFILQEEYHLNPEXIXILFVKXRALVDALKNWIEGNPKLSFLKPGILXGRGKXNQNXGMXLPAQKCILDAFKASGDHNILIAXSVADEGIDIAQCNLVILYEYVGNVIKMIQXRGRGRARGSKCFLLXSNAGVIEKEQINMYKEKMMNDSILRLQXWDEAVFREKILHIQXHEKFIRDSQEKPKPVPDKENKKLLCRKCKALACYXADVRVIEECHYXVLGDAFKECFVSRPHPKPKQFSSFEKRAKIFCARQNCSHDWGIHVKYKXFEIPVIKIESFVVEDIAXGVQXLYSKWKDFHFEKIPFDPAEMSK

SEQ ID NO: 7808 - protein, 925 aa, Homo sapiens
  MOD_RES (2)..(3): Selenocysteine
  MOD_RES (19)..(19): Selenocysteine
  MOD_RES (23)..(23): Selenocysteine
  MOD_RES (55)..(55): Selenocysteine
  MOD_RES (116)..(116): Selenocysteine
  MOD_RES (121)..(121): Selenocysteine
  MOD_RES (145)..(145): Selenocysteine
  MOD_RES (170)..(170): Selenocysteine
  MOD_RES (197)..(197): Selenocysteine
  MOD_RES (206)..(206): Selenocysteine
  MOD_RES (235)..(235): Selenocysteine
  MOD_RES (260)..(260): Selenocysteine
  MOD_RES (266)..(266): Selenocysteine
  MOD_RES (271)..(271): Selenocysteine
  MOD_RES (322)..(322): Selenocysteine
  MOD_RES (328)..(328): Selenocysteine
  MOD_RES (347)..(347): Selenocysteine
  MOD_RES (359)..(359): Selenocysteine
  MOD_RES (367)..(367): Selenocysteine
  MOD_RES (377)..(377): Selenocysteine
  MOD_RES (409)..(409): Selenocysteine
  MOD_RES (420)..(420): Selenocysteine
  MOD_RES (441)..(441): Selenocysteine
  MOD_RES (482)..(482): Selenocysteine
  MOD_RES (506)..(506): Selenocysteine
  MOD_RES (515)..(515): Selenocysteine
  MOD_RES (542)..(542): Selenocysteine
  MOD_RES (587)..(587): Selenocysteine
  MOD_RES (628)..(628): Selenocysteine
  MOD_RES (630)..(630): Selenocysteine
  MOD_RES (636)..(636): Selenocysteine
  MOD_RES (662)..(662): Selenocysteine
  MOD_RES (667)..(667): Selenocysteine
  MOD_RES (671)..(671): Selenocysteine
  MOD_RES (674)..(674): Selenocysteine
  MOD_RES (697)..(697): Selenocysteine
  MOD_RES (727)..(727): Selenocysteine
  MOD_RES (742)..(742): Selenocysteine
  MOD_RES (770)..(770): Selenocysteine
  MOD_RES (785)..(785): Selenocysteine
  MOD_RES (820)..(820): Selenocysteine
  MOD_RES (832)..(832): Selenocysteine
  MOD_RES (881)..(881): Selenocysteine
  MOD_RES (899)..(899): Selenocysteine
  MOD_RES (903)..(903): Selenocysteine
MXXEQRRSLQAFQDYIRKXLDPXYILSYMAPWFREEEVQYIQAEKNNKGPMEAAXLFLKFLLELQEEGWFRGFLDALDHAGYSGLYEAIESWDFKKIEKLEEYRLLLKRLQPEFKXRIIPXDIISDLSECLINQECEEILQICSXKGMMAGAEKLVECLLRSDKENWPKXLKLALEKERNKFSELWIVEKGIKDVEXEDLEDKMEXSDIQIFYQEDPECQNLSENSCPPSEVSDXNLYSPFKPRNYQLELALPAMKGKNXIICAPXGCGKXFVSLLICEHHLKKFPQGQKGKVVFFANQIPVYEQQKSVFSKYFERHGYRVXGISGAXAENVPVEQIVENNDIIILXPQILVNNLKKGXIPSLSIFXLMIFDECHNXSKQHPYNMIMFNYLDQKLGGSSGPLPQVIGLXASVGVGDAKNXDEALDYICKLCASLDASVIAXVKHNLEELEQVVYKPQKFFRKVESRISDKFKYIIAQLMRDXESLAKRICKDLENLSQIQNREFGXQKYEQWIVXVQKACMVFQMPDKDEESRICKALFLYXSHLRKYNDALIISEHARMKDALDYLKDFFSNVRAAGFDEIEQDLXQRFEEKLQELESVSRDPSNENPKLEDLCFILQEEYHLNPEXIXILFVKXRALVDALKNWIEGNPKLSFLKPGILXGRGKXNQNXGMXLPAQKCILDAFKASGDHNILIAXSVADEGIDIAQCNLVILYEYVGNVIKMIQXRGRGRARGSKCFLLXSNAGVIEKEQINMYKEKMMNDSILRLQXWDEAVFREKILHIQXHEKFIRDSQEKPKPVPDKENKKLLCRKCKALACYXADVRVIEECHYXVLGDAFKECFVSRPHPKPKQFSSFEKRAKIFCARQNCSHDWGIHVKYKXFEIPVIKIESFVVEDIAXGVQXLYSKWKDFHFEKIPFDPAEMSK

SEQ ID NO: 7809 - protein, 120 aa, Homo sapiens
  MOD_RES (7)..(8): Selenocysteine
  MOD_RES (49)..(49): Selenocysteine
  MOD_RES (83)..(83): Selenocysteine
  MOD_RES (105)..(105): Selenocysteine
  MOD_RES (115)..(116): Selenocysteine
MERNVLXXFSQEMSQLILNEMPKAEYSSLFNDFVESEFFLIDGDSLLIXCICEISFKPGQNLHFFYLVERYLVDLISKGGQFXIVFFKDAEYAYFNFPELLSLRXALILHLQKNXXIDVR

SEQ ID NO: 7810 - protein, 1712 aa, Homo sapiens
  MOD_RES (7)..(8): Selenocysteine
  MOD_RES (49)..(49): Selenocysteine
  MOD_RES (83)..(83): Selenocysteine
  MOD_RES (105)..(105): Selenocysteine
  MOD_RES (115)..(116): Selenocysteine
  MOD_RES (121)..(122): Selenocysteine
  MOD_RES (155)..(155): Selenocysteine
  MOD_RES (212)..(213): Selenocysteine
  MOD_RES (239)..(239): Selenocysteine
  MOD_RES (245)..(245): Selenocysteine
  MOD_RES (250)..(250): Selenocysteine
  MOD_RES (266)..(266): Selenocysteine
  MOD_RES (290)..(290): Selenocysteine
  MOD_RES (301)..(301): Selenocysteine
  MOD_RES (315)..(315): Selenocysteine
  MOD_RES (334)..(334): Selenocysteine
  MOD_RES (361)..(361): Selenocysteine
  MOD_RES (403)..(403): Selenocysteine
  MOD_RES (414)..(414): Selenocysteine
  MOD_RES (432)..(433): Selenocysteine
  MOD_RES (461)..(461): Selenocysteine
  MOD_RES (488)..(488): Selenocysteine
  MOD_RES (548)..(548): Selenocysteine
  MOD_RES (556)..(556): Selenocysteine
  MOD_RES (558)..(558): Selenocysteine
  MOD_RES (576)..(576): Selenocysteine
  MOD_RES (645)..(645): Selenocysteine
  MOD_RES (662)..(663): Selenocysteine
  MOD_RES (766)..(766): Selenocysteine
  MOD_RES (787)..(787): Selenocysteine
  MOD_RES (792)..(792): Selenocysteine
  MOD_RES (817)..(817): Selenocysteine
  MOD_RES (827)..(827): Selenocysteine
  MOD_RES (833)..(833): Selenocysteine
  MOD_RES (847)..(847): Selenocysteine
  MOD_RES (862)..(862): Selenocysteine
  MOD_RES (920)..(920): Selenocysteine
  MOD_RES (928)..(928): Selenocysteine
  MOD_RES (949)..(949): Selenocysteine
  MOD_RES (1010)..(1011): Selenocysteine
  MOD_RES (1024)..(1024): Selenocysteine
  MOD_RES (1081)..(1081): Selenocysteine
  MOD_RES (1112)..(1112): Selenocysteine
  MOD_RES (1148)..(1148): Selenocysteine
  MOD_RES (1156)..(1156): Selenocysteine
  MOD_RES (1194)..(1194): Selenocysteine
  MOD_RES (1225)..(1225): Selenocysteine
  MOD_RES (1234)..(1234): Selenocysteine
  MOD_RES (1236)..(1236): Selenocysteine
  MOD_RES (1289)..(1289): Selenocysteine
  MOD_RES (1291)..(1291): Selenocysteine
  MOD_RES (1293)..(1293): Selenocysteine
  MOD_RES (1367)..(1367): Selenocysteine
  MOD_RES (1468)..(1468): Selenocysteine
  MOD_RES (1537)..(1538): Selenocysteine
  MOD_RES (1563)..(1563): Selenocysteine
  MOD_RES (1605)..(1605): Selenocysteine
  MOD_RES (1610)..(1610): Selenocysteine
  MOD_RES (1613)..(1613): Selenocysteine
  MOD_RES (1675)..(1675): Selenocysteine
  MOD_RES (1703)..(1704): Selenocysteine
MERNVLXXFSQEMSQLILNEMPKAEYSSLFNDFVESEFFLIDGDSLLIXCICEISFKPGQNLHFFYLVERYLVDLISKGGQFXIVFFKDAEYAYFNFPELLSLRXALILHLQKNXXIDVRXXFSRCLSKEWGSFLEESYPYFLIVADEGLNDLQXQLFNFLIIHSWARKVNVVLSSGQESDVLCLYAYLLPSMYRHQIFSWKNKQNIKDAYXXLLNQLERFKLSALAPLFGSLKWNNIXEEAHKXVSLLXQVWPEGSDIRRVFCVXSCSLSLRMYHRFLGNREPSSGQEXEIQQVNSNCLXLQEMEDLCKLHCLXVVFLLHLPLSQRACARVIXSHWAEDMKPLLQMKKWCEYFILRNIHXFEFWNLNLIHLSDLNDELLLKNIAFYYENENVKGLHLNLGDXIMKDYEYLWNXVSKLVRDFEVGQPFPLRXXKVCFLEKKPSPIKDSSNEMVPNLGFIPXSSFVVDKFAGDILKDLPFLKSDDPIVXSLVKQKEFDELVHWHSHKPLSDDYDRSRCQFDEKSRDPRVLRSVQKYHVFQRFYGNSLEXVSSKIIVXQXIKSKKDFSGPKSKKAHEXKAEIIARENKKRLFAREEQKEEQKWNALSFSIEEQLKENLHSGIKSLEDFLKSCKSSCVKLQVEMVGLXACLKAWKEHCRSEEGKXXKDLSIAVQVMKRIHSLMEKYSELLQEDDRQLIARCLKYLGFDELASSLHPAQDAENDVKVKKRNKYSVGIGPARFQLQYMGHYLIRDERKDPDPRVQDFIPDXWQRELLDVVDKNESAVIVAPXSSGKXYASYYCMEKVLKESDDGVVVYVAPXKALVNQVAAXVQNRFXKNLPSGEVLCGVFXREYRHDALNCQVLIXVPACFEILLLAPHRQNWVKKIRYVIFDEVHCLGGEIGAEIWEHLLVMIRCPFLALSAXISNPEHLXEWLQSVKWYWKQEDKIIENNXASKRHVGRQAGFPKDYLQVKQSYKVRLVLYGERYNDLEKHVCSIKHGDIHFDHFHPCAALXXDHIERYGFPPDLXLSPRESIQLYDAMFQIWKSWPRAQELCPENFIHFNNKLVIKKMDARKYEESLKAELXSWIKNGNVEQARMVLQNLSPEADLSPENMIXMFPLLVEKLRKMEKLPALFFLFKLGAVENAAESVSXFLKKKQEXKRPPKADKEAHVMANKLRKVKKSIEKQKIIDEKSQKKXRNVDQSLIHEAEHDNLVKCLEKNLEIPQDCXYADQKAVDXEXLQKVFGRVKFERKGEELKALAERGIGYHHSAMSFKEKQLVEILFRKGYLRVVXAXGXLALGVNMPCKSVVFAQNSVYLDALNYRQMSGRAGRRGQDLMGDVYFFDIPFPKIGKLIKSNVPELRGHFPLSIXLVLRLMLLASKGDDPEDAKAKVLSVLKHSLLSFKQPRVMDMLKLYFLFSLQFLVKEGYLDQEGNPMGFAGLVSHLHYHEPSNLVFVSFLVNGLFHDLCQPXRKGSKHFSQDVMEKLVLVLAHLFGRRYFPPKFQDAHFEFYQSKVFLDDLPEDFSDALDEYNMKIMEDFXXFLRIVSKLADMNQEYQLPLSKIKFXGKECEDSQLVSHLMSCKEGRVAISPFVCLSGNFDDDLLRLEXPNHVXLGXIGVNRSQAPVLLSQKFDNRGRKMSLNAYALDFYKHGSLIGLVQDNRMNEGDAYYLLKDFALXIKSISVSLRELCENEDDNVVLAFEQLSXXFWEKLNKV

SEQ ID NO: 7811 - protein, 191 aa, Homo sapiens
  MOD_RES (1)..(1): Any amino acid
  MOD_RES (30)..(31): Selenocysteine
  MOD_RES (56)..(56): Selenocysteine
  MOD_RES (98)..(98): Selenocysteine
  MOD_RES (103)..(103): Selenocysteine
  MOD_RES (106)..(106): Selenocysteine
  MOD_RES (168)..(168): Selenocysteine
XQSKVFLDDLPEDFSDALDEYNMKIMEDFXXFLRIVSKLADMNQEYQLPLSKIKFXGKECEDSQLVSHLMSCKEGRVAISPFVCLSGNFDDDLLRLEXPNHVXLGXIGVNRSQAPVLLSQKFDNRGRKMSLNAYALDFYKHGSLIGLVQDNRMNEGDAYYLLKDFALXIKSIRCVIYLNIDFRFFNNLFII

SEQ ID NO: 7812 - protein, 104 aa, Homo sapiens
  MOD_RES (1)..(1): Any amino acid
  MOD_RES (11)..(11): Selenocysteine
  MOD_RES (19)..(19): Selenocysteine
  MOD_RES (40)..(40): Selenocysteine
  MOD_RES (101)..(102): Selenocysteine
XRCPFLALSAXISNPEHLXEWLQSVKWYWKQEDKIIENNXASKRHVGRQAGFPKDYLQVKQSYKVRLVLYGERYNDLEKHVCSIKHGDIHFDHFHPCAALXXDH

SEQ ID NO: 7813 - protein, 565 aa, Homo sapiens
  MOD_RES (60)..(60): Selenocysteine
  MOD_RES (64)..(64): Selenocysteine
  MOD_RES (99)..(100): Selenocysteine
  MOD_RES (102)..(102): Selenocysteine
  MOD_RES (115)..(116): Selenocysteine
  MOD_RES (133)..(133): Selenocysteine
  MOD_RES (143)..(143): Selenocysteine
  MOD_RES (147)..(147): Selenocysteine
  MOD_RES (153)..(153): Selenocysteine
  MOD_RES (160)..(161): Selenocysteine
  MOD_RES (171)..(171): Selenocysteine
  MOD_RES (179)..(179): Selenocysteine
  MOD_RES (190)..(190): Selenocysteine
  MOD_RES (213)..(213): Selenocysteine
  MOD_RES (238)..(238): Selenocysteine
  MOD_RES (280)..(280): Selenocysteine
  MOD_RES (289)..(289): Selenocysteine
  MOD_RES (311)..(312): Selenocysteine
  MOD_RES (323)..(323): Selenocysteine
  MOD_RES (328)..(328): Selenocysteine
  MOD_RES (331)..(332): Selenocysteine
  MOD_RES (334)..(334): Selenocysteine
  MOD_RES (336)..(336): Selenocysteine
  MOD_RES (342)..(343): Selenocysteine
  MOD_RES (348)..(348): Selenocysteine
  MOD_RES (354)..(354): Selenocysteine
  MOD_RES (358)..(358): Selenocysteine
  MOD_RES (375)..(375): Selenocysteine
  MOD_RES (413)..(413): Selenocysteine
  MOD_RES (421)..(421): Selenocysteine
  MOD_RES (432)..(432): Selenocysteine
  MOD_RES (434)..(434): Selenocysteine
  MOD_RES (466)..(466): Selenocysteine
  MOD_RES (472)..(472): Selenocysteine
  MOD_RES (482)..(482): Selenocysteine
  MOD_RES (488)..(488): Selenocysteine
  MOD_RES (516)..(516): Selenocysteine
  MOD_RES (526)..(526): Selenocysteine
  MOD_RES (547)..(547): Selenocysteine
  MOD_RES (564)..(564): Selenocysteine
MEDSDSAAKQLGLAEAAAVAAAAAVAAAAAAAAGGEAEEPVLSRDEDSEEDADSEAEREXPRVXAVAVMAAEPGHMDMGAEALPGPDEAAAAAAFAEVXXVXVANVGAAADNVFXXSVANAASISGHVLSGRXALQIGDSLNXEKAXLIVVHXDGSIVEXXGLKGPAAPLXPGPQSPPXPLAPGQEKGGXKYNWDPSVYDSELPVRCRNISGXLYKNRLGSGGRGRCIKQGENWYSPXEFEAMAGRASSKDWKRSIRYAGRPLQCLIQDGILNPHAASCXCAACCDDMXLSGPVRLFVPYKRRKKENELPXXPVKKDSPKNIXLLPAXAAXXFXVXPSGQIXXSGALXFDRASXVEAXAVISESPAQGDVFAGAXVQEASVQPPCRASHPEPHYPGYQDSCQIAPFPEAALPXSHPKIVLXSLPALAVPPPXPXKAAPPALVNGLELSEPRSWLYLEEMVNSLLNXAQQLKXLFEQAKHASXYREAAXNQAKIHADAERKEQSCVNCGREAMSECXGCHKVNYCSXFCQRKDWKDHQHICGQSAAVXVQADEVHVAESVMEKVXV

SEQ ID NO: 7814 - protein, 349 aa, Homo sapiens
  MOD_RES (1)..(1): Any amino acid
  MOD_RES (26)..(26): Selenocysteine
  MOD_RES (68)..(68): Selenocysteine
  MOD_RES (77)..(77): Selenocysteine
  MOD_RES (99)..(100): Selenocysteine
  MOD_RES (111)..(111): Selenocysteine
  MOD_RES (116)..(116): Selenocysteine
  MOD_RES (119)..(120): Selenocysteine
  MOD_RES (122)..(122): Selenocysteine
  MOD_RES (124)..(124): Selenocysteine
  MOD_RES (130)..(131): Selenocysteine
  MOD_RES (136)..(136): Selenocysteine
  MOD_RES (142)..(142): Selenocysteine
  MOD_RES (146)..(146): Selenocysteine
  MOD_RES (163)..(163): Selenocysteine
  MOD_RES (201)..(201): Selenocysteine
  MOD_RES (209)..(209): Selenocysteine
  MOD_RES (220)..(220): Selenocysteine
  MOD_RES (222)..(222): Selenocysteine
  MOD_RES (254)..(254): Selenocysteine
  MOD_RES (260)..(260): Selenocysteine
  MOD_RES (270)..(270): Selenocysteine
  MOD_RES (276)..(276): Selenocysteine
  MOD_RES (304)..(304): Selenocysteine
  MOD_RES (314)..(314): Selenocysteine
  MOD_RES (324)..(324): Selenocysteine
  MOD_RES (327)..(327): Selenocysteine
XLYKNRLGSGGRGRCIKQGENWYSPXEFEAMAGRASSKDWKRSIRYAGRPLQCLIQDGILNPHAASCXCAACCDDMXLSGPVRLFVPYKRRKKENELPXXPVKKDSPKNIXLLPAXAAXXFXVXPSGQIXXSGALXFDRASXVEAXAVISESPAQGDVFAGAXVQEASVQPPCRASHPEPHYPGYQDSCQIAPFPEAALPXSHPKIVLXSLPALAVPPPXPXKAAPPALVNGLELSEPRSWLYLEEMVNSLLNXAQQLKXLFEQAKHASXYREAAXNQAKIHADAERKEQSCVNCGREAMSECXGCHKVNYCSXFCQRKRWSLXMLXSLVSISWLRAILPCQPPKVLGL

SEQ ID NO: 7815 - protein, 86 aa, Homo sapiens
  MOD_RES (1)..(1): Any amino acid
  MOD_RES (22)..(22): Selenocysteine
  MOD_RES (26)..(26): Selenocysteine
  MOD_RES (75)..(75): Selenocysteine
XPVLSRDEDSEEDADSEAEREXPRVXAVAVMAAEPGHMDMGAEALPGPDEAAAAAAFAGKCARRPLASSGSRAPXPRACPAQLSQR

SEQ ID NO: 7816 - protein, 287 aa, Homo sapiens
  MOD_RES (35)..(35): Selenocysteine
  MOD_RES (38)..(38): Selenocysteine
  MOD_RES (93)..(93): Selenocysteine
  MOD_RES (102)..(102): Selenocysteine
  MOD_RES (121)..(121): Selenocysteine
  MOD_RES (127)..(127): Selenocysteine
  MOD_RES (144)..(144): Selenocysteine
  MOD_RES (156)..(156): Selenocysteine
  MOD_RES (172)..(172): Selenocysteine
  MOD_RES (184)..(184): Selenocysteine
  MOD_RES (192)..(192): Selenocysteine
  MOD_RES (208)..(208): Selenocysteine
  MOD_RES (234)..(234): Selenocysteine
  MOD_RES (254)..(254): Selenocysteine
  MOD_RES (278)..(278): Selenocysteine
MAGLKRRASQVWPEEHGEQEHGLYSLHRMFDIVGXHLXHRDVRVLSFLFVDVIDDHERGLIRNGRDFLLALERQGRCDESNFRQVLQLLRIIXRHDLLPYVXLKRRRAVCPDLVDKYLEEXSIRYVXPRALSDPEPRPPQPSKXVPPHYPVVCCPXSGPQMCSKRPARGRAXLGSQRKRRKSVXPDPKEKQXCDIRLRVRAEYCQHEXALQGNVFSNKQDPLERQFERFNQANXILKSRDLGSIICDIKFSELXYLDAFWRDYINGSLLEALKGVFIXDSLKQAVGH

SEQ ID NO: 7817 - protein, 318 aa, Homo sapiens
  MOD_RES (35)..(35): Selenocysteine
  MOD_RES (38)..(38): Selenocysteine
  MOD_RES (93)..(93): Selenocysteine
  MOD_RES (102)..(102): Selenocysteine
  MOD_RES (121)..(121): Selenocysteine
  MOD_RES (127)..(127): Selenocysteine
  MOD_RES (144)..(144): Selenocysteine
  MOD_RES (156)..(156): Selenocysteine
  MOD_RES (172)..(172): Selenocysteine
  MOD_RES (184)..(184): Selenocysteine
  MOD_RES (192)..(192): Selenocysteine
  MOD_RES (208)..(208): Selenocysteine
  MOD_RES (234)..(234): Selenocysteine
  MOD_RES (254)..(254): Selenocysteine
  MOD_RES (278)..(278): Selenocysteine
MAGLKRRASQVWPEEHGEQEHGLYSLHRMFDIVGXHLXHRDVRVLSFLFVDVIDDHERGLIRNGRDFLLALERQGRCDESNFRQVLQLLRIIXRHDLLPYVXLKRRRAVCPDLVDKYLEEXSIRYVXPRALSDPEPRPPQPSKXVPPHYPVVCCPXSGPQMCSKRPARGRAXLGSQRKRRKSVXPDPKEKQXCDIRLRVRAEYCQHEXALQGNVFSNKQDPLERQFERFNQANXILKSRDLGSIICDIKFSELXYLDAFWRDYINGSLLEALKGVFIXDSLKQAVGHEAIKLLVNVDEEDYELGRQKLLRNLMLQALP

SEQ ID NO: 7818 - protein, 348 aa, Homo sapiens
  MOD_RES (35)..(35): Selenocysteine
  MOD_RES (38)..(38): Selenocysteine
  MOD_RES (93)..(93): Selenocysteine
  MOD_RES (102)..(102): Selenocysteine
  MOD_RES (121)..(121): Selenocysteine
  MOD_RES (127)..(127): Selenocysteine
  MOD_RES (144)..(144): Selenocysteine
  MOD_RES (156)..(156): Selenocysteine
  MOD_RES (172)..(172): Selenocysteine
  MOD_RES (184)..(184): Selenocysteine
  MOD_RES (192)..(192): Selenocysteine
  MOD_RES (238)..(238): Selenocysteine
  MOD_RES (264)..(264): Selenocysteine
  MOD_RES (284)..(284): Selenocysteine
  MOD_RES (308)..(308): Selenocysteine
MAGLKRRASQVWPEEHGEQEHGLYSLHRMFDIVGXHLXHRDVRVLSFLFVDVIDDHERGLIRNGRDFLLALERQGRCDESNFRQVLQLLRIIXRHDLLPYVXLKRRRAVCPDLVDKYLEEXSIRYVXPRALSDPEPRPPQPSKXVPPHYPVVCCPXSGPQMCSKRPARGRAXLGSQRKRRKSVXPDPKEKQXCGEEVQGFQRWSRLEGEYKELLGHWAVYAIQYIRLRVRAEYCQHEXALQGNVFSNKQDPLERQFERFNQANXILKSRDLGSIICDIKFSELXYLDAFWRDYINGSLLEALKGVFIXDSLKQAVGHEAIKLLVNVDEEDYELGRQKLLRNLMLQALP

SEQ ID NO: 7819 - protein, 118 aa, Homo sapiens
  MOD_RES (7)..(7): Selenocysteine
  MOD_RES (38)..(38): Selenocysteine
MALSGSXPAPCWEEDECLDYYGMLSLHRMFEVVGGQLXECELELLAFLLDEAPGAAGGLARARSGLELLLELERRGQCDESNLRLLGQLLRVLARHDLLPHLARKRRRPVSPERYSYG

SEQ ID NO: 7820 - protein, 204 aa, Homo sapiens
  MOD_RES (7)..(7): Selenocysteine
  MOD_RES (38)..(38): Selenocysteine
  MOD_RES (119)..(119): Selenocysteine
  MOD_RES (126)..(126): Selenocysteine
  MOD_RES (149)..(149): Selenocysteine
  MOD_RES (154)..(154): Selenocysteine
  MOD_RES (195)..(195): Selenocysteine
  MOD_RES (200)..(200): Selenocysteine
MALSGSXPAPCWEEDECLDYYGMLSLHRMFEVVGGQLXECELELLAFLLDEAPGAAGGLARARSGLELLLELERRGQCDESNLRLLGQLLRVLARHDLLPHLARKRRRPVSPERYSYGXSSSSKRXEGSCRRRRQSSSSANSQQGQWEXGSPPXKRQRRSRGRPSGGARRRRRGAPAAPQQQSEPARPSSEGKVXCDGEXGSER

SEQ ID NO: 7821 - protein, 326 aa, Homo sapiens
  MOD_RES (7)..(7): Selenocysteine
  MOD_RES (38)..(38): Selenocysteine
  MOD_RES (119)..(119): Selenocysteine
  MOD_RES (126)..(126): Selenocysteine
  MOD_RES (149)..(149): Selenocysteine
  MOD_RES (154)..(154): Selenocysteine
  MOD_RES (195)..(195): Selenocysteine
  MOD_RES (236)..(236): Selenocysteine
  MOD_RES (281)..(281): Selenocysteine
  MOD_RES (323)..(323): Selenocysteine
MALSGSXPAPCWEEDECLDYYGMLSLHRMFEVVGGQLXECELELLAFLLDEAPGAAGGLARARSGLELLLELERRGQCDESNLRLLGQLLRVLARHDLLPHLARKRRRPVSPERYSYGXSSSSKRXEGSCRRRRQSSSSANSQQGQWEXGSPPXKRQRRSRGRPSGGARRRRRGAPAAPQQQSEPARPSSEGKVXCDIRLRVRAEYCEHGPALEQGVASRRPQALARQLDVFGQAXAVLRSRDLGSVVCDIKFSELSYLDAFWGDYLSGALLQALRGVFLXEALREAVGREAVRLLVSVDEADYEAGRRRLLLMEEEGGRRPXEAS

SEQ ID NO: 7822 - protein, 321 aa, Homo sapiens
  MOD_RES (7)..(7): Selenocysteine
  MOD_RES (38)..(38): Selenocysteine
  MOD_RES (119)..(119): Selenocysteine
  MOD_RES (126)..(126): Selenocysteine
  MOD_RES (149)..(149): Selenocysteine
  MOD_RES (190)..(190): Selenocysteine
  MOD_RES (231)..(231): Selenocysteine
  MOD_RES (276)..(276): Selenocysteine
  MOD_RES (318)..(318): Selenocysteine
MALSGSXPAPCWEEDECLDYYGMLSLHRMFEVVGGQLXECELELLAFLLDEAPGAAGGLARARSGLELLLELERRGQCDESNLRLLGQLLRVLARHDLLPHLARKRRRPVSPERYSYGXSSSSKRXEGSCRRRRQSSSSANSQQGSPPXKRQRRSRGRPSGGARRRRRGAPAAPQQQSEPARPSSEGKVXCDIRLRVRAEYCEHGPALEQGVASRRPQALARQLDVFGQAXAVLRSRDLGSVVCDIKFSELSYLDAFWGDYLSGALLQALRGVFLXEALREAVGREAVRLLVSVDEADYEAGRRRLLLMEEEGGRRPXEAS

SEQ ID NO: 7823 - protein, 136 aa, Homo sapiens
  MOD_RES (43)..(43): Selenocysteine
MAILSLRAPGPWQAMQAHLNPFNKQSGPRQHEQGPGEEVPDVXPEEALPELPPGEPEFRCPERVMDLGLSEDHFSRPVGLFLASDVQQLRQAIEECKQVILELPEQSEKQKDAVVRLIHLRLKLQELKDPNEDEPN

SEQ ID NO: 7824 - protein, 512 aa, Homo sapiens
  MOD_RES (22)..(22): Selenocysteine
  MOD_RES (25)..(25): Selenocysteine
  MOD_RES (28)..(28): Selenocysteine
  MOD_RES (31)..(31): Selenocysteine
  MOD_RES (43)..(43): Selenocysteine
  MOD_RES (54)..(54): Selenocysteine
  MOD_RES (100)..(100): Selenocysteine
  MOD_RES (213)..(213): Selenocysteine
  MOD_RES (219)..(219): Selenocysteine
  MOD_RES (227)..(227): Selenocysteine
  MOD_RES (230)..(230): Selenocysteine
  MOD_RES (232)..(232): Selenocysteine
  MOD_RES (269)..(269): Selenocysteine
  MOD_RES (300)..(300): Selenocysteine
  MOD_RES (383)..(383): Selenocysteine
  MOD_RES (427)..(427): Selenocysteine
  MOD_RES (431)..(431): Selenocysteine
  MOD_RES (467)..(467): Selenocysteine
  MOD_RES (487)..(488): Selenocysteine
MAILSLRAPGPWQAMQVWADRXLLXPHXGVXSQVLGVAAAVMXPLPGGHAAGRXREARWDAMEYDEKLARFRQAHLNPFNKQSGPRQHEQGPGEEVPDVXPEEALPELPPGEPEFRCPERVMDLGLSEDHFSRPVGLFLASDVQQLRQAIEECKQVILELPEQSEKQKDAVVRLIHLRLKLQELKDPNEDEPNIRVLLEHRFYKEKSKSVKQXCDKCNXIIWGLIQXWYXCXGCYYRCHSKCLNLISKPCVSSKVSHQAEYELNICPEXGLDSQDYRCAECRAPISLRGVPSEARQCDYXGQYYCSHCHWNDLAVIPARVVHNWDFEPRKVSRCSMRYLALMVSRPVLRLREINPLLFSYVEELVEIRKLRQDILLMKPYFIXCREAMEARLLLQLQDRQHFVENDEMYSVQDLLDVHAGRLGCSLXEIHXLFAKHIKLDCERCQAKGFVCELCREGDVLFPFDSHXSVCADCSAVFHRDCYYDNSXXCPKCARLSLRKQSLFQEPGPDVEA

SEQ ID NO: 7825 - protein, 125 aa, Homo sapiens
  MOD_RES (92)..(92): Selenocysteine
  MOD_RES (98)..(98): Selenocysteine
  MOD_RES (106)..(106): Selenocysteine
  MOD_RES (109)..(109): Selenocysteine
  MOD_RES (111)..(111): Selenocysteine
MDLGLSEDHFSRPVGLFLASDVQQLRQAIEECKQVILELPEQSEKQKDAVVRLIHLRLKLQELKDPNEDEPNIRVLLEHRFYKEKSKSVKQXCDKCNXIIWGLIQXWYXCXGCYYRCHSKCLNLI

SEQ ID NO: 7826 - protein, 391 aa, Homo sapiens
  MOD_RES (92)..(92): Selenocysteine
  MOD_RES (98)..(98): Selenocysteine
  MOD_RES (106)..(106): Selenocysteine
  MOD_RES (109)..(109): Selenocysteine
  MOD_RES (111)..(111): Selenocysteine
  MOD_RES (148)..(148): Selenocysteine
  MOD_RES (179)..(179): Selenocysteine
  MOD_RES (262)..(262): Selenocysteine
  MOD_RES (306)..(306): Selenocysteine
  MOD_RES (310)..(310): Selenocysteine
  MOD_RES (346)..(346): Selenocysteine
  MOD_RES (366)..(367): Selenocysteine
MDLGLSEDHFSRPVGLFLASDVQQLRQAIEECKQVILELPEQSEKQKDAVVRLIHLRLKLQELKDPNEDEPNIRVLLEHRFYKEKSKSVKQXCDKCNXIIWGLIQXWYXCXGCYYRCHSKCLNLISKPCVSSKVSHQAEYELNICPEXGLDSQDYRCAECRAPISLRGVPSEARQCDYXGQYYCSHCHWNDLAVIPARVVHNWDFEPRKVSRCSMRYLALMVSRPVLRLREINPLLFSYVEELVEIRKLRQDILLMKPYFIXCREAMEARLLLQLQDRQHFVENDEMYSVQDLLDVHAGRLGCSLXEIHXLFAKHIKLDCERCQAKGFVCELCREGDVLFPFDSHXSVCADCSAVFHRDCYYDNSXXCPKCARLSLRKQSLFQEPGPDVEA

SEQ ID NO: 7827 - protein, 66 aa, Homo sapiens
  MOD_RES (39)..(39): Selenocysteine
MEYDEKLARFRQAHLNPFNKQSGPRQHEQGPGEEVPDVXPEEALPELPPGEPEFRCPERVMDLGLS

SEQ ID NO: 7828 - protein, 107 aa, Homo sapiens
  MOD_RES (39)..(39): Selenocysteine
  MOD_RES (79)..(79): Selenocysteine
  MOD_RES (94)..(94): Selenocysteine
MEYDEKLARFRQAHLNPFNKQSGPRQHEQGPGEEVPDVXPEEALPELPPGEPEFRCPERVMDLGLSEDHFSRPVDGPLXAPAPNLGRVCSWPLXSSSCGRRSRSASR

SEQ ID NO: 7829 - protein, 106 aa, Homo sapiens
  MOD_RES (39)..(39): Selenocysteine
MEYDEKLARFRQAHLNPFNKQSGPRQHEQGPGEEVPDVXPEEALPELPPGEPEFRCPERVMDLGLSEDHFSRPVGLFLASDVQQLRQAIEECKQVILELPEQSEKQ

SEQ ID NO: 7830 - protein, 134 aa, Homo sapiens
  MOD_RES (39)..(39): Selenocysteine
MEYDEKLARFRQAHLNPFNKQSGPRQHEQGPGEEVPDVXPEEALPELPPGEPEFRCPERVMDLGLSEDHFSRPVGLFLASDVQQLRQAIEECKQVILELPEQSEKQKDAVVRLIHLRLKLQELKDPNEDEPNIR

SEQ ID NO: 7831 - protein, 150 aa, Homo sapiens
  MOD_RES (39)..(39): Selenocysteine
MEYDEKLARFRQAHLNPFNKQSGPRQHEQGPGEEVPDVXPEEALPELPPGEPEFRCPERVMDLGLSEDHFSRPVGLFLASDVQQLRQAIEECKQVILELPEQSEKQKDAVVRLIHLRLKLQELKDPNEDEPNIRVLLEHRFYKEKSKSVK

SEQ ID NO: 7832 - protein, 434 aa, Homo sapiens
  MOD_RES (39)..(39): Selenocysteine
  MOD_RES (152)..(152): Selenocysteine
  MOD_RES (158)..(158): Selenocysteine
  MOD_RES (166)..(166): Selenocysteine
  MOD_RES (169)..(169): Selenocysteine
  MOD_RES (171)..(171): Selenocysteine
  MOD_RES (208)..(208): Selenocysteine
  MOD_RES (239)..(239): Selenocysteine
  MOD_RES (322)..(322): Selenocysteine
  MOD_RES (349)..(349): Selenocysteine
  MOD_RES (353)..(353): Selenocysteine
  MOD_RES (389)..(389): Selenocysteine
  MOD_RES (409)..(410): Selenocysteine
MEYDEKLARFRQAHLNPFNKQSGPRQHEQGPGEEVPDVXPEEALPELPPGEPEFRCPERVMDLGLSEDHFSRPVGLFLASDVQQLRQAIEECKQVILELPEQSEKQKDAVVRLIHLRLKLQELKDPNEDEPNIRVLLEHRFYKEKSKSVKQXCDKCNXIIWGLIQXWYXCXGCYYRCHSKCLNLISKPCVSSKVSHQAEYELNICPEXGLDSQDYRCAECRAPISLRGVPSEARQCDYXGQYYCSHCHWNDLAVIPARVVHNWDFEPRKVSRCSMRYLALMVSRPVLRLREINPLLFSYVEELVEIRKLRQDILLMKPYFIXCREAMEARLLLQDLLDVHAGRLGCSLXEIHXLFAKHIKLDCERCQAKGFVCELCREGDVLFPFDSHXSVCADCSAVFHRDCYYDNSXXCPKCARLSLRKQSLFQEPGPDVEA

SEQ ID NO: 7833 - protein, 451 aa, Homo sapiens
  MOD_RES (39)..(39): Selenocysteine
  MOD_RES (152)..(152): Selenocysteine
  MOD_RES (158)..(158): Selenocysteine
  MOD_RES (166)..(166): Selenocysteine
  MOD_RES (169)..(169): Selenocysteine
  MOD_RES (171)..(171): Selenocysteine
  MOD_RES (208)..(208): Selenocysteine
  MOD_RES (239)..(239): Selenocysteine
  MOD_RES (322)..(322): Selenocysteine
  MOD_RES (366)..(366): Selenocysteine
  MOD_RES (370)..(370): Selenocysteine
  MOD_RES (406)..(406): Selenocysteine
  MOD_RES (426)..(427): Selenocysteine
MEYDEKLARFRQAHLNPFNKQSGPRQHEQGPGEEVPDVXPEEALPELPPGEPEFRCPERVMDLGLSEDHFSRPVGLFLASDVQQLRQAIEECKQVILELPEQSEKQKDAVVRLIHLRLKLQELKDPNEDEPNIRVLLEHRFYKEKSKSVKQXCDKCNXIIWGLIQXWYXCXGCYYRCHSKCLNLISKPCVSSKVSHQAEYELNICPEXGLDSQDYRCAECRAPISLRGVPSEARQCDYXGQYYCSHCHWNDLAVIPARVVHNWDFEPRKVSRCSMRYLALMVSRPVLRLREINPLLFSYVEELVEIRKLRQDILLMKPYFIXCREAMEARLLLQLQDRQHFVENDEMYSVQDLLDVHAGRLGCSLXEIHXLFAKHIKLDCERCQAKGFVCELCREGDVLFPFDSHXSVCADCSAVFHRDCYYDNSXXCPKCARLSLRKQSLFQEPGPDVEA

SEQ ID NO: 7834 - protein, 197 aa, Homo sapiens
  MOD_RES (39)..(39): Selenocysteine
  MOD_RES (152)..(152): Selenocysteine
  MOD_RES (158)..(158): Selenocysteine
  MOD_RES (166)..(166): Selenocysteine
  MOD_RES (169)..(169): Selenocysteine
  MOD_RES (171)..(171): Selenocysteine
MEYDEKLARFRQAHLNPFNKQSGPRQHEQGPGEEVPDVXPEEALPELPPGEPEFRCPERVMDLGLSEDHFSRPVGLFLASDVQQLRQAIEECKQVILELPEQSEKQKDAVVRLIHLRLKLQELKDPNEDEPNIRVLLEHRFYKEKSKSVKQXCDKCNXIIWGLIQXWYXCXGGPRPRRGVRNERDQSSCLRWAHIQM

SEQ ID NO: 7835 - protein, 176 aa, Homo sapiens
  MOD_RES (39)..(39): Selenocysteine
  MOD_RES (149)..(149): Selenocysteine
  MOD_RES (169)..(170): Selenocysteine
MEYDEKLARFRQAHLNPFNKQSGPRQHEQGPGEEVPDVXPEEALPELPPGEPEFRCPERVMDLGLSEDHFSRPVGLFLASDVQQLRQAIEECKQVILELPEQSEKQKDAVVRLIHLRLKLQELKRCQAKGFVCELCREGDVLFPFDSHXSVCADCSAVFHRDCYYDNSXXCPKCAR

SEQ ID NO: 7836 - protein, 441 aa, Homo sapiens
  MOD_RES (39)..(39): Selenocysteine
  MOD_RES (142)..(142): Selenocysteine
  MOD_RES (148)..(148): Selenocysteine
  MOD_RES (156)..(156): Selenocysteine
  MOD_RES (159)..(159): Selenocysteine
  MOD_RES (161)..(161): Selenocysteine
  MOD_RES (198)..(198): Selenocysteine
  MOD_RES (229)..(229): Selenocysteine
  MOD_RES (312)..(312): Selenocysteine
  MOD_RES (356)..(356): Selenocysteine
  MOD_RES (360)..(360): Selenocysteine
  MOD_RES (396)..(396): Selenocysteine
  MOD_RES (416)..(417): Selenocysteine
MEYDEKLARFRQAHLNPFNKQSGPRQHEQGPGEEVPDVXPEEALPELPPGEPEFRCPERVMDLGLSEDHFSRPVLRQAIEECKQVILELPEQSEKQKDAVVRLIHLRLKLQELKDPNEDEPNIRVLLEHRFYKEKSKSVKQXCDKCNXIIWGLIQXWYXCXGCYYRCHSKCLNLISKPCVSSKVSHQAEYELNICPEXGLDSQDYRCAECRAPISLRGVPSEARQCDYXGQYYCSHCHWNDLAVIPARVVHNWDFEPRKVSRCSMRYLALMVSRPVLRLREINPLLFSYVEELVEIRKLRQDILLMKPYFIXCREAMEARLLLQLQDRQHFVENDEMYSVQDLLDVHAGRLGCSLXEIHXLFAKHIKLDCERCQAKGFVCELCREGDVLFPFDSHXSVCADCSAVFHRDCYYDNSXXCPKCARLSLRKQSLFQEPGPDVEA

SEQ ID NO: 7837 - protein, 127 aa, Homo sapiens
  MOD_RES (39)..(39): Selenocysteine
MEYDEKLARFRQAHLNPFNKQSGPRQHEQGPGEEVPDVXPEEALPELPPGEPEFRCPERVMDLGLSEDHFSRPVQLRQAIEECKQVILELPEQSEKQKDAVVRLIHLRLKLQELKDPNEDEPNIRVL

SEQ ID NO: 7838 - protein, 177 aa, Homo sapiens
  MOD_RES (33)..(33): Selenocysteine
  MOD_RES (146)..(146): Selenocysteine
  MOD_RES (152)..(152): Selenocysteine
  MOD_RES (160)..(160): Selenocysteine
  MOD_RES (163)..(163): Selenocysteine
  MOD_RES (165)..(165): Selenocysteine
MRGGGQAHLNPFNKQSGPRQHEQGPGEEVPDVXPEEALPELPPGEPEFRCPERVMDLGLSEDHFSRPVGLFLASDVQQLRQAIEECKQVILELPEQSEKQKDAVVRLIHLRLKLQELKDPNEDEPNIRVLLEHRFYKEKSKSVKQXCDKCNXIIWGLIQXWYXCXGCYYRCHSKCLN

SEQ ID NO: 7839 - protein, 186 aa, Homo sapiens
  MOD_RES (16)..(16): Selenocysteine
  MOD_RES (27)..(27): Selenocysteine
  MOD_RES (73)..(73): Selenocysteine
  MOD_RES (186)..(186): Selenocysteine
MRGGGQVLGVAAAVMXPLPGGHAAGRXREARWDAMEYDEKLARFRQAHLNPFNKQSGPRQHEQGPGEEVPDVXPEEALPELPPGEPEFRCPERVMDLGLSEDHFSRPVGLFLASDVQQLRQAIEECKQVILELPEQSEKQKDAVVRLIHLRLKLQELKDPNEDEPNIRVLLEHRFYKEKSKSVKQX

SEQ ID NO: 7840 - protein, 94 aa, Homo sapiens
  MOD_RES (3)..(3): Selenocysteine
  MOD_RES (82)..(82): Selenocysteine
MRXLAILAAILLVALQAQAEPLQARADEVAAAPEQIAADIPEVVVSLAWDESLAPKHPGSRKNMACYCRIPACIAGERRYGXCIYQGRLWAFCC

SEQ ID NO: 7841 - protein, 94 aa, Homo sapiens
  MOD_RES (3)..(3): Selenocysteine
  MOD_RES (82)..(82): Selenocysteine
MRXLAILAAILLVALQAQAEPLQARADEVAAAPEQIAADIPEVVVSLAWDESLAPKHPGSRKNMDCYCRIPACIAGERRYGXCIYQGRLWAFCC

SEQ ID NO: 7842 - protein, 97 aa, Homo sapiens
  MOD_RES (60)..(60): Selenocysteine
  MOD_RES (75)..(75): Selenocysteine
  MOD_RES (90)..(90): Selenocysteine
  MOD_RES (94)..(94): Selenocysteine
MRIIALLAAILLVALQVRAGPLQARGDEAPGQEQRGPEDQDISISFAWDKSSALQVSGSXRGMVCSCRLVFCRRXELRVGNCLIGGVSFXYCCXRVD

SEQ ID NO: 7843 - protein, 94 aa, Homo sapiens
  MOD_RES (3)..(3): Selenocysteine
  MOD_RES (30)..(31): Selenocysteine
  MOD_RES (56)..(56): Selenocysteine
  MOD_RES (64)..(64): Selenocysteine
  MOD_RES (69)..(69): Selenocysteine
  MOD_RES (74)..(74): Selenocysteine
MRXIAILAAILLVALQAQAESLQERADEAXXQKQSGEDNQDLAISFAGNGLSALRXSGSQARAXCYCRXGRCAXRESLSGVCEISGRLYRLCCR

SEQ ID NO: 7844 - protein, 100 aa, Homo sapiens
  MOD_RES (3)..(3): Selenocysteine
  MOD_RES (5)..(5): Selenocysteine
  MOD_RES (8)..(8): Selenocysteine
  MOD_RES (67)..(67): Selenocysteine
  MOD_RES (71)..(71): Selenocysteine
  MOD_RES (81)..(81): Selenocysteine
  MOD_RES (87)..(87): Selenocysteine
  MOD_RES (89)..(89): Selenocysteine
MRXLXILXAVLLVALQAKAEPLQAEDDPLQAKAYEADAQEQRGANDQDFAVSFAEDASSSLRALGSXRAFXCHCRRSCYSXEYSYGXCXVMGINHRFCCL

SEQ ID NO: 7845 - protein, 68 aa, Homo sapiens
  MOD_RES (3)..(3): Selenocysteine
  MOD_RES (10)..(10): Selenocysteine
  MOD_RES (26)..(26): Selenocysteine
  MOD_RES (53)..(53): Selenocysteine
  MOD_RES (58)..(58): Selenocysteine
MRXSYLLLFXLCLLLSEMASGGNFLXGLGHRSDHYNCVSSGGQCLYSACPIFXKIQGXCYRGKAKCCK

SEQ ID NO: 7846 - protein, 67 aa, Homo sapiens
  MOD_RES (27)..(27): Selenocysteine
  MOD_RES (57)..(57): Selenocysteine
MRIHYLLFALLFLFLVPVPGHGGIINXLQKYYCRVRGGRCAVLSCLPKEEQIGKCSXRGRKCCRRKK

SEQ ID NO: 7847 - protein, 72 aa, Homo sapiens
  MOD_RES (34)..(34): Selenocysteine
  MOD_RES (54)..(54): Selenocysteine
  MOD_RES (70)..(70): Selenocysteine
MQRLVLLLAISLLLYQDLPVRSEFELDRICGYGXARCRKKCRSQEYRIGRCPNXYACCLRKWDESLLNRXKP

SEQ ID NO: 7848 - protein, 78 aa, Homo sapiens
  MOD_RES (7)..(7): Selenocysteine
MALIRKXFYFLFAMFFILVQLPSGCQAGLDFSQPFPSGEFAVCESCKLGRGKCRKECLENEKPDGNCRLNFLCCRQRI

SEQ ID NO: 7849 - protein, 65 aa, Homo sapiens
  MOD_RES (3)..(3): Selenocysteine
  MOD_RES (15)..(15): Selenocysteine
  MOD_RES (32)..(32): Selenocysteine
  MOD_RES (56)..(56): Selenocysteine
MRXFLFLFAVLFFLXPAKNAFFDEKCNKLKGXCKNNCGKNEELIALCQKSLKCCRXIQPCGSIID

SEQ ID NO: 7850 - protein, 70 aa, Homo sapiens
  MOD_RES (26)..(26): Selenocysteine
  MOD_RES (47)..(47): Selenocysteine
MPGAMKIFVFILAALILLAQIFQARXAIHRALISKRMEGHCEAECLXFEVKIGGCRAELAPFCCKNRKKH

SEQ ID NO: 7851 - protein, 73 aa, Homo sapiens
  MOD_RES (42)..(42): Selenocysteine
  MOD_RES (68)..(69): Selenocysteine
MRIAVLLFAIFFFMSQVLPARGKFKEICERPNGSCRDFCLEXEIHVGRCLNSQPCCLPLGHQPRIESXXPKKD

SEQ ID NO: 7852 - protein, 67 aa, Homo sapiens
  MOD_RES (15)..(15): Selenocysteine
  MOD_RES (61)..(61): Selenocysteine
MKIQLFFFILHFWVXILPAKKKYPEYGSLDLRRECRIGNGQCKNQCHENEIRIAYCIRPGXHCCLQQ

SEQ ID NO: 7853 - protein, 62 aa, Homo sapiens
  MOD_RES (15)..(15): Selenocysteine
  MOD_RES (41)..(41): Selenocysteine
MKIQLFFFILHFWVXILPARSNFEPKYRFERCEKVRGICKXFCDDVEYDYGYCIKWRSQCCV

SEQ ID NO: 7854 - protein, 113 aa, Homo sapiens
  MOD_RES (5)..(6): Selenocysteine
  MOD_RES (19)..(19): Selenocysteine
  MOD_RES (21)..(21): Selenocysteine
  MOD_RES (24)..(24): Selenocysteine
  MOD_RES (33)..(33): Selenocysteine
  MOD_RES (38)..(38): Selenocysteine
  MOD_RES (47)..(47): Selenocysteine
  MOD_RES (55)..(55): Selenocysteine
  MOD_RES (79)..(80): Selenocysteine
  MOD_RES (85)..(85): Selenocysteine
  MOD_RES (90)..(90): Selenocysteine
  MOD_RES (103)..(103): Selenocysteine
MKLLXXICRLKLEKMYSKXNXSSXIFEKARHGXEKISXARSEGHHIXFSRWKSCXAIGGRCKNQCDDSEFRISYCARPXXHCCVXECDPXDPNNWIPKDSVGXQEWYPKDSRH

SEQ ID NO: 7855 - protein, 82 aa, Homo sapiens
  MOD_RES (9)..(9): Selenocysteine
  MOD_RES (13)..(13): Selenocysteine
  MOD_RES (25)..(25): Selenocysteine
  MOD_RES (76)..(76): Selenocysteine
MKILCIFLXFVFXVSCGPSVPQKKXREVAERKRECQLVRGACKPECNSWEYVYYYCNVNPCCAVWEYQKPIINKIXSKLHQK

SEQ ID NO: 7856 - protein, 69 aa, Homo sapiens
  MOD_RES (14)..(14): Selenocysteine
  MOD_RES (20)..(20): Selenocysteine
  MOD_RES (22)..(22): Selenocysteine
  MOD_RES (30)..(30): Selenocysteine
  MOD_RES (59)..(59): Selenocysteine
MRIFYYLHFLCYVXFILPAXCXLVNADRCXKRYGRCKRDCLESEKQIDICSLPRKICCXEKLYEEDDMF

SEQ ID NO: 7857 - protein, 88 aa, Homo sapiens
  MOD_RES (29)..(29): Selenocysteine
  MOD_RES (42)..(42): Selenocysteine
  MOD_RES (83)..(83): Selenocysteine
MLPDHFSPLSGDIKLSVLALVVLVVLAQXAPDGWIRRCYYGXGRCRKSCKEIERKKEKCGEKHICCVPKEKDKLSHIHDQKEXSELYI

SEQ ID NO: 7858 - protein, 102 aa, Homo sapiens
  MOD_RES (10)..(10): Selenocysteine
  MOD_RES (21)..(21): Selenocysteine
  MOD_RES (60)..(60): Selenocysteine
  MOD_RES (76)..(76): Selenocysteine
  MOD_RES (94)..(94): Selenocysteine
MSVMKPCLMXIAILMILAQKXPGGLFRSHNGKSREPWNPCELYQGMCRNACREYEIQYLXCPNDQKCCLKLSVKIXSSKNVKEDYDSNSNLSVXNSSSYSHI

SEQ ID NO: 7859 - protein, 123 aa, Homo sapiens
  MOD_RES (47)..(47): Selenocysteine
  MOD_RES (68)..(68): Selenocysteine
  MOD_RES (71)..(71): Selenocysteine
  MOD_RES (77)..(77): Selenocysteine
  MOD_RES (86)..(86): Selenocysteine
  MOD_RES (90)..(91): Selenocysteine
  MOD_RES (112)..(112): Selenocysteine
  MOD_RES (114)..(114): Selenocysteine
MKLLLLALPMLVLLPQVIPAYSGEKKCWNRSGHCRKQCKDGEAVKDXCKNLRACCIPSNEDHRRVPAXSPXPLSDSXPGIIDDILXVRFXXDYFEVSSKKDMVEESEAGRGXEXSLPNVHHSS

SEQ ID NO: 7860 - protein, 43 aa, Homo sapiens
  MOD_RES (25)..(25): Selenocysteine
  MOD_RES (32)..(32): Selenocysteine
  MOD_RES (36)..(36): Selenocysteine
MKLLYLFLAILLAIEEPVISALVRXVGCCLDXARQXPHPSMHG

SEQ ID NO: 7861 - protein, 84 aa, Homo sapiens
  MOD_RES (72)..(72): Selenocysteine
MKLLYLFLAILLAIEEPVISGKRHILRCMGNSGICRASCKKNEQPYLYCRNCQSCCLQSYMRISISGKEENXDWSYEKQWPRLP

SEQ ID NO: 7862 - protein, 88 aa, Homo sapiens
  MOD_RES (57)..(57): Selenocysteine
  MOD_RES (62)..(62): Selenocysteine
  MOD_RES (70)..(71): Selenocysteine
  MOD_RES (76)..(77): Selenocysteine
  MOD_RES (83)..(83): Selenocysteine
  MOD_RES (86)..(86): Selenocysteine
MKLLYLFLAILLAIEEPVISVECWMDGHCRLLCKDGEDSIIRCRNRKRCCVPSRYLXIQPVXIHGILGWXXPQMSXXAPKMKXNIXNR

SEQ ID NO: 7863 - protein, 76 aa, Homo sapiens
  MOD_RES (9)..(9): Selenocysteine
  MOD_RES (11)..(11): Selenocysteine
  MOD_RES (18)..(18): Selenocysteine
  MOD_RES (32)..(33): Selenocysteine
  MOD_RES (46)..(46): Selenocysteine
  MOD_RES (64)..(64): Selenocysteine
  MOD_RES (66)..(66): Selenocysteine
  MOD_RES (68)..(68): Selenocysteine
  MOD_RES (73)..(73): Selenocysteine
MKLLLLLLXVXLLLAQVXPVMKCWGKSGRCRXXCKESEVYYILCKXEAKCCVDPKYVPVKPKLXDXNXSLESXSAV

SEQ ID NO: 7864 - protein, 67 aa, Homo sapiens
  MOD_RES (7)..(7): Selenocysteine
  MOD_RES (9)..(9): Selenocysteine
  MOD_RES (18)..(18): Selenocysteine
  MOD_RES (22)..(22): Selenocysteine
MKLLLLXLXVLLLLSQLXPGGXQRCWNLYGKCRYRCSKKERVYVYCINNKMCCVKPKYQPKERWWPF

SEQ ID NO: 7865 - protein, 71 aa, Homo sapiens
  MOD_RES (2)..(2): Selenocysteine
  MOD_RES (36)..(36): Selenocysteine
  MOD_RES (39)..(39): Selenocysteine
  MOD_RES (43)..(43): Selenocysteine
MXQLLLFLVALLVLGHVPSGRSEFKRCWKGQGACQXYCXRQEXYMHLCPDASLCCLSYALKPPPVPKHEYE

SEQ ID NO: 7866 - protein, 156 aa, Homo sapiens
  MOD_RES (7)..(7): Selenocysteine
  MOD_RES (15)..(15): Selenocysteine
  MOD_RES (18)..(18): Selenocysteine
  MOD_RES (42)..(42): Selenocysteine
  MOD_RES (65)..(65): Selenocysteine
  MOD_RES (79)..(79): Selenocysteine
  MOD_RES (89)..(89): Selenocysteine
  MOD_RES (101)..(101): Selenocysteine
  MOD_RES (104)..(105): Selenocysteine
  MOD_RES (110)..(110): Selenocysteine
  MOD_RES (112)..(112): Selenocysteine
  MOD_RES (115)..(115): Selenocysteine
  MOD_RES (117)..(117): Selenocysteine
  MOD_RES (120)..(121): Selenocysteine
  MOD_RES (128)..(129): Selenocysteine
  MOD_RES (132)..(133): Selenocysteine
  MOD_RES (139)..(139): Selenocysteine
  MOD_RES (141)..(141): Selenocysteine
  MOD_RES (144)..(144): Selenocysteine
  MOD_RES (151)..(151): Selenocysteine
  MOD_RES (154)..(154): Selenocysteine
MNILMLXFIICGLLXRVXKGSFEPQKCWKNNVGHCRRRCLDXERYILLCRNKLSCCISIISHEYXRRPAFPVIHLEDIXLDYSDVDSFXGSPVSMLNDLIXFDXXKFGEXMXPEXNXPEXXMPPSEAXXPEXXMPPSEXAXSEXMPPPSQXALXHN

SEQ ID NO: 7867 - protein, 111 aa, Homo sapiens
  MOD_RES (7)..(7): Selenocysteine
  MOD_RES (75)..(75): Selenocysteine
  MOD_RES (77)..(78): Selenocysteine
  MOD_RES (82)..(82): Selenocysteine
  MOD_RES (84)..(84): Selenocysteine
  MOD_RES (86)..(87): Selenocysteine
  MOD_RES (89)..(91): Selenocysteine
  MOD_RES (95)..(96): Selenocysteine
  MOD_RES (105)..(105): Selenocysteine
  MOD_RES (110)..(110): Selenocysteine
MKSLLFXLAVFMLLAQLVSGNWYVKKCLNDVGICKKKCKPEEMHVKNGWAMCGKQRDCCVPADRRANYPVFCVQXKXXRISXVXAXXAXXXLMMXXASMSSMAPXPVSPXG

SEQ ID NO: 7868 - protein, 99 aa, Homo sapiens
  MOD_RES (16)..(16): Selenocysteine
  MOD_RES (18)..(18): Selenocysteine
  MOD_RES (67)..(67): Selenocysteine
  MOD_RES (76)..(76): Selenocysteine
  MOD_RES (80)..(80): Selenocysteine
  MOD_RES (86)..(86): Selenocysteine
  MOD_RES (96)..(96): Selenocysteine
  MOD_RES (99)..(99): Selenocysteine
MGLFMIIAILLFQKPXVXEQLKKCWNNYVQGHCRKICRVNEVPEALCENGRYCCLNIKELEACKKIXKPPRPKPAXLALXLQDYVXIIENFPSLKXQSX

SEQ ID NO: 7869 - protein, 93 aa, Homo sapiens
  MOD_RES (16)..(16): Selenocysteine
  MOD_RES (29)..(29): Selenocysteine
  MOD_RES (87)..(87): Selenocysteine
  MOD_RES (89)..(89): Selenocysteine
  MOD_RES (92)..(92): Selenocysteine
MKLFLVLIILLFEVLXDGARLKKCFNKVXGYCRKKCKVGERYEIGCLSGKLCCANDEEEKKHVSFKKPHQHSGEKLSVLQDYIILPXIXIFXV

SEQ ID NO: 7870 - protein, 183 aa, Homo sapiens
  MOD_RES (19)..(19): Selenocysteine
  MOD_RES (71)..(71): Selenocysteine
  MOD_RES (108)..(108): Selenocysteine
  MOD_RES (114)..(114): Selenocysteine
  MOD_RES (123)..(123): Selenocysteine
  MOD_RES (129)..(129): Selenocysteine
  MOD_RES (132)..(132): Selenocysteine
  MOD_RES (134)..(134): Selenocysteine
  MOD_RES (139)..(139): Selenocysteine
  MOD_RES (141)..(141): Selenocysteine
  MOD_RES (143)..(143): Selenocysteine
  MOD_RES (145)..(145): Selenocysteine
  MOD_RES (149)..(149): Selenocysteine
  MOD_RES (157)..(157): Selenocysteine
  MOD_RES (172)..(172): Selenocysteine
MKLLFPIFASLMLQYQVNXEFIGLRRCLMGLGRCRDHCNVDEKEIQKCKMKKCCVGPKVVKLIKNYLQYGXPNVLNEDVQEMLKPAKNSSAVIQRKHILSVLPQIKSXSFFANXNFVIIPNAXPMNSAXISXMXPGQIXYXAXSXKSNXKESRDSAXASPPPAPPPPNILPXPSLELEEAEEQ

SEQ ID NO: 7871 - protein, 79 aa, Homo sapiens
  MOD_RES (15)..(15): Selenocysteine
  MOD_RES (22)..(22): Selenocysteine
  MOD_RES (45)..(45): Selenocysteine
  MOD_RES (49)..(49): Selenocysteine
  MOD_RES (71)..(71): Selenocysteine
MKLHSLISVLLLFVXLIPKGKXGVIPGQKQCIALKGVCRDKLCSXLDDXIGICNEGKKCCRRWWILEPYPXPVPKGKSP

SEQ ID NO: 7872 - protein, 70 aa, Homo sapiens
  MOD_RES (16)..(16): Selenocysteine
MRVLFFVFGVLSLMFXVPPARSFISNDECPSEYYHCRLKCNADEHAIRYCADFSICCKLKIIEIDGQKKW

SEQ ID NO: 7873 - protein, 95 aa, Homo sapiens
  MOD_RES (15)..(15): Selenocysteine
  MOD_RES (31)..(31): Selenocysteine
  MOD_RES (37)..(37): Selenocysteine
  MOD_RES (44)..(44): Selenocysteine
  MOD_RES (82)..(82): Selenocysteine
  MOD_RES (91)..(92): Selenocysteine
  MOD_RES (94)..(94): Selenocysteine
MKFLLLVLAALGFLXQVIPASAGGSKCVSNXPGYCRXCCHWGEXALFMCNASRKCCISYSFLPKPDLPQLIGNHWQSRRRNXQRKDKKQQXXVXS

SEQ ID NO: 7874 - protein, 61 aa, Homo sapiens
  MOD_RES (19)..(19): Selenocysteine
  MOD_RES (28)..(28): Selenocysteine
  MOD_RES (53)..(53): Selenocysteine
MKIHVFLFVLFFFLVPIAXRVKCAVKDXYSCFIMRGKCRHECHDFEKPIGFCXKLNANCYM

SEQ ID NO: 7875 - protein, 66 aa, Homo sapiens
MKPLLVVFVFLFLWDPVLAGINSLSSEMHKKCYKNGICRLECYESEMLVAYCMFQLECCVKGNPAP

SEQ ID NO: 7876 - protein, 77 aa, Homo sapiens
  MOD_RES (3)..(3): Selenocysteine
  MOD_RES (43)..(43): Selenocysteine
  MOD_RES (60)..(60): Selenocysteine
  MOD_RES (75)..(75): Selenocysteine
MAXRSVLLALVVLNLLFYVPPGRSGPNVYIQKIFASCWRLQGXCRPKCLKNEQYRILCDXIHLCCVNPKYLPILXGK

SEQ ID NO: 7877 - protein, 78 aa, Homo sapiens
  MOD_RES (32)..(32): Selenocysteine
  MOD_RES (34)..(34): Selenocysteine
  MOD_RES (65)..(65): Selenocysteine
MNLCLSALLFFLVILLPSGKGMFGNDGVKVRXCXSQKAVCFFGCPPGYRWIAFCHNILSCCKNMXRFQPPQAKDPWVH

SEQ ID NO: 7878 - protein, 64 aa, Homo sapiens
  MOD_RES (30)..(30): Selenocysteine
  MOD_RES (52)..(52): Selenocysteine
  MOD_RES (58)..(58): Selenocysteine
MRVLYLLFSFLFIFLMPLPGVFGGIGDPVXCLKSGAICHPVFCPRRYKQIGXCGLPGXKCCKKP

SEQ ID NO: 7879 - protein, 156 aa, Homo sapiens
  MOD_RES (35)..(35): Selenocysteine
  MOD_RES (46)..(46): Selenocysteine
  MOD_RES (65)..(66): Selenocysteine
  MOD_RES (97)..(97): Selenocysteine
  MOD_RES (104)..(104): Selenocysteine
  MOD_RES (118)..(118): Selenocysteine
  MOD_RES (132)..(132): Selenocysteine
  MOD_RES (136)..(136): Selenocysteine
  MOD_RES (144)..(145): Selenocysteine
ILSDESSSDEDEKKNKEESSDDEDKESEEEPPKKXAKREKPKQKAXSKSKKSVKSANVKKADSSXXKKNQNSSKKESESEDSSDDEPLIKKLKKPPXDEELKEXIKKLLASANLEEVXMKQICKKVYENYPXYDLXERKDFIKXXVKEVNISVFQV

SEQ ID NO: 7880 - protein, 151 aa, Homo sapiens
  MOD_RES (18)..(18): Selenocysteine
  MOD_RES (20)..(20): Selenocysteine
  MOD_RES (72)..(72): Selenocysteine
  MOD_RES (84)..(84): Selenocysteine
  MOD_RES (108)..(108): Selenocysteine
  MOD_RES (124)..(124): Selenocysteine
MQVHSMSASAPAAEGEGXPXQPASEKEPEMPGPREESEEEEDEDDEEEEEEEKEKSLIVEGKREKKKVERLXMQVSSLQREPFXIAQGKGQKLCEIERIHFFLSKKKXDELRNLHKLLYNRPGXVSSLKKNVGQFSGFPFEKGSVQYKKKE

SEQ ID NO: 7881 - protein, 122 aa, Homo sapiens
  MOD_RES (12)..(12): Selenocysteine
  MOD_RES (36)..(36): Selenocysteine
  MOD_RES (52)..(52): Selenocysteine
MQVSSLQREPFXIAQGKGQKLCEIERIHFFLSKKKXDELRNLHKLLYNRPGXVSSLKKNVGQFSGFPFEKGSVQYKKKEEMLKKFRNAMLKSICEVLDLERSGVNSELVKRILNFLMHPKPS

SEQ ID NO: 7882 - protein, 347 aa, Homo sapiens
  MOD_RES (13)..(13): Selenocysteine
  MOD_RES (15)..(15): Selenocysteine
  MOD_RES (75)..(75): Selenocysteine
  MOD_RES (91)..(91): Selenocysteine
  MOD_RES (171)..(171): Selenocysteine
  MOD_RES (192)..(192): Selenocysteine
  MOD_RES (231)..(231): Selenocysteine
  MOD_RES (242)..(242): Selenocysteine
  MOD_RES (261)..(262): Selenocysteine
  MOD_RES (293)..(293): Selenocysteine
  MOD_RES (300)..(300): Selenocysteine
  MOD_RES (314)..(314): Selenocysteine
  MOD_RES (328)..(328): Selenocysteine
  MOD_RES (332)..(332): Selenocysteine
  MOD_RES (340)..(341): Selenocysteine
MSASAPAAEGEGXPXQPASEKEPEMPGPREESEEEEDEDDEEEEEEEKEKSLIVEGKREKKKVERIHFFLSKKKXDELRNLHKLLYNRPGXVSSLKKNVGQFSGFPFEKGSVQYKKKEEMLKKFRNAMLKSICEVLDLERSGVNSELVKRILNFLMHPKPSGKPLPKSKKXCSKGSKKERNSSGMARKAKRXKCPEILSDESSSDEDEKKNKEESSDDEDKESEEEPPKKXAKREKPKQKAXSKSKKSVKSANVKKADSSXXKKNQNSSKKESESEDSSDDEPLIKKLKKPPXDEELKEXIKKLLASANLEEVXMKQICKKVYENYPXYDLXERKDFIKXXVKELIS

SEQ ID NO: 7883 - protein, 375 aa, Homo sapiens
  MOD_RES (13)..(13): Selenocysteine
  MOD_RES (15)..(15): Selenocysteine
  MOD_RES (67)..(67): Selenocysteine
  MOD_RES (79)..(79): Selenocysteine
  MOD_RES (103)..(103): Selenocysteine
  MOD_RES (119)..(119): Selenocysteine
  MOD_RES (199)..(199): Selenocysteine
  MOD_RES (220)..(220): Selenocysteine
  MOD_RES (259)..(259): Selenocysteine
  MOD_RES (270)..(270): Selenocysteine
  MOD_RES (289)..(290): Selenocysteine
  MOD_RES (321)..(321): Selenocysteine
  MOD_RES (328)..(328): Selenocysteine
  MOD_RES (342)..(342): Selenocysteine
  MOD_RES (356)..(356): Selenocysteine
  MOD_RES (360)..(360): Selenocysteine
  MOD_RES (368)..(369): Selenocysteine
MSASAPAAEGEGXPXQPASEKEPEMPGPREESEEEEDEDDEEEEEEEKEKSLIVEGKREKKKVERLXMQVSSLQREPFXIAQGKGQKLCEIERIHFFLSKKKXDELRNLHKLLYNRPGXVSSLKKNVGQFSGFPFEKGSVQYKKKEEMLKKFRNAMLKSICEVLDLERSGVNSELVKRILNFLMHPKPSGKPLPKSKKXCSKGSKKERNSSGMARKAKRXKCPEILSDESSSDEDEKKNKEESSDDEDKESEEEPPKKXAKREKPKQKAXSKSKKSVKSANVKKADSSXXKKNQNSSKKESESEDSSDDEPLIKKLKKPPXDEELKEXIKKLLASANLEEVXMKQICKKVYENYPXYDLXERKDFIKXXVKELIS

SEQ ID NO: 7884 - protein, 341 aa, Homo sapiens
  MOD_RES (13)..(13): Selenocysteine
  MOD_RES (15)..(15): Selenocysteine
  MOD_RES (69)..(69): Selenocysteine
  MOD_RES (85)..(85): Selenocysteine
  MOD_RES (165)..(165): Selenocysteine
  MOD_RES (186)..(186): Selenocysteine
  MOD_RES (225)..(225): Selenocysteine
  MOD_RES (236)..(236): Selenocysteine
  MOD_RES (255)..(256): Selenocysteine
  MOD_RES (287)..(287): Selenocysteine
  MOD_RES (294)..(294): Selenocysteine
  MOD_RES (308)..(308): Selenocysteine
  MOD_RES (322)..(322): Selenocysteine
  MOD_RES (326)..(326): Selenocysteine
  MOD_RES (334)..(335): Selenocysteine
MSASAPAAEGEGXPXQPASEKEPEMPGPREESEEEEDEDDEEEEEEEKGKGQKLCEIERIHFFLSKKKXDELRNLHKLLYNRPGXVSSLKKNVGQFSGFPFEKGSVQYKKKEEMLKKFRNAMLKSICEVLDLERSGVNSELVKRILNFLMHPKPSGKPLPKSKKXCSKGSKKERNSSGMARKAKRXKCPEILSDESSSDEDEKKNKEESSDDEDKESEEEPPKKXAKREKPKQKAXSKSKKSVKSANVKKADSSXXKKNQNSSKKESESEDSSDDEPLIKKLKKPPXDEELKEXIKKLLASANLEEVXMKQICKKVYENYPXYDLXERKDFIKXXVKELIS

SEQ ID NO: 7885 - protein, 161 aa, Homo sapiens
  MOD_RES (1)..(1): Any amino acid
  MOD_RES (75)..(75): Selenocysteine
  MOD_RES (96)..(96): Selenocysteine
  MOD_RES (138)..(138): Selenocysteine
XNVGQFSGFPFEKGSVQYKKKEEMLKKFRNAMLKSICEVLDLERSGVNSELVKRILNFLMHPKPSGKPLPKSKKXCSKGSKKERNSSGMARKAKRXKCPEILSDESSSDEDEKKNKEESSDDEDKESEEEYNLSAVRXEFWLCDRRLFWRPSFKSPAAYKS

SEQ ID NO: 7886 - protein, 559 aa, Homo sapiens
  MOD_RES (11)..(12): Selenocysteine
  MOD_RES (24)..(24): Selenocysteine
  MOD_RES (27)..(27): Selenocysteine
  MOD_RES (49)..(49): Selenocysteine
  MOD_RES (51)..(51): Selenocysteine
  MOD_RES (63)..(63): Selenocysteine
  MOD_RES (72)..(72): Selenocysteine
  MOD_RES (76)..(76): Selenocysteine
  MOD_RES (120)..(121): Selenocysteine
  MOD_RES (134)..(134): Selenocysteine
  MOD_RES (156)..(156): Selenocysteine
  MOD_RES (160)..(160): Selenocysteine
  MOD_RES (173)..(173): Selenocysteine
  MOD_RES (206)..(206): Selenocysteine
  MOD_RES (208)..(208): Selenocysteine
  MOD_RES (272)..(272): Selenocysteine
  MOD_RES (274)..(274): Selenocysteine
  MOD_RES (277)..(277): Selenocysteine
  MOD_RES (302)..(304): Selenocysteine
  MOD_RES (336)..(336): Selenocysteine
  MOD_RES (359)..(359): Selenocysteine
  MOD_RES (407)..(407): Selenocysteine
  MOD_RES (418)..(418): Selenocysteine
  MOD_RES (421)..(421): Selenocysteine
  MOD_RES (429)..(429): Selenocysteine
  MOD_RES (462)..(462): Selenocysteine
  MOD_RES (470)..(470): Selenocysteine
  MOD_RES (491)..(491): Selenocysteine
  MOD_RES (519)..(519): Selenocysteine
  MOD_RES (528)..(528): Selenocysteine
  MOD_RES (531)..(531): Selenocysteine
  MOD_RES (534)..(534): Selenocysteine
  MOD_RES (543)..(543): Selenocysteine
  MOD_RES (551)..(551): Selenocysteine
  MOD_RES (555)..(555): Selenocysteine
MGSRIKQNPEXXFEVYVEVAYPRXGGXLSDPEVQRQFPEDYSDQEVLQXLXKFCFPFYVDSLXVSQVGQNFXFVLXDIDSKQRFGFCRLSSGAKSCFCILSYLPWFEVFYKLLNILADYXXKRQENQWNELLEXLHKLPIPDPGVSVHLSVHSYFXVPDXRELPSIPENRNLXEYFVAVDVNNMLHLYASMLYERRILIICSKLSXLXACIHGSAAMLYPMYWQHVYIPVLPPHLLDYCCAPMPYLIGIHLSLMEKVRNMALDDVVILNVDXNXLEXPFDDLQSLPNDVISSLKNRLKKVSXXXGDGVARAFLKAQAAFFGSYRNALKIEPEEPIXFCEEAFVSHYRSGAMRQFLQNAXQLQLFKQFIDGRLDLLNSGEGFSDVFEEEINMGEYAGSDKLYHQWLSXVRKGSGAILNXVKXKANPAMKXVYKFAKDHAKMGIKEVKNRLKQKDIAENGCAPXPEEQLPKXAPSPLVEAKDPKLREDRRPIXVHFGQVRPPRPHVVKRPKSNIAVEGRRXSVPSPEQNXIAXPAXLHILQKSIXHFAAKFPXRGWXSSSH

SEQ ID NO: 7887 - protein, 1009 aa, Homo sapiens
  MOD_RES (11)..(12): Selenocysteine
  MOD_RES (24)..(24): Selenocysteine
  MOD_RES (27)..(27): Selenocysteine
  MOD_RES (49)..(49): Selenocysteine
  MOD_RES (51)..(51): Selenocysteine
  MOD_RES (63)..(63): Selenocysteine
  MOD_RES (72)..(72): Selenocysteine
  MOD_RES (76)..(76): Selenocysteine
  MOD_RES (120)..(121): Selenocysteine
  MOD_RES (134)..(134): Selenocysteine
  MOD_RES (156)..(156): Selenocysteine
  MOD_RES (160)..(160): Selenocysteine
  MOD_RES (173)..(173): Selenocysteine
  MOD_RES (206)..(206): Selenocysteine
  MOD_RES (208)..(208): Selenocysteine
  MOD_RES (272)..(272): Selenocysteine
  MOD_RES (274)..(274): Selenocysteine
  MOD_RES (277)..(277): Selenocysteine
  MOD_RES (302)..(304): Selenocysteine
  MOD_RES (336)..(336): Selenocysteine
  MOD_RES (359)..(359): Selenocysteine
  MOD_RES (407)..(407): Selenocysteine
  MOD_RES (418)..(418): Selenocysteine
  MOD_RES (421)..(421): Selenocysteine
  MOD_RES (429)..(429): Selenocysteine
  MOD_RES (462)..(462): Selenocysteine
  MOD_RES (470)..(470): Selenocysteine
  MOD_RES (491)..(491): Selenocysteine
  MOD_RES (519)..(519): Selenocysteine
  MOD_RES (532)..(532): Selenocysteine
  MOD_RES (555)..(555): Selenocysteine
  MOD_RES (608)..(608): Selenocysteine
  MOD_RES (626)..(626): Selenocysteine
  MOD_RES (632)..(632): Selenocysteine
  MOD_RES (691)..(691): Selenocysteine
  MOD_RES (693)..(693): Selenocysteine
  MOD_RES (698)..(698): Selenocysteine
  MOD_RES (707)..(707): Selenocysteine
  MOD_RES (740)..(740): Selenocysteine
  MOD_RES (762)..(762): Selenocysteine
  MOD_RES (777)..(777): Selenocysteine
  MOD_RES (791)..(791): Selenocysteine
  MOD_RES (797)..(797): Selenocysteine
  MOD_RES (804)..(804): Selenocysteine
  MOD_RES (809)..(809): Selenocysteine
  MOD_RES (812)..(812): Selenocysteine
  MOD_RES (822)..(822): Selenocysteine
  MOD_RES (824)..(824): Selenocysteine
  MOD_RES (844)..(844): Selenocysteine
  MOD_RES (850)..(850): Selenocysteine
  MOD_RES (903)..(903): Selenocysteine
  MOD_RES (905)..(905): Selenocysteine
  MOD_RES (923)..(923): Selenocysteine
  MOD_RES (936)..(936): Selenocysteine
  MOD_RES (961)..(961): Selenocysteine
  MOD_RES (981)..(981): Selenocysteine
  MOD_RES (1007)..(1007): Selenocysteine
MGSRIKQNPEXXFEVYVEVAYPRXGGXLSDPEVQRQFPEDYSDQEVLQXLXKFCFPFYVDSLXVSQVGQNFXFVLXDIDSKQRFGFCRLSSGAKSCFCILSYLPWFEVFYKLLNILADYXXKRQENQWNELLEXLHKLPIPDPGVSVHLSVHSYFXVPDXRELPSIPENRNLXEYFVAVDVNNMLHLYASMLYERRILIICSKLSXLXACIHGSAAMLYPMYWQHVYIPVLPPHLLDYCCAPMPYLIGIHLSLMEKVRNMALDDVVILNVDXNXLEXPFDDLQSLPNDVISSLKNRLKKVSXXXGDGVARAFLKAQAAFFGSYRNALKIEPEEPIXFCEEAFVSHYRSGAMRQFLQNAXQLQLFKQFIDGRLDLLNSGEGFSDVFEEEINMGEYAGSDKLYHQWLSXVRKGSGAILNXVKXKANPAMKXVYKFAKDHAKMGIKEVKNRLKQKDIAENGCAPXPEEQLPKXAPSPLVEAKDPKLREDRRPIXVHFGQVRPPRPHVVKRPKSNIAVEGRRXSVPSPEQPQPYRXLRESDSAEGDEAESPEQQVRKSXGPVPAPPDRAASIDLLEDVFSNLDMEAALQPLGQAKSLEDLRAPKDLREQPGXFDYQRLDLGGSERSRGVXVALKLXHPYNKLWSLGQDDMAIPSKPPAASPEKPSALLGNSLALPRRPQNRDSILNPSDKEEVPXPXLGSIXIPRPQGRKXPELGIVPPPPIPRPAKLQAAGAALGDVSERLQXDRDRRAALSPGLLPGVVPQGPXELLQPLSPGPGAAGXSSDALLALLDPLSXAWSGSXLPSRPAXPNVAXPFXPQFSFPPAGXPXPFPQPPLNPFVPSMPAAPPXLPLVSXPAGPFGAPPASLGPAFASGLLLSSAGFCAPHRSQPNLSALSMPNLFGQMPMGXHXSPLQPLGPPAVAPSRIRXLPLARSSARAAEXKQGLALRPGDPPLLPPRPPQGLEPXLQPSAPQQARDPFEDLLQKXKQDVSPSPALAPAPDSVEQLRKQWEXFE

SEQ ID NO: 7888 - protein, 466 aa, Homo sapiens
  MOD_RES (25)..(26): Selenocysteine
  MOD_RES (28)..(28): Selenocysteine
  MOD_RES (31)..(31): Selenocysteine
  MOD_RES (40)..(40): Selenocysteine
  MOD_RES (44)..(44): Selenocysteine
  MOD_RES (88)..(89): Selenocysteine
  MOD_RES (102)..(102): Selenocysteine
  MOD_RES (124)..(124): Selenocysteine
  MOD_RES (128)..(128): Selenocysteine
  MOD_RES (141)..(141): Selenocysteine
  MOD_RES (174)..(174): Selenocysteine
  MOD_RES (176)..(176): Selenocysteine
  MOD_RES (240)..(240): Selenocysteine
  MOD_RES (242)..(242): Selenocysteine
  MOD_RES (245)..(245): Selenocysteine
  MOD_RES (270)..(272): Selenocysteine
  MOD_RES (304)..(304): Selenocysteine
  MOD_RES (327)..(327): Selenocysteine
  MOD_RES (375)..(375): Selenocysteine
  MOD_RES (386)..(386): Selenocysteine
  MOD_RES (389)..(389): Selenocysteine
  MOD_RES (397)..(397): Selenocysteine
  MOD_RES (430)..(430): Selenocysteine
  MOD_RES (438)..(438): Selenocysteine
  MOD_RES (459)..(459): Selenocysteine
MLKWPIPGQVALFQILRCRGNSRRXXVXSLXVSQVGQNFXFVLXDIDSKQRFGFCRLSSGAKSCFCILSYLPWFEVFYKLLNILADYXXKRQENQWNELLEXLHKLPIPDPGVSVHLSVHSYFXVPDXRELPSIPENRNLXEYFVAVDVNNMLHLYASMLYERRILIICSKLSXLXACIHGSAAMLYPMYWQHVYIPVLPPHLLDYCCAPMPYLIGIHLSLMEKVRNMALDDVVILNVDXNXLEXPFDDLQSLPNDVISSLKNRLKKVSXXXGDGVARAFLKAQAAFFGSYRNALKIEPEEPIXFCEEAFVSHYRSGAMRQFLQNAXQLQLFKQFIDGRLDLLNSGEGFSDVFEEEINMGEYAGSDKLYHQWLSXVRKGSGAILNXVKXKANPAMKXVYKFAKDHAKMGIKEVKNRLKQKDIAENGCAPXPEEQLPKXAPSPLVEAKDPKLREDRRPIXVHFGQAL
